United States Patent Application Publication US 2008/0114160 A1 - sequence listing, part 5

SEQ ID NO: 3519 - DNA, 22899 bp, Oryza sativa
aagtcaaatacattcgactaacaaagtcgacaaaatagaactccgcacgctcggagtcaaatacattcgactaacaaagtcgacaaaatagaactccgcacgctcgaagtcaaatacattcgactaacaaagtcgacaaaatagaactccgcacgctcggagtcaaatacattcgactaacaaagtcgacaaaatagaactccgcacgctcggagtcaaatacattcgactagcaaagtcgacaaaatagaactccgcacgctcggagtcaaatacattcgactagcaaagtcgacaaaatagaactccgcacgctcggagtcaaatactctcgactaacaaagtcgacaaaatagaactccgcacgctcggagtcaaatacattcgactaacaaagtcgacaaaatagaactccgcacgctcggagtcaaatactctcgactaacaaagtcgacaaaatagaactcctcacgctaggagtcaaatactttcgactagcaaatttcgacctcgtcactccttcgaaaggtgaggaggacggcggttttcgaactattttgccttagtccaaaaccagctcaggaatgctcgaactctattctcgttcgagctcaaaaagcggaaaatcagcgtgacgaggtaaaacacgtttcgacctcgtcactccttcgaaaggtgaggaggacggcggttttcgaactattttgccttagtcctaaaaccagctcaggaatgctcgaactctattctcgttcgagctcaaaaaacggaaaatccgcgtgacgaggtaaaatacgtttcgacctcgtcactccttcgaaaggtgaggaggacggcggttttcgaactattttgccttagtccaaaaaaaccaactaaagaatgctcgaactctattttcccctcgctcgagctcaaaaggcggaaaatgcacatgacgagataaagtacgtttcgatttcgtaacttcttccaaagataaggaggacgtagtttacctaagggtgcttgcacaattgaaataaagagcatttataaagaaaagaagaaaggaagggtttatttgatgttaagaaggtataacaagttacatacaaactctacaaagaagaaagaaaagagtcgggataaacaatgttgagaggagaaggcattactgtatatgaaactattgaataacgccttttccatattctacgttggcgttcggatggttggaagttttgccaaaaggctttactagcaagattattgttcgaacgccgttccctaaactcaagtacaaagtcacgtaaactgtcatgtcgatggcttcgttgccatcggaaaaacttaaaagcaaatatacaagtattatcataataggcttcgagttcgtcatcggagatggcggtcctggcagaagaaagctttgcagggtctcgaaatgctaagtgcttcacatttcgagtaggcaaagtgttgttgcgtcgaatcacaagttttcgattcgagttaacctgcagccccccaaagaaagggaatttccatgaaaagcatgcaataagagaaaagcattatagtcagctacactataaatttttacaataaaggctctcaaccataacggttttgaagcagcaaaatagcattgttttcgaacatacgaagcatccttaactattcttttcacgaacgtcacacctgtgcgctcgagctcggagtactactgtctttatcttgttggctcgaactggccggctgtgactttaatcttgaggcaagagatgctcggagagacctcagggtatcttcatatcctttcttcttccagtaaagcacttggaaagcctttacgatgggttgagctgcatctcgaagctgtgcaaatttggcctcatcattaagcataccttgtatatcagctttaagggtggtaaagtgttcacacccatttgaacgcagacaggccgaaaggctctccacagcagttttcgagcagcgagatgcaaagggagtaacgctatcttttagcccaatggaaaattcctcgaaccattttcccacagctgctaaagtattttcttccgatagcaagctgatgtcagcccctagacttcgcaacgcgattcgaacggtctcgcaacttttcagaagaagttggcggcaactttcgttctcgagctctaaagcagatatcttctcgctttgatttttgcaggcgagttcgagttctttattcttcttctccaagacctcaacttgttccttcatcttgtcttctgattcagcgcgttgtcgagcgacgtcttgatactcgatgatttttcgctcgaatgctttttcacgagcgagtaatttcttcttttcctcagtaagcaacttcttttcttcggaaagctctttcttttcgccgcttaacttgcgcacgagatcggtggtgattttcttctcgtcggccattcgatcaagtttgcagcgaagataatcccgatccttttcgagtttagcgatgcgatcaagtgatttcttccatcgcgtgcaaatagctcgaagagctttccgagcaacaccacgttgaagacgagcaaggctcgcagtctgcgcatcagaaaataggttttaagtcaaaaaaaatacctgtgcagcagatacatcaagtgctgcccaagaggacataagatcattttcttccaaaaactccttttcaagatcaggagtaatcagaactttctcgagttcatcaccaatcgaactcagggggtggcgatactttaggtcattcaaacacaagtttgggccatgatggctactttccccgagttcattgaaattaggaagacccataagccaatgtccatcttttgcacatcgttcgctaaaaccaccaagaacgttttgtatcagctctggggaaggggttgcgatgaacggcagtgacggaggtggagtggggttcgaactacctgtaattcgaacacctccatcagcagcactcttccctgcttcggacttttcggccgcattgacgggcgtttttgccttttttgcaaccaaatctctatcagctcgaagagggtttgttgtctcaacagtatcacccacttgggtcgaacaatcttcatcgacaaccgtgttggctggggcaacaacatacagtgaagctacttcttttgtcgaaagggcaaaactagcatcagctcgaattggggtgacatggatggcagaaagatcaatacggatatcatcttcatccaactcttcatcactgtcaataacaagctgcactcatttagaactcggttcaggcggaggactgctggcagttttcttccttttcaaatcagctaaaacagtaggaggaggaaccgttttgctatcatcagattcagacgagtcgctcgagttgtcgctcgaactgttactcgagtcgctatcatcactcgagtcgttctcttcttcatcagctccttcctcgccttcttcttcttcagcattttcttcaccaatttcttcgtcaacatcttccaattcaacatcatcatcatcatcatcagaagaaggcttcacagatttctttttctttagtttggggacaatttcaggatgaacccggacagggatatcggagcctagagaggcgaagacccgattttgccttttcccgttttgaagtgtcaaaaatttcaaatgctcatccttggtataagggccaagaaatttccgaactgggcggaccatatcctctggaatcacaactacaaggaagaagataacaaagggagaaaataaatcttcttaactaagtcactttttcaagaaaaacaaggttcgcaaaaaatcaagttcgaaaaggaaacttacgatcagacgaaaccacaaatggaggaagactggaagggcaatcttctgggatttctccaagagtgatatcccagccgctcgaaagaggcctaattttgagaagaacaaactcttccaccaggtctcggcagctaaagttcgaaacaagttcttcgattcgaggttgtatggcagtgaactccggcgacaaagagactgatggctcggagacagctttcggtttcttcccagagaacgaaaaaggacaatccttatcattcagcaggctaacagggatttgatgataaaaccacttcgactgccacttgttcccccattttgctcgaatagcagacacagctggccatggacttccgcgcttcggatgaggagcaaagtttacacacccaaacttcgagttctgtttggtgtagtgccgagtacaatggaagtatgcaaagtcttcagcttggagagtcccaccgcagcttcgaaccatctattcgaaaagcccaattcgaactaaagcattcggagtcaattgaggaaactcaagtttgaacaatttcaggacctcgaccaaaaaagtgctgcacgggaatttaaacccggcgtagaagaaatcctcaaacacaagagtgtatcccagcttgggagaaggccttgattctcccactggtcgaattacaacatttcgaccagatatccaaccaacatcaacaagatcgtttaagtttttgtccttaatcaaagaggcaccaataccacaagaagtattttcgtggttttttgatttcttggacttcgacttttccgcagttttcttgtttttccccatgttgtgtagtgagaaaggaagaaatcaagcaaagcaccaaaactcgaatggaagaaggaagaaagagatttagttcgagtcttttgtgatttcgagttgatggcagaacaaacgagtggtggcgtaggtcacgtgatagcgacccctcctggccttatatagcgcagggtggtaagggtcgcgggtttacgagcggacacgaaacccaaagcgacgcgaccccttaagcgcaccaatgaaataccagcacgtggcataaaaaaaacaacatttaaaaaataataaataaataaataaaaataaaaaataataagaataaaaataaaaataatgaatagtaaacgtggcatatatgcatatttgaatagtgtgtttcgaccgaataggaggacggcggttttcccccttttttccataaactcaagcacggtttcggccgaaaatacacatcgcccttacccgtgaggggcttgttgtagcagggtgcaaacaccttttcctccaattcggtcaaaacactacgaggttttgcaagacctaagtatccagaggggaaaacactcattctgagtggaaactaccttttcaagaggaagaacaccttcccaaaaggaaaataccttcctagaggaagaacactcattcgaatagaaaatacctctttgggtgaagaacaccttattagggacattccataatcgctaatacaactacacatattttggacaagttacaatttcacaggtgttttccaaggatgaaagagaaggcaaagggggaattcgaattcccaggaggaagaagacggtccaggacggaaaatgcatttttcccaagagttcgaggaagagcactacccgaacaagagaagatgccaagggaagattccctggggaccaccttcaaccactctcgccagctagcacctaaaagactaaaagacccctggagatgtactagaatgcccccacagacgctgatgtggcaggggcattagagtaaacttacaaagacccacaggggtaaaaatgtaatctcacgtgtacgaccaccggtaataaaagccagtcaaaaacctgtagcaggacaagacatcttgaatacaaaagtaatcctcaaaagttgtgtttgctgttcgagctcgtttctaaggataggcgggaaaacacttctttccggcctatccccgatcttgttcgtgacctaaggtcacaacaaatagccattggattaaaaagcaaacaaaatagatgaaatgaacatcagccgttggatgaaagatgatcgagaaagaagattctggagtatgtactactgcatgaagcaaaacttattaatgaaagtgacaaaatcaaccaatcttacaacatgccagaagaattctacaaaagggtccactgctagagtagttctgaaaaatgcaatagttaattacataactttaacataatcatgcctttttatttccttaaaaacgatggatgaacttagagagaatctactgtatgcataaaattccaagttgaaattcatactgtgttgagagtaacaacaagaaatgcaatagattaaaaagaagaagaaaaaagtcaaatgctacagttcacagcaaacttacctgtcttatgtttgcttgctagaacactgtttgctacatcatcgtttcttttctcttgaatttttcatataaaattgacttcctgattttattaatagcagcaaccctattctggagttcatctggacaaatataagggcagtgtgcaaaccaaaacataggactgtcggtttcaaaagaagaagaagaagaagaagaagaagaagaaagaaaaagaaagccataggattgtccatttacccaagaaatctatttttgacaggtttaccatcatgacttattagaagagtgaatagaccatcaatagcaacagcccctattaacagtccctgcttcactgaacttgcgttctttaattatgagaaaggagggataagaggttgacaatgataggttatagaacattaaatgagtctaaggaacagaggccgctctcccttgtacattaacacatggtttccaattccacaaacacttaatgatcaccaataattctaatcaagataaggatcaagcacaagaataccataaaatcagcacataatgctaatacccagcacctcagagacagatggaacactgtgtttgttatgagtcactatctgcatatgcacatgatgccatctgccatccgataacaaatctgggatgttgcgactataaatatcgattatcaggtaaaggagtgaccaacgttagagcaaacgttttgaaagctaactaaaataaaagggaccacctatatatttgtcgacaaattttctagtaaaaatttgacagatgtaattatagtacaatcgtagtgtaattacactataacttgtatgtaattacactgtaacttgcatgcgactatagtgtaacttgtatgtaagtttcacgtaattttgaatcgttagatctattacaagatttgttctggtgaggaagaaaaaaatcatagcacacacatatgtgaaaggatttgttcccacgacctctattttactgaaataacatgttaccgagagattcttgaaagttacatacaagttacattatagttacagtgtaattacatgcaagttccagtgtaattacactacgattgtactgtaattacatctgacaaatattaggggaagaaatttgatgacaaatatctagcaaaatcgaaataaaatagataaatctgcaggtaaagtaaggcactctataaaagaaccaaactaccaaagcttgttttgtctttcacattcatttcaactcatgaaacgattgaccgaagcaagagatgttattgcataaccacataggcctagttaatatatttctgacatatatcattgcttaaattcctggaagtcatagttatgttgagcagtttggattattcatatcttcaaatatacccagtatgcatgggactggttaaggttccaactctcgatatgagtaggtacaacgtgaatgtcgtcaaaatcagatctttttccaaggtaactagctgggtggcccgcgcaattacgcggctattatctatataaaattatctattttaatacgattttatttaaaatttattgaatagttatcttgttattttaatacttttaaagaccaaaccatatcatctccgtgtttaattttatagtttttaaaagtcatcctattccttatctgtttgcttgatctattactatttatatttattctcctcggaaactttaaaattttgtttttatagtttttagagtttattgtctcattgagtttcgtttttataatttttagaagtcccatcaaacattgccactctattcctctactgcccatccgctgcctcctctctttattattactgggatttttaaaatcgaacataattattatttgggttcattttttactttttagaagtcccgtcaaaccattagcggctttgccactatactcttccacagctcgcctgctacctcccctctttattgtcattgagattttaaaatcaaatattattatcatttttttttactttttagaagtcctgaacttttaaaaataggacctggtagtttttagagtttattgtctcgtttagtttttagagtttattgtctcgttgagtttcatttttataatttttagaagtctcatcaaacgctgccactatactcttctacagtctgtctgctgcctcctctttttattgtcattggaattttaaaaatcgaacataattactgtttaggtttttttattttctagaaaatcccgccaaaccattagcggctttgccaatgtactcttctatggctcgcatgctccctcttctctttattgtcattgagatgttaaaatcgaacattattatcattggtttttttacttacattttagaagtcctgaacctttaaaatttggaccttgtagattttagagtttattgttttgttagatttcatttttataatatttagaagtctcatcaaacgctgtcactgtactctatgtaccattgtttagtactaaagatacaattatattacatgtatttatgttatcaatcttcaccgttctaatttggttctaccacagtctaacggcttggattttattcttcgattaacgtgataatttataattaaaatagtcttcacccgttgcaacgtacgggcaatttttctagtataataatacttctgagtttcttttttcacttaacaaaaattctagcatgaaaaaagttacaaaactcttaaaatttctactattagaaaccatatataaatgcattgtttactaatagaaaaaaaattcctagcaacataatcaccttgaaagattgaatggcaacatatactgatatacagtaacccgtgtatgtagttgtatgagcgttttcttgtggattcaggtttatgtttgctcagttggttgctttaaggataacacgatccattaattaagtccatgtccgtttcacacgctaaacagccccatgtgaaaggagtccggatccaatacaaagttgaattttgtgcttatacatctagtatttgtcagtgtggactcctaataggatttatgtaaattttttctctacgtatatattccatcaatctcaaccactaaaatctagaggtatcaagatctaatggctaatattttttctttttctccaattaacgtgggattttctagcctctacatcgaacgtgatgtcttcttttcgagctgtcttaataatataatagatattgataaaaacaataggagtcattgccccaacctaaatggcaaaatactcatttttagtcatagaacattaaataacactaacccaccatttgatcaatttcagggtggtgcttctttcccttgtcgtagtacatcatgatttcgtccagtaaaactcaaccacgggagcgtctcactgtctgcaagcaagcaacaaaaaatcactaatcaccacattttacaccctcgaggatcagtttcagaaccatcaacagttgaatactggacaaatctctcagctttcatggcaatgctcatgtttcagcacacacactcggatacagtatcaaatttgcaaagggagaaggcgtctcatctgataacaatcaccccatcctctcaagctctgacagtccttccagtccaactatccaagacccagtgaagcagcaatgctacgttagagcccaagactacacgcatactgggccacaaacttttcaggcccagtactactctgcctcactgagccgcgctcgactgggcccgtgtaatgctattgttcttttttttgacgtaaaaaatatatttttgacgtaataatgctattactctcgttcgatgtcggcaacagtggagtgagcaacagagtcaacggccatgcacaagcctgcagtgcagagcacagtactgctacgtccgcgacatgtcaagcacgagaaagctttggtaccggaattcagcaacgccagtagtgacgagtggtcacgagctagactagcacggatcaacacacagaagttcaagacaaaattggttctggagcattgaaagttgtccattttgattttatagcatccaaagttcacatctcattttgatagcatcggaagttacatccgttgcttctttttagcattccgtccaaacttccgttagttttattttctaattagtattattcttcaacaaaaaactaaatcaaaccccaatggtggccctcttcctcttgcttgtcacctccaaacagtagtcgtacaggagctcagagcggtcagtcatggtgcgaacacaggatcgatgctggctccacaagctcgtcatgtaatacgtacgtgagcccagcctcacaagctgatcatccgcaagccactgtgttcgtccgcgcttgctaggtgtgatctatccactttctaggctctagctttgcccggacagcgccatcgtcgatcgatctcatctgccattccgccatgctagagcttgttcaaatgcggctgtgccgcttccgagttcgtccgcgcgcactgctctcggtctctctcctagatgcgtcatccgatccatgaatgcccgaagcgaagcaacgtcctccagattattatcggcacccttgagctcgctccgatatgctgctcttgagctcatccatcggcccccgaagcaccaccctcgcgctcgtcgcgggctcgcctgagtaccgacccgctcctccttgccctggatccgttgtctgctgacccaagtcaagagccgccgcctctagcttgccagaaccagccaccatccaaggctccaactcgctcagcgctatactgtcgtggtcgagctcacctgctgccttgaatcgaagagtggtcaaccataggagggagagtgcaggaggaacaagacagatgtaggatggggtgaggagacgaactgctgacggaatgctaaaaatagtaacggttccagttttgagtgctattaaaatgaaccataaacttttagtgctatgtaaccaaaatcgagtactttcgatgccatagaaccaattttgccaaagttcaatggcctaatcttttcacttatacttatacttatcagctaaaatttaaatttatagctttaaatttgaatttaattttagactttttcatcgtagtttatttttagcctttgtttttatatcgttgagaacacgtatataaaagtagttattcataaattatttttttatttgtaaatactcactttattcacaaaagttacgcatattagagcaggtacaatagcaagctacaaaccagctataaccacatatcgagaaaaaaaggaagagagagaagaaagcgggatatagatttgtagccggctgcaagacggactccaagacgttatgtgtatgagatgtgggaccaagtattaatggtgtagtatatttttatagttaactattgtatgaatgggctattagactagttatagatgatttggagccaacagttgactatactattaaacttgctcttacttttgacaccaaaactagggaaaaattaaatcaccttggatgttacaaaatcaatgagtgaatgcaaacatacaaccaatgagtatttagatgactctttggcttctaataaaactcttcatttaagttctgaatatataaagactacaaatagaaatagcttattggaaaaatttaaatgtaaaatatgtataacttttgtggacgaagggagtatatcgtttgggttattccgccgaacagccaaacgatgggctgcaaaagtctgagtccgcccgggcagacgcggccagaagcggcgccgtgcatgctcgggatccggaccacaccgacggtcgacgactcgccggagcgcgcgcctcaagaacaaggaaaaaagagaaaaaaaacacggcgtcgcgcgccccgggcggcggccggcgcggagcggaaatcgagcggcgagcatcgcgcgtgcgcccgtgcggcgacatcgggcgcctcggatctacccaaccatacagatgcagcagctagcagtgggatcatgtttggaagttttattattattattattattattattattattattattattattattattattattattattattattattattattattattattattattattgtcttctcacgggcacagaaagataggccgatcgatgagagattaattaattaactagctaaacggtggctttaattctctgctactggtgtactaactccaaggtgcattggatggattgatcattagctgattgattagggttttaattaatcttgagctagctagctacaacgatctcgatcgatcgattgacctgccgcttgttttgtcattgttttcttgcttggtagcagaagtacagtacaagcataagtaaactgaaatttaaaatggatctacgaagaaaccattgatgagtgcatggatatatttgtcaatttcttgtatcaatttttctgatggtactgtgctgtgttctggcttggttttttatgtatgcatgcccacttgcacgcgtagaacttgttctacgtacgccacctttgacaaccttgccgcagtgcatacgtaacgtacgtacgtactgtatagtggtggggtgtcggtactcgcgtgtcttcaatattgttgtgagcaaaatctacgtgtatacgtagacgatatcaaagtaatacgtacacgtactaacctactagctagatggcaaatggacaaaccgtagtagcagattttgatgctcaacagatcgatcacatgcatgttccaatttgaacgggagaaaatactgaaatttaagtttctttcacctgcagacttagcttttcaaacgctctatatttttattcaaaatttgaaaatatatctaggttctctttaattagtataactccagatctcatatccatgttatatttgaaatttatatgtaaattatactggtttaaaattttatatgtttcataaaatgagaacaaaacgatttatccaaatattattaatgctatccccagatccacgaattaatggagctagagacaccccgatctaaaaattctcgagtctgaaattgtgcaaaacgggaattaatgtagttacgtggaatttagaaaataagttagaaggtaaaggttgaaaaaaccagcttatcaaaattctcacccattgacttctcataagttagttatcaaaattttgagcttccctagacaaggggcttcgattctatgtgtgcgtccatctgcatcaattctgtatagtgatatgtagagggtataagattgtaaatacctgaaggtaaattacctataactagatgtaaccatgttccaatacaagtcatcgccgctatctgttgtccatcttattccgccgttctattatacatgccatgcatcgtgtcgatcgatcgcaagggccgtagcaatttgacgatcaaattttacatcgaacctcgttcattgtacgcttcgcaccgtgacatctactctaattcctaattagctacgccccaatctgcataagagtgccgcagcatatgggcacggcttaggcgccggccgctccgtgacggaacgggcaaccgcggccgcgcactcgcttgcattgacctgtcgcggccggacgaacgagccgcgcgcggaacatcgcgtccgggggctccggatcgcggtcgaccgccccgcccgcgcgcgcgcgcgtccacgtacgtgcggcgtgccgttccttccttccccgacctcacgtgggcgcgcgccgtgcgcgccacggccgccgcgcgctcgcgctcgcgcgcacgtacgcgcgctcgatcgtacgggacacccggggcggcaacgccgagacgcgagtgagagacaagagtaaaacgcgcgcgcggtgcggtggcagcagcagcagcagagcgcgcgcgctgcgcgtaccgcgagtccgcgactgtagtctgtgcaggggtcgcgcctcggcttcaagttttcaacggtggtagccacaggccaccccacatctccacttgtgctgttgtgcaaccgctcgcgcgcatccgtgtccgtgcatgtgtggaagaaaaaaccttttaagcatatgcatgtgcagcagtgcacgtacgggggtggtgatgaactggtgaggccgttgtttgtctagctcgttacaaaacctctaccccctaattcgttctcacgtcaagaagagaaacgtaacatgccgtaattctcgctgtaattcagtcattctgatacggcgcgatcgatctctgaacagtattgaattctgaaatagtacgtctgctactagtactagctgagctactgagtttagcagtaaaaattgcgcctgctttgccgaggtttctgctgtaaaaatattccatccacgtactacctcttatgcccgtacgtgcaaatcaagagagaattcagagcagtagtagtaccactccgttttttacccgaactagctaaattctttacccgtgcagaaggtatatcaggcgggcaaccgggtccagcgtacgtccgtacttcgatcaccttgcacaagctaggttaatgtccgggccggagatagatcggaaacacatgacacatctgttgcatgtacacacaaaagatctagctgcaatatactccgttgcacggttgcaaggtgattccgatttcgaagcattcatcagtgcaaccggccggggacgtgatcgagctgggccatgcaccgcatcgatcgctgggttggtacacgcagcagcaccggccggtttgcttgctgctgcaacgatcgatccagatgaaaatcagagcgcgtcgcacgcgggaatctccgtatgatacgcgatttccccctcccgcgcgcgcggccgcgacggcgcaaccaccgatcagcaggacggggaggggtagttccagtacgtgctcgccacggccgcctgattgactgctgctacgaaatgcacaacgtcaaaacggagaggatcggatcggacggctacgtacaggtacagcgccagtacgcgtgcagctacatcacgtctccgagaccatttcgctccgataccgtattgagttttccgtatatcaaaaatcattagctaaaccctagaaaaagcagcagcgataaaatttgatggagtaatagatatactacatccgtcccaaaataagttcttttttagctttctgtatctaaagtttgatcgtccgtcttatttaaaaaaattacgaaaaaataaaaaaaaattagtcacatataaagtaatattcatgttttatcatctaataacaataaaaatatactaaaaaacaataaaaatattgatcataatttttttaataagacaaagagtcaaacattgtatccaaaaactgaaaaataagttttttttaatggaatggaggtagttcatgagtttagtaaacaaaattttaaatcgtagtgctcgtaaatattacacacgagcatataatttcggtaggattatagtatggttttgaattcacttctggctttggttttcgtcattttaacatgtgtacaagagggggctcatttacgtgcgtgtgtgtcctccgtataattgaaaagattattatctgataaataatacacttgtatatttttgccaatatgtggctactggctgttgcaactttgacagtacaacctgaggggagaagagaaggtgccgtccacggatggcatcatggtaagtgtagctgcagtggacgtcgccgtcggacggcctgctggtcggtcagtcactgcagcatgtaggcaaggcaacagaacacacgacagaacaagacatttgcgatccgtcttgctacagatttttcctacagaaacttgcgcccggtgtttcagattgtgatgtgagttggaagcgtgcgaccgtgtgaatgaatttcgatggctataaaccaaagcaggggaaataccaggtgctacggtaacggtagcatcaatgcatcatggtgccgttccacgaaatattcagggaaaaaaagagagagtacaaaatgcagagcgtgctgtcatatagtacaatcttgcaaaatttcaattccaaattcagtgacacacacaaattttgggccattctgactccacttcttcgattctttggtatgatgaagtactacaaacagagcatgcagatgtagttttttttttcagacaattcaacgcatttgcgcgcaaaaattcccgtaatcgcattcgtttagtaacggttcatggccgagtacacaccaacgatcaaatgcaatatgatcggtttacatgacagtaggatagatccagtctggtaaatctgccgataaatatgggtaccggattacagtcaatcccattctgggagctctaattaaagaaaactgaattgcctccttgaaattgcaccagtactaggaaaccggcaatttttgccttcaaaattgccaccgtgctccaccagctgtacaattgagaatagctttaatttaccctacctcgctaagttatcgccgcttgtatctgttagtatattcagcctacgcgccgtcttcgtgaactcgctgcaaattcagaacaggtactttagtccatcaagtattatgttcggtacacaaggaagaaagaactgtagcaaacacgaattgagaacgatggtttcttggacataatggatagaaggtgttttggtgtcccagcttggaactcctctaaagtcaatgtaccatatggatgcttccaaggcaagaagacctagagtttgggtgcttcaagttaagctaacttaaatataccacttaaaagcctagaaatatcacaactacgacaatgtggacatttcaatgttcttaaaatgatagccattagccaatttaaatggagttataaaggttaccatatgcatcttatcagatgaccctagggaaaatttgaagtaagtaccagcgcattaatgatttgtttacagcataaaacccgagaaaataggataaacggccttctatttgatgagtggacatgactaaataactaaccaattcataaaacaggaagtattctgcttgaacaaactataacaataatctaaaactggactgacctgaaaggttcatctccagtgtgcttgagtgccccagccgcatcacggtagaaaacatgactcatcagctcagctttctcgatgccgaacatgtcagcaagccgccggtataattcctcatatgaaccaacaacagagagatcaagtgtgcgcccgacatcctccgactgcatgaataccttgcagtgccctgtttccagcccaacatcaagtaccttgttgtcttggcacaatggaactcctccacatgacaaattatctgtggtgccattctgattacttctcgggcttgaaacatcggagttactcttattcaccgtattttcagcattaccatcagaagagctcttcttaacatccaccgaagcagcatcacccaaggatatctgctgctctgtgagtatgggttttccgaaaagcatcagctgggctggcgccttcttgccatctgatttcttgttgttctgggggctaccaatggtcaacaagcatgagatatcatcccgagcagccggatgaccgataattagaccagcggcgatcctcggctgcatgccgtgatcaagctggtgaaagccgtggggcgatagactcgactgcagtttgttaaggtggagatctgataaagatataccaaattgagcatgcctggctccctgtatgcctgcaggagtgccatccgggaaatagcacataggaccaaccccacgggcgagcgggtttccatggaacatcggtgtcggaaattggccgtcgatgggaagctcggggtacaacggcacgcaaagcttcttccgtggaggcgagaatggagcaaggtggatggccggcatgtttgacacaagctcaaccaaccatgggctcaccctcttcacattctgtaacaagtccggttcatcccatgaaacctgcaaaagccattcccaaaacatcaatgcaagcaacaaaccatggacacgatcctgaataccaataatgctactggaacattttgtttgcagttgcagtagtccttcataggacagtgcactttgagacagagaattcagaactggattgtacctgaagaagcctccatggtgaattaggcatctaatggggtcagcaacctgcacggccgatacagtgcccatgaaccagctgatccttgatgagtcctccgtctcgaatgccatcttgaacctcatgccggcgaaccactgcgtccgcatcgccgctctgaccgccccggccttcacgcagaactccggcgtgctcgccctcgggtagtagacgacctcgaatggttgcccgctcacggcgagattggccgcctcgacgacctcctctggccggacacgggctctgaccttgcccctggccgccgccgccatcttgttgccgtcgtcgtcgcccctcaggaacatggagaacccgccgtaattgccgccggcggcaggtgtcggcggcggcggcggcggcggcggcaggaactccgggcctcccacgccccctttcttggcgcggcggatgccgacgcagagatccccgttctcggtgcgcatgaacacgatggagtcgccggcgacgagcttcttctggttcacgaaggtgctccaccccgtggtgaggaggtggcgcctcggcgtgccgcggtagatgtggcggaacttccagaccacgccatggacgtccttggcgaggacggtctggacggggggatcggcggagtagtcgagacgcgggaagatggtctcggcgcagtagcgcggcacggagaaccccccgccgttgttggcgtcggactgcgtgagcgtcttggcgaacgacgcgggcttctcctcctgcgccgccgcggccgcggcggcgccaatgccgtcgtcggcgtcaccggcgtagccctgctcgttggcgcggacggggacgaggcggatcttggcgaacacctcgtcggtgtccggatcggccatgaacctgacgcccgcgacgcggcagagcacgagcgccgggacgcgcccgcccgggaactcgacggggccatgcccctgcgcgtgctcggcgtggccttgcgggaagtagtacaccttggagctcaccggcggcatctggaccatgccgccggcgcaggcgtgccacagctgcgggtccaagcacttgtcactctcccgctcccgctccttcgccgcggaatccacgaaagttatcatctcttcgacgcaaaaatctttcacctccaccgatcagctcgagcacaaacaaaattcagcggaattcgagcgccacggcgatctttatggatgaaatttcccacagcttttaccactaccacaaggtgaagaagcttttcagctgcacagccgccatcatcgtcatcatcaatcagagctcatagctgaaaaaggctgggggaggagaaagaaccaaccaaccagcagagcagaaaggaggaagaagggaaaaaaagaaaagaaagaaaagggaacaaagcgagcaaaagagagaattttggctcagaaatcttgcagaaaaagggagacgcaacccagaaaccactactcaccttttctcacaagagcaaaagatgatgaatttgaagggcaatcttgacacagctcagctactactaccactactatcttctctcctccccctctgcagctcagctatctgctctgctgctgatgctgatgctgctgctgcttctgcctcctttcagtctctcaggtgagcagcagcctcagattcccccagactgcagctgacatgggggcaaaagaactaaatagagagagagagagaggggaaaggagagagaaagagaggagaagaggagtcaagggaagaagaggagcttaagcaagtacttctactactacccactagtacagtccactgttaactcctcttgtttagtggtctcgttgattaattaacactacttttcagttcaacccctctctcctcctcaagtactcgatcaacctgatatttttgcacaaggggtattagccgatgattacacaattattcacctctcttgtttggaaagtagagataaacaaatgcatgcagccgccctgcaaataaactgaattaaaatatttgtgttaaccaaaactgcatgacctctttccatgatcactggatttacatgatcactctcatcgctatctcgtgatttctttcacaaggggttcaaacaaactcataattctttctttgattcttctcagaatcaggttactagtaagttattatatgaaatctttttggtatgaaaaatcgcgaagggcaagtgtgtgagcgagggagggacacctcgtcgggcagcgggcactgccacgtgtgggtttaggaggaggatgatgcgatgggacgggatgggatgggatcggggagatgttttggtcggggaggcgaggtcgcgagaggcgaccgggcgttgcctcgagattcgcgtggccggcgcggccgaggcttccgcgtccactgctgctggctgctgctgctgctgcttccaccgcttggccaagctagctcggtcgcatatactcgcatgtgaaggttgcttgttctcttcccatcactacctctgtttcgtaaaataaggccacctttaattcaaaagaaattcatagaagttttggagaaatttatttttatagaaattttttctatatagcccttcaaatcaaaggaatggatcttatgaaatcctatgaaaatcttatggattgtctaatgccatataagttttggaggaattctaaaacctcttggaaactttcctttgagtctttatctctcctctaatttctgcgtttttcctgcggtccaatcaaacgaccattcctatatttttcctgtgttttgtaatcctctgttttacacttacattcctatcaaaattctacgtttttcctattactatgttttctcattcatgcgattcaaaggggcctaaaaaacacaatcttaaatacaccctttatccatcaaccaagaatttaaagtgttttatttatcaatataaaaaggaattaacttatccacagtgttataaaatcaagaaattatgcgtatgcatgctactgatgagtattaaaatgactttctagatttcagttaataatttaatttagcacttaaagaagatatgcacatcttatttaaaagaaccagaaaataaaatatgcccctatggagaggaaataatcttgagtcggtttgatcatcggttttaattttaggctgtatgcaaattgggactatcttttccagatttttaaaataaatttaggagttaaattcaatagtgttatgaatggcatattgggcagctatagaatggttcggattttgactccgcatccgtaccctatgagtgatgtgaccaaaagactcaatttatcaattaaaaagatttaaataataaaaaaatcttgttttgttaaagaacaatgtatcttcattttgaagaaaaaaagcaaatatgtgttgttaagaagagatggcttgtcttgaaatatccgatttctagtagtggaaccaccttccggtagggctgtcaacgagccgagctcgagcgagctcgtcagcctaagctcgagctcgatcaagctcgagctcgactaccgagcttgtaaaaaatatatatatttcaaagataacctttaaaaaaattaatttctagtttatcatactaataaaaaaggaaaaaaagaataaaataaatatattatgtcaatataagacatacaaataacatatttgatctcctaatttattaaataacaataaaaatgatatattactaggctcgttaaaagctcgagctcggctcgacaaagctcgcgagcttagggagaggctcgggctcggctcgtctggagctcgagccgagctcgaatcgagcctagaacgagccgaactcgagcagctcgcgagccttgagcttttttgacagccctaccttccgggctagtcgggtgcccgcctgggctctttgtccgatctctcgtcaccgacatgtttatgcaaaaaaaaaaaatcgatcactagtaaacgttcttcgatactcagacttagacaatgccgttggctcaaccattgattttagttttcaagcttagggtaaacttttctatagccgtacgtgttattcacgaaaaagctaacacgcgatcgatcacgcacggcgatcagccccctccccccacgttccttccttttttttttcaccgcattactttcctgttttagtaagtttatacacctaaagttggtacacatcaagtttatacatctaaagtttgtatacccaaagtttataggttaaaagtttatattaccggtttaaattcgaaatcgaatttggattcaaatatatttttatatagaatatttctatacataaagtcaagtttacacatctaaagtttgtatacccaaagtttataggttaaaaatttatatacccagttcaaattcgaatttaaatttggattcaaatatatttttatataga

SEQ ID NO: 3520 - DNA, 4304 bp, Oryza sativa
tgaaattcatagtgtggtaggaaggggagaaattgggagatgtctgcatgttaggggagggacaagggtgctgatcgcccaaggcgatcactcgcccattaggctggccctgttgttcaagcttattttgaagaggtaaaagtagcaactgtactgtatgtctgtacataagtgtgatctgatcaagtatttttggcgtgaattatattgccaaactcttgttcaaccacgctatatatcttgtaattaagtatatggcgtcgattagatgcaatcaggagtttaggactccctgtagtatttattttgtggaaattgctattcatacgatccaactgtccgactcacatacgactaaatttaatcaatagttgtaaacggctgtaatatatataaacatggttttttaatcgatttatgattatatgtctctagttatacataagttctacgactagatcgtaagtatagcaatcctctcttatttcgttggcatgaaacttgaagcacaagtgatgacccttcaagaagcaataactaaaactaaaggcatgaagtgtaacttgttgggcatggtccaatcagttcgctttcctttaattatcaaagtgtgaggttttttgtcgggcttggattggatctttctttgaaatggtcacaaaaaggaaaaaaaggttaataatatccgaaaagataagccatgggacaaagcataccactgaaagaaaaacatataggagtagctagctagcacaagcgagaaattaatcaacaaattaatcttgattagttcaagcgtcgttgaatgatctggaccgacaagcgtgtaaagatatggtcaaatcattcgctgtcgacaatattaatacacttgtctcttttgattggtcacataggaatgaccactgtagagctaaggtcatcatgattgttgtggacttgtgctttcgtttggtgatgcttagtttttgcttagtcgtcgtttggttagaataaatctttagttgggggggtttgatttcttaattgatcaaggtgggaatggaattgatgaaacatgcaatggatcccccacagctctcaaaatatagctctaattatgtcacatagaatgattgaatggaattgatgagacatgcaatggatcccccacatctctcaaaatatagctctaattatgtcacatagaatggtttcaatcaaatatttgttagttttgacaataggtataccaaacaagtacctactctatgggatgcatgaatttaacaccaatttaatatttcttatatatttatatgaactatgtatacattttctttggtatatatacctctaactgagcatatatatagtacctacttaattagtgatcgatctcttgtcagtgtccaattaagacgacttaactatgtttttatctgggccagatatattaacaataagatttgtgggtcctaacacatttggtggttaagcttaagagggatcacaataagtagtttagtactaagctgacatcatggctacaagactccaagattgcaaagcaacagatcctgcttaaaatcgttgtctcgtccaactcggaatcttgctgtctggactctggagagctttgcttttggtacaccaaccatggtagttgcttaaatgttcacacaattgagccaataaacctgggtgccatgtacttaatttaagttgctcgctgtaagtagctaattccaaaggataagagaagcataaaagatagtatatgtaacttgtagccttgtaggtacgtagtatagaacataaaagatgaacaacaggatatacgcaactctcagagcttctttggaatatactatttgaaaaacataggaatagagaaaacactaaaatagtttattaatatacgtggagaacagagaatttaaaaatatagaataaaataacttgtgatgtttggaatagtttattatgaattaatgcattcatatcaaatagacacacttacttatgatattctaaaattatagctatttgaagcgttgtacatttgcctcacacttagcaaggaaaaaaagagaggttccagttgatgtttaattcctaattttttttccaatgaaatttgtgcaaaggaaaatatccctcaactttggacctgttcgtttctgattctggatttcagatttcatttgagcgcttcacaagctcttaaaaagtatgcatgtttcgtacgaacatttatatttttctccccggaatactattccaaagccaatttttaactttgtagtaatagtcaatttattcatttatgctctcaaatacctctaaaaaactcagataatccatcagttataaaaaaaatctcaaacggggcctttgcctgtgtctcaatccaaaatgagttaatccttcacttttcctctaaaaacccatcgaaccataataggccttagacttatttcgaacaggggaattttgattgacactaccctccatcttctaggggaatttttattcacactaccctccatcttctggggccctgtttagatctcacctcaaaaattttcatccagtcacatcaaatattcgaacacctatataaagtattaaatataagcttaaaaaaataactaattgcacagattgcgactaatttgcaagatgaatctttaaacctaattgctccatgatttaacaatgtggtgctacagaaaacatttgctaatgacggattaattaggcttaataaattcgtctcgcggtttactgacggattctgtaattagttttttattagtgcccgaacaccatgtgcgacactctatataatatctgatgtgacacgttaaaattttacacccctggatctaaataccccctgaattctaaggaggacataaaaaaaagatattaggatccagaaaataggttgatcaggataatcatccaccagatccatccatagctaggttttgttcaggggagaattattgtttgcttctgcataaacagtactaggtgacagatggccactttattcacactaccctccatcttctagtagttcatgtggtacatcagaaatgatggatgcttggattatggatcagcagggagggaatattgcaagatctcccccaacccaaccaagccagccagctccaaagcaaacaaagcatggccctgcactaccgcatgtgtgtgttcagaagcacacacaacaaccaatggacagcagaggccaagtgatggggcaattggccatgtgctaaggcctgcacgcatgaatgcctccaatggaatcaagattggccaagctgtcctccccctcctattcttcacccagctaattaagctaagcctctgctgtaatacatacatttcatgtactaagtgccactgatacgtgggctgggatttaatccctctgtcctagaatatagcaacgtcctagaatcggatataacgtatcatagtactacgaatctggacagccgatacgttctatccgattgtaggttgctagtatattctaggatgaagggagtagatgtcagtgacacctctactacaggtacagtacaacagacgatttgcattctttgtcccagctaagctagtgatgctgtgatagtgtaacgtcatgttcgttttacacacgcatggaggacaccatcaagcttagctcttccccactctcagctggtggattggatgctaataatttgaccaccggaaagcacggggcactgccgcgacaaaagagaaggattggctcctcgccgtatgatcacctcgggttacaatctctctcagttactgtgtcgtccaggctaagcctgagcataacccggctggtccgggctggcccggtaagagaacccggttcggcttgattgggctgagattccatgccaaagcctggcccgattacaagggcagcatggctggctctttttgggccgggtttgggttcgggcttgggtgtgggctcatccagttgaatataactttagagagtgaaaaggaaaaagtacaccgaaggtccctcaacttgtagtctagttacaaaatcacccccaactgtaatatatatatatatgatatcctttaacttacaaaaccattcatttgaggtcccttggtggttttgacttcggttttatccgatgtggcggctgagttggcatgggactcacgtgggccccatatgtcaggacgccacatcattatttcttctcttttttatcttttcttttatttcttctcttctcctctcttctcaacgcagtcgacgcaag

SEQ ID NO: 3521 - DNA, 4896 bp, Oryza sativa
ttcccatttgccaaacaccacctataagaatagagattctctaaagattcttcagggcagacagtgtagtgttacgttttctgaatggttgcctgccctgcccggaagaacatcaacacagacaggttgatgtttttccatggaacacaagcttaagacaatttgaaggcgccaatcgtaatattcatattgttgttccctcaaaaaaaatatttatatttttgcagactttccaggccttccatccaccaatcggcgatgttccctgtgttcgctgccgttgaataaaacaactcgtctgcctcgtcgtcatccagccatccacgttctagaacaaaaagctagccaaagtcgtcggcatatctcgccagaatggaaagaacgatacgaatcgaacacaagaagaagaagaataagcagaggcagggcatgcattttccttcaaacctcgcgtcaaaacacgctagtacaatacagtagtaagtacatattcacagtacatgatgatgattgggttaagtctggattcctaatacgctacctagtctcaattttgcattttacattcatacacaagggatcgatgcgaggaggaagattttactttttttttacataggcaggcatgggtgatcaccgtaactaaaaatttgtgaggtgagcggccatggccgtgaagagacagaaatcgcgtgtgtgcgctaccagcactggtcggtctcccaggtgcggcgtgggcggcggccgtaccagcgcggcgcggcggcgggagccgccatcgtccggtggtgcgcgccgcgcgccatggaggcgacggcgacgacgtcgcggtcgtagcgcgcgcggctgtcggggtcggagagcgtggcgtaggcgtcgtggagcctgacgaagtcgtcggccccggcgctggcggccacgtcggggtgccgctcccgcgcgaggcgccggtacgccgccttgatctcccgcaccgtggcgccggcacgcagccccagcacgtcgtacagcgtccccgccggcgccggcgcaggagccacggccaccgcgcaccggaccttccttgcccggtacgacccaaccgccgctgccggtggcggcttgggcgcgaaggcgatccccacagaaggcgcagaaatcatgagaaggaaggaagagaggaatggtgggcaagaagcagatctgggaagacggagaggggaattgggaagcttttatctaatacaagatgtggaaaaaggaaggagaggaggcaggtgagacgtcgttgggtggcacccgcggattgtgttggatttcggggtggaatcgccggtggtttagtggtattttaaggcgggtttggcgataggatcgttgcttgggtggtagtcagcatccggttgcgtcgacttgggtagtagtgctcttttctttgagcatgaaatgaaaatgaaggttaagatttttagaacaattaattaagatttaattattatagacttaaaatagattaatatgatattttagaacaatttttatatagaaaattttcgtatgaaatacgcagtttgaaaagcgtgtgttgtgaaaattattatcttcgtccaaggcttgatgaagaaatgaaggagacattggtgcatgcgtcgctgtccgcttccaaatcccaaattgagcatttttttttctccggtggattctgtgggtgcaggctgcgtccgactctgggcgtctggccccccggttgatgggaggattcggattctttgcattatttccttcctgccccccacggtttgtttggcgcgcgcacgctgattccgcccgccgtctctctctgtcgctgctctccaagtccgacatgacccgcgcgccgcggccgaccaccaccttcactcgctccttgcaagttgctgtagctctcggacagctcgccccatcagcacaaaagtcagctactactaaacttctactactactggtttcttccttttttgatagggagaagtttagcaggccgggccgcacttcgttcacgcgggctggtgatataggaccgaacaagtatggttgtattgtaccaaatgtcactcttcagagccactgcattgttcagtcaggcccaacagatagcacaagtatgttaagtgcaccgttaaaatgggctattttagttttttttttttgcctttgcttcgaataagttacaacagattattacagagtttattggtcaaaacgactgcgttttttcataaataaatacagtctaatgaaagcaagaaaattaactggaaataggctaaattttgagatgacaacctactgctaagggcttattcgtttcaaaggaattgcaaaggaaaagcataggaataggaatgtgttttaaaataccatatcataggaatgcaccataggaaaactttaggaaagttttccattcctccatatttgaaggaaaagcataggaaaaaataatccactctaacctaatgtttgcattcctttggttggtttgctcaaccaacataggaaaaatttctgtgtttttcaatccataggtttgcacatgtattcctatagtattcttacattttttatattcctacgttttgaaaatcctgtgaaccgaacgagccctaaatctttatctatagtcgacgaaaatctacatataatcggatatcgcgcactgcgcacatcgaactgaagcggacgatgctacaaaaagtgtcaacgagaagtaggtgaacttcacagcacgttacaattcgttgcggtaacagtatatgctacaccgttcaaacgtgctcatctgcacctgcctgttctgtctaggacaacgaaatttctttccaagacagtgcggtcttctagaagatgctacagtaagtgccaacaaaaatgttgccatccaaacatcaaagtatggaacttatagaaaaaaaattgaaaatatacttttatttttcatattttgcatttatatacatgtctgagattaatttgcaaaaatatacccaatccacatgatggttgcgtgagagcgccggtcccgcaggccggggatgcgataccgcaccggtcccgcaggataggcgaacggcaccacgggttgtttgcgtcacggtgcggacccgccgagctagagcgctcccgcatattggatgcacgggaccgccgctcccgcacccacatcgtttcctaaattgtgaatacatgtcccgcacggaaaacggaacagtacatcagcacatgattaattaattattagttatttttttttcaaaaatggatcaatatgatttttttagcaactttcgtatataaacttttttaaaaaaagccctatttaactgtttaaaaagcgtgcgcacgaaaaacaaaggagatgagttggaaaaattaggggaataaactcacgtaaccggagcactcccgcatagcggatgtgcgggaccggcccctctcccgtattccgaatgcgcgggaccgccgctccctcatggatgttgtttcctaaattgtgaatacatgtcccgcacggaaaacggagcaataaattagcacgtgattaattaattattagttgattttttttaaaaaaaatggatcagtatgatttgtttgagcaactttcatatagaaacttttttgcaaaaaatgcaccgtttagtcatttgaaaagcgtgcgtgcgaaaaacaaaagagatgatttggaaaaattaggaaataagacacggaaccggagtgaccacgggaccggcttcggtaccgcgcgttggagccgtgggaccacgccgttctgcggtactgccgcgctccgcggtaacgactcggtcccgcagtccagctatgcgggcccggctcagttgctcatccagttccgcgcgaccggctcaagtatgtggttcgccctcgctcccgcataaccaatccgcgggttaggtatatttttgcaaattaatctcagacgtgtatataaatgtaaaatatgaaaaagaaagagtatattttcaaaattttttcggaacttataggctacaacaggcctcaggccaccaggagactataaattaattgctttgaatttgaatgatgcaaccatgtaataactatttcacatctaatcaaatcatacatgggcgacaatgagcgtcttaaccacgacccaatgtagcggcatggcaaaggaagcacacaagtacagagacctgaacaatccaccagctcctgatgcttccatttcaccgatgacagaaagtatcaagctgccgctacttcttttaaattatacgcccataatggctacaatatgtagtgatgtcatgcccgggtgtcctgtgaagtaggaacttcagcactgcacatagggcatacctgcaaagcaatcaaggaaatttatcacctttcggaaatgaaaatgctttctccaataaacctaaactgctcccgttattgggtgcattgaacatgccaaatgatgtatcttcatagtcaggtggcaaaagaaaaacattgattcaatatctgacaaggaatagggatgtagggttcataagccgttgctttcattcatcaaggggttggtggatatgaagactggagatgctgttaattatataccttatttaattgcagccattggtttatgcattcagaatggtatgaatgcttgcaaggaagtgcaaccaatgattcaccttcctcaaattccacacggcaaataacacatctgcaaattagtttcatttatcagtacagtgccggttacttctaaaaaaggggggagatattaacatactgttccatgttgccgtcttgcttatcttgtgctcgataagttattgaaggtaatgaagcaagtgtatcagcagagaggcctctgctctccgtagggctgcaggaatt

SEQ ID NO: 3522 - DNA, 2459 bp, Oryza sativa
cgtggccgcggcagcggtcgaggagggcggcggccttgtcgagggccttgccggtgtcgtcgaggatgcggcgggcggggcgctcgtagaggtcggcgcgggcggcctggcggaggagggaggcgaggcgctccaccttggccttgaggtcgaggcactcctgccggcacgtctgcgcctcctccgcccacttgatcacctgctccgccaactggatcggccgcgccaagatcgccttcaggtcgtccatctatgatgatccccgccgacgatcagcaatggcggcgagacaggaggaggaggagcacctcctcggcttgggggggattccggccgtgctcctccggcggcggcggcggagaaaccggcgggcggtgggggtgggatcgctaattgggggaaggggagcggcatgtgcatgtgaggcgagcgccgcgcgagatgtggatgccctgccatggattgccgccttcggatggaaagggaagacgagaggtttccacgcttttcggggtttgtatttccgatgccgttggatcccccacctcctcactatctcctacctccgctcttctaattactagcattttagagtatattcccattggtagttatactagaaattaaggattttttttcctgaattttagatatagattgtaccaaggttttttttagcatgttttttataaaagccaatcattggttttagtaagaaaacgtttttaaaaatgttgttgtaaaaatactaccaccgtttcaggttataagactttctagcattattcatattcatatatatgttaatgaatctaggtatataataatttataacctgaaacggaggaagtatcaaatagatttattttttttaaattataataattaaaactcaacaaattatgtgttaatggttttctcattttacgtgatcttacttgatacagtctccatctcttgcgaaccgggcttattgaaacggattattttctccatgcttcagaaaaaatatgtttttcctttagaactttttacttgtttcttaaaatatttaatttttcctataataaagtagataatcgtcttgataatctaaataaaatggctccgagtaattttacatgtagttagatttccagacactatacctcatagatacgagcacgactcttaacttttggtttcatggatacaattggatttgatgttacaaataattcatacaatcgtattttctatacaatagatttttaaagtttacttacatcttgtatacaattgtgagctttatatccatggaaacatgtattccttcatctacaattgtgtaaatcattttttgcctttcaaatttgataatttctagatcctcaagagcgaacaatgacattcattttcgataacagatccaacaaatgcttgctacaattgctctttcatttgttgtctttctcgtaggttagtagccaaggcatgtctaacgtgagatatcatgtcctactcttttctcctatttaattaactctatgcaaatcaatagaaacctatcctacatctacatggcagcaaaataactatacataaacactatcctatccgtgtgacatcgaagcaaagtggatcccgcttttctccaccatactgtatacggtgtaattttcataagaactttctgcacgtgaattttctataaaactattttcataaacaattaacaatgtgatttcatttggccaccgccatcgacacggattgagacggctccctcctcttcttgttcgacttcgaccactgctatcggtgtagatctgggtgactccctcctcgtccgctgcccatgtcggcggtggcatcttcccgatgatggcctccaagttcctctattctgatctctccaaattgtcatcctttcttccaacttgttggactacacgaattggtttctctctcctagagccaccgcttcttctgcaagctcttctgacacactgcaaaaccactcctcccctccatgatggcatccaaaccttacgtggaggctgagaccccacgttggacatggcctaacaagtcgttctcgtccacaggaaaacgcccatggatgtatcaatgcatcatgcacgatcactctctttaaaccttgtgatccaaaaaggagaaaaaaagatcgtgtcatgttgacttgaatcacacccaagtactgtatattgaaactacaagttggcgttctatctgagttgccgcagaagggaacagaaatacagaatcactgaagaagatagaaatacagaatcaccgaatataattatacagtagattggttcatgtcaaccaatctactactccatccgtctcacaatataagggattttgagttttgtttgcaacgtttgaccactcgttttattcaaaaattttttgcaaatataaaaaacgaaaagttgtgcttaaagtactgt

SEQ ID NO: 3523 - DNA, 2256 bp, Oryza sativa
tagtgattaatagtcatggaggcagactggaggtttgagatttgacaaggataccgtgtgcatatgactttgacgctcttggttaaattcagctggttgagtattgggcacatatagtcatttgctaattagttgtatacaaaaataatctcaattattttgttgggacgccaatactgatattagatagcaatctgtcatactatctatgctcctttactttcagctttagaaattgatatgatctgtagcacacaccttcgaccatcattttttctcaatcaagatttcaagtataattatacgaagaagttacatgaaaaattaaaaatctagtaatctcattttgaaataacaaatccaaacagtttgatgcatattagtggtcaaagctttatgagtttgatccataaaagaaacagagggagtgatgtatcactatgcatcttgtaataattaataaatgcatgcatgcatacatcatgttttttgttcatatacatagtaaacatactacaagttaagtgctcatacgatctttagaaacacaaatgcactgcttctaaagcataccaagagattgatatgtaactacacactgctacatacacgatgcacacactaactgcatgcaatttggtttttgagaagcattgtggcaccactgctcattaccatgaagttttgctttacctatattccgtttttcctggatgcttctaaacttaatcaaaaggaattcactcatgggttcatgcccaggaatgcatgcagatagcattttctagcatagcaggaggcagatggatcaacatatgagatgccctatatgcaagcttataagcgtgctacaatatatcatatcatatcatgagatatccatgcaagtaggcgtacctgttaccaagcttggcatggaggtccacaacaagctgctcctcgtctgcggtgaggaggccacgcttgaggtcagggcggagatagttggtccaccgcaaccggcagctcttgccacagcgcagcagccctgccaacttaggcactgctcgccagcagcagcggccatgtgtcaggatgaaactgatgagcttcttgtcctcctctgccgtccatggccccctcttcaccttcttcttgtcacagcacggctgcctccccatttgctagttactgcagacttgcaccagatagatggaatcctgtataaaatgaacacttataaatttctagtgcttgcacatgtccagtgagctgcaaaactcctgtgcacaagcgtcagatgaaagggtggtgacagctctgttgcaactgcaattggtgtctgtgcttgcatatttataggtcagctcctcacttcctcagtttctcgaaaaaaatgtgtctttcatgaattttgtgtggtggtgatgatgatttggcttaatttagtgtgcttagaaagcaaggcctcaatccgtgctacagtagacttgcacccaaaaatccacatatatgcattgctgcaacgtggtgcatctacagtttagttgttgatcgaatttacaaattaagtataaaaaatatgtactattttattagcacagcagcaatttggtcgcacatgatgctacaggaaactcagatgtgattttctctggaatgaagttgcattttaactagtatttttaaagcttttgctgctttcatttcccacaaggctacacatttatgctgcctttgctacccacctatgtagccatttcgtcatcagctgtgaactatagctaactgctaaccaaagtaccaaaccatttgaggagcccccctaacttcatgtgattgctgtgagctgtaactcatcgtatggaccagaataatgactttgagcacatggtggtgtatattttgctacagtaatatgtagaaaaataatcacgatcagtgactccagtggtgaaaattgtcatacaagatacaggcaatttaggatgtcatagcactgaatttcatgacatcagctttcagtaggcaagaactcaaccaagtgatttcttctggcatacatgtacaggtgcaaattgtttttctagggcttgttcggttaataccgaagaggaagggattggaggggattaattccacacctcaataggtgtggaacaaatcccctctaattccccttcaatccccttctaagagggattaactgagcaaagccttaaggaaccaatgctaagtctgttggggaaaaaaattacaagtatacctggggctggg

SEQ ID NO: 3524 - DNA, 3589 bp, Oryza sativa
ctttccgtaccaactacttcacccaatgcaaccagctcctaagaacaccaacattaaattttagtagcagatcctgaagctttagatgtgtaccaaatgcagacagtaccggtcttttttaagggaacaaacaacttacctcataagaatattcatctggatcaacatcttcccatgcatcctaaagtcagaagtaaataaaaaagtcagacaatagctttattattggaagacttcaggaaaacaagaccacggcattaagaaaagtgcaaattgctcctagttgggtacattttaagccattacctcccccccccccccacacacacacacaccccatcccaattctcacatacaggaattggcattaaatttccattttcaaatgaacaatagtatacttatttgcaagcatcagaatctgatcagcaaaagcagcaggaaaagtcagttcccaaattataatttgagtatctagaaatggaaatggacggacaaaggtgataccgtgccattgagttcaacaaacctgtatcgcttttaacataagtagcacagcttctaacttctatataccaggaaaagaatgtagtatatatgccattaccatattagttcgatatgcacctaaaatattcacctacccattctgaagaatgggactacatacagatgggtatacttgaatttctcccataataatccaaaagttaccctccctttctccttgtctctcggaatccaaattattcattgaatggttgcatgataagcatggaacaatgaattggagatatcgtgcattccaaactcatgaaatggaagaaaatgtcacctgtggatcatccccgtcttcatcttcatcatcatcatcatcatcatcatcctcatcatcatcatcatcaacatcgtcatcatcatggtccatcactcgccctacaaaacaacaacaacaacaacaacaacaactgtaagctacacacaaaaatgaaataaaactatgaaaggaagaaaaaaaaaggatgggggataaaattctcccttgtgcactcacaatcactgaggcccgcgagcgccatgaggcggccggcgacctcgcgctcctcggcgtcctgcagcgcccgcgcgaaggcctcgtcgtcctcgtaccgcgcggggtccaactcagccgggtcaccggcggcgtctgcgtctgcgtcggccacctcctcgtcctcatccagcgcctccccgtcgccgtccccgtccccatcctcgtcctcaaaatcgctcccctccccttcctcgtcaaactcgtagctcccaccatcggaggccgcgtagtcgccgccgtggtgcgcgctgagcatcatgtacgcccgctcctgcgccgacaaaaaaaaaaaaaaaaaaaaacacggataagccaaacccccccgaccgtggtgaagcagcgagatcccgaggcggcggcgtacggcttttacctgctcctggaggacgcgggcgagggcgaggtcggcctcctcctgggtgaggctggtgaagggccgtctccccgccgccgccgccgccgtggagtcatcgggtggagctgcggcggtgggagggttgggggtagggttttggtcggcggcggcggcggtggtatccttggcggcgtccatgggaggagggatcggagaaggggggaagtggtggtgggagacaaggagaaatggtggagaaggaaaagcgaggcggtggcggcgtggcgtgggtgaacgttaagcaagcgaagcgcacacacgcggtggtggtgggctgggatggtttcagtaaaagaggaaaaggacgaggcgaacagaggtaaccgtttccgtgtttcagctttggaacggcagtccagcaccccgaatctacctgacctcagtttaggatgtaaacgcagccagcatgggcatggcaggtcggttccgtttgggtcccacaggtcagcctctttggtgaacttctcttacaaacggcccatcatcgtggaaataagcaaaacggcataattacaaatgaaaaataatttatgaataaaacttttatatacatgtttttggtgatctaataaaagtaaaggctgaaaaataaacttccataaaaaaaacctcaaaatcaggttcaaatcaaattcaagattaaaaattcaaattttgactgataagtataagtataaacgaaaagatgagatacgaagactccttttggtgaacttatgtaggttcattttggattattttaggagggtaacaaatcagcaattttgtttggagtctcatgaataactctgtttcgtttctaactctaccctaccaaaaatgacattttggtagtgcaaggcataagaaaaaaaaaagaacagcccgtaatccagctttgcttatgcccatatgtattggcaaaccatataaaagtttcatatggagcataactttttcatacggaaaaagaaaaacgaaaggcaaaggatattcttgatttggggaaatagctcacggaacggaacgcaatagaagttgttgaataggaattctatgttgcttagccggtgggcgaagagagaagcaggcggcatgatcacggcaagcaaggcatgctgctgcggcggcggccaacctcgtttcttctttcttgcacggatgcggcgtgtgccatagatgctttttcttgaggtgttccaagtgaaatgttaaaggtacagtagagaacaaactatacgtgcaaagtcttccatggcctgccttgctgcttcacccaatgttcgtatgcaattgcaatttgcttgactgattcagcctctagcacaaatgggccaacagtagttgctgtttcctagtttttgtatggtctctgatgtcacgtgggtttgcttctggcccatcatagatgctgactagagagttctgctagataaacaaactttgcacaccaacagcaggaggtgatcaataacgagatccaaattaggggaactatcttggtctatctattggggcctgcgacaactgatcgtatgataaaagctaagtagttaaaaactagtctctagatttcatcacggtctctggtaggtacatttttcacatgagcaatttgtaactgaaaaaaattatcaagcaaacaaggctctggtatccgacgatgtactaaacgtgcacaaagcccataacatgttgcatcctgctgcatttttacaccactccagacggaagtcgaaggacaagttgcccaccaaaaacactgcagcaaaagatcactggttagccaatcttcacaattttgccttgatgacggtaaaaggtagatttatgtacctcttcacatagtagtagcagaaatcagcaaggatgaacgtctgaacgatttcagagagaagcaccatcgaaggccagagaccatagcccagagcagtcaacaagcgaccacgggtatccaaaacctgcagattagatcacagcaaattgatttagatgggcttgctaaaaaaaatcctattctgtttacagattagatcactactaatcatgcatcagaagtaacagatttctcaagaatatatacagcttaaaatgcagacatt

SEQ ID NO: 3525 - DNA, 19929 bp, Oryza sativa
ggcggccacatacatttcccctccgacgacgacgacgacgagggcggttctgatggtagtggtggccacatccatttcccgtccgacgacgacgacgacgctgagccgcctcccccacgccccgccgcggctccggcgccgcacgccgccacgctatacacctacgctccgccgtacggctacggccccggcgccgggcagtatgaatacggcgtcgacatgggcggctacggccagagcttcttcagcatcagctacgcccggagccagccgccgccgccgtcgtccgttgtgtcctacgagcaccgcccccaaacggtcaatgcgactgttcactactacccgggggacggcgccgccgggccaccgcttcccggctctactacggcagcgccgcgccgccgccatcgccgccgcgggtgtccgcctgggacttcttcaacccgttcgagtcattcgagagctactaccaccaggaccagccatctcctgctccaccggcctacacgccaagccggagctccaatggcgcgcgggaggaagatgacaatggcatccccgaggtggagcacgacgaggtcgacaaggttgacaaccaccaggatgccaatggcatgccattgccggcgaaggatgtcagtgaggagcagcacaggaagtccaagtcctcggaggccagcagtagtaccagcagcagcatgatcagtgatctccatgtagttcagaagagtgtgattgaagaacagctgcggcattcggatgccgcggggcctcccgcgatccccaggaaggtttacaatgacgatgtcgaggtggtggaggagatcagatcacaattcgagcatgccgcaaagtccgcattcgatgtatccaaggtgcttgaggttgggaagatgccttactaccagaagagttcaggattaaaaggtttattatgatgcattccttgctttcctgtctaaacttccaatcttttttgccattcaatgagacaagtggaaattttcataaccaaattgctgttgcagtatcctcgatgatgatttgtgggctatcttcggtgggggaggagttcctgcaatttgaggaggacaaggctatggaatgtggtaacctttcttcaacattgcagaagctgtacatgtgggagaaaaagcttcttgaggaagtcaaggttctgatcgcgctctacaattttgaatttctagctgaatgattttaatccttcatgggtgtacttctttctcccctttagatgtctgttttgaacattcagttcaggaaagcaaagctgactgtttgctgttattaacttgtttttagctgcctaatattgtcaaagtatattcagttcgaatattttgagtaacaaactgtatttacataatgaacttggatataactatttcttgtcaaatatgcacatttctccttttcggaaacttgtcgtgtagttaattatagatgattaggagtttgcactacaaataagtgcaatctgatagttttaatgccactgaaattgtttgccgcatcccttatctgcattcgttgtcataatgacatgtgggatccaactctgcatatcagtattcccaagaaatgattatgccttacagttttactctgtagagggctttatgtttcttgtgctttgtctttaccattcctttcccttgctttggcatgtcatcccattattgttttacttttataggcttgttaaagaagacttgatttcttcttttattatgttcagtgttgggttatactcaagcaactttgtttatcacagactgaggagaagatgagggtgctgtataaccaaaagcgtgaggagctgaaagttttgtatggaaggggtgccgaagcacacaagcttgaggcaactgaaactcatatcaggaagctatcaacaaagataagcattgccattcagattgtcaatactatctcaaaaaacatcaataatctgagagatgacgaactatggccgcaaacatgtgaactgattcaagggtatgcgatatgcatctctttacatgaaattccacatgagttgtactactactactactaatgcatattttgcatacacaatgcacatacacatacatttttatgactttttcattgaatggagtagatcagggtaggcagtatggacaaatttagaatttggttcgcaagaaggcaagaatttagcattcttaagtacacatttagacacaactgttagtatgtgaaatatttggcatttcaggcatttagtgattactggtgagcagggtttcccataccaccggggccggggttaccgcgccccggcggtaagcacggttaccgcgcggttaccgtggtaaccgtgaaaaaccgtgcaaaatttatcaaaaattcaaattatttttaaaatttatttgaatttaaggaggttaccgcggtatttattaccatacccccgcagtaagcccggtaaccgcgcggttaccggcggtaacataaaccctgctggtgagcattaacagaatgcattgttacattttctcctcactttatggtgtactggcactgccatgtgattattagtttcgattattatgactttctacatgctgtcagtacaaattcgaaatgcttcttaaatcttaacgggtgttgttattcaactttaagttgtcaccttggattactttgttatttgcatgctaacttggacatacacaatggattttcaggttaatgcaaatgtggcatgccatgtcaaaatgccatcagatccaatgccacgccatatcccaagctagaaacttggactctaagctagattctgcaaggttcagtgaagctcacatggacttaatcaagcggctagagcttcagttactggagttgatttctagttttgctacatgggtcaatgctcaaaagagctttgttggcactttaaatgagtggctcaagaggggaattgactatgtgcccgaagttaccgatgacgggactccccccttttctccaggacgcttaggagcgccccccattttcatcatctgtaataattgggcaatcggcacgggaagaatatcggagaaggaagtagtagacaaaatgcaggcttttgcctcaagtgtcctgcacctctgggagaagcacaggttagaatggaggcaaggtatgatggctaacaaagatatggacagggaccttagagtgatggagagggatgaactctcaatgcgcaaggctctcgatgcgcaaagcaagaagcttgtgcttgtttccaatcagagtggcgtgtcgttatctgcgcaggtggttcacgatagtggtccaactgctgaagttggtttgcaatcttgtatgaataaggtctttgaagcaatggagagcttcactgccgcttgtgcgaatgcatacagtgatctccatcttcgctctgaagaagagaagactcgactcggccaaaacaatggcagagttcctagcttcatttcagacttagctggtaagtacatagcaagtaactgaccttggaggtttggatgaacagcaacagtgtgcagagccatcacagattctcaattccagtctcacaaccgatgtgccttgcttttgcttggtttgggccctctgccaagtttcagggtcatccttaggcctgcagcaactgatgtgagatctgtgttggcctgcattctcagggttgaatgatcttcttttgtggtcataatcatactggagaaaactactgtcctgtaaagaagttaatcaccaattcaccacaatgttattgacaaaggggcacaaagcatcagactatcagagatacaaaacaatggacattatctataaaagaaagagactgagcaatggaagattctgacaaagaaacagagatcaagatatttcttcttagaggccctataattgcttgtagaaattctctatcaagaatcaaggcagtgtttaaggaggttggtactgtggatgaatcttagctgatactcgataatgagataatttttttagataatggatatcactcctgcctctacatcgataatgagacatgtttgatgctctgtttggagtctctactcgataattcccaccgaagcatttgggaattgggagcctcagcatgacagcattttaggcagacatggccctgatactgcaactcttcaatctcctaatttgattggctgtcgaaaaaaagtctctctctgtgtttatctgtatacacatgatatgattcatttgtacctgtgacactgtaactttgtacagcgagtgtaacttgagttgagcctttttctttcatctcttaacctgtctcagtatgcactgttcttgaatctggttgccaagctgttcttgaaagtgacaaccagatcagtacatatgaaacatgatgttgaagtttttttctaaattttttttgaaccttcttaattttaaaaataaaatctcgcaaaacctatttctaaatctaaacctattggtgtggcaaaacgatacagacacatccactacaggtagggtggcgtggctaaaatgttcagattcggaaaaaatatttttaaaattaaaaattaaaaaagaataaaaaaagtaataacaattccatgatgaattgagaaaacaaaagccaggatgtcagcatgttgtcatctgttgcatcagtggagacaagacaaaccagtttcacaaacctggtgagaaagtgacacgtacatgtattaggtgagagagacagcatcaatcagacgaaacacagcagagaaaaaccttaatcatgattatacttatacagatacagataatgctgtatcaggccagcgtatgaacgtatctgacgatgtcatgcacgtcagagcacaaattaatcaactttaattcgtttgtttaatccgattgcaggatccccaaagatctcctcctcccctccttcgctggtacggccgtgcaatcattcattcaaattcgcgcgcgaacccactcgtcggcttcgcgcgcttccgtggagacgcgccacgcgtccctagccgagctcgtcgtcaagctccaaccactcgtggttgcaactgctcgacgcttcctagtacgtacgtggtgcgtcgccgtcgtcgccgtcgcgcgctcgtgcggtgtgggtgccgcgcccacgggaggcatgccagccaggccttgccggcgaggcaggccgtaccgacatgccagcgatgagattcttccggcggctcaggatatatatcgcatctgtccatggtgcatgcattcgtcttcctcgatcgatcgccattaattcccaagaattgagggaagctagtgtggtgatctgcagctatggaggagcagcagctgtgcaggctgaggcagaacgtggcgtcgtcgtcgtcgtcttcctcggcggcggcggcgatggccggcgcgctggagggcgtggcgcgggtgtacgagcacgtcgggccgctcgtgcggttcgcctgcgccgagcaggtggaggaggagctggaggcgtcggtggcgctgctcgacgcgtgcgccgcagcgagggacagcctgcgggcgatgcgcgcctgcgcgcttgacctcgaggtggccgtccgccgaggcgacgccgccggcgcccagagcgcggcgagcgcctacgcgcgcctcgccaggaaggcgcgcgccgacgtcaagaagcagcagcgccgcctcacgaacagcaggaggcgcgagcggccaacccgcgacggcgacgacgcgcagtcgctgcaggaggcgcggcggctcgccgtggacgtgctcgaccgcgtcgtggcggcggcggcggcgggcggcgccaccgggccgagcaggtggtcgacgtgcgtggcgcgcgcgttcaggaacaggacgcgcgtggcgtgcgaggacgccgaggagatcgcggccgcctcgccgccggcgttggctcacctgtactgcagctcgttgccgtccaaagatctccacgacggcggcgagacggcggcgcgggtgcagaagcagctgagaacgctgggagacacgatccagaggctggaggatgggctggagctactcttcaggcgactcgtgcattgcagagtcttcttgctcaacatgtgcagctcactgtcagagtgtgtatgaacagatcagagctcaaaaaatgcaagagctgcatgtacagtagatagctgtcagctataattttgacacctggatatgagtatatggtgaacaataaaaaatagcagtagaaaattttgagccattctcttggactactgtgctctccgatgccatcatacccatcgaaaggaagaagaaaagatcagaattctcatgtcacatatgctgatgaacacaatttagctttgtttcataactactactcctttagtcttttacattcgtacatgtacgaaattatttgttgtgaaacaactttcacataaactggactaacaatcagtcattaactaaggctgcgttcgttcattggagataggggagattgtcactcgttttccgcgcgtacgcttttcaaactactaaccggtgcggtttttgcaaaaaatttctataaaaaagttatttaaaaaaatcatattaatccatttttgaagtttaaaataattaatactcaattaatcatgcgctaatgactcatctcgttttgcgtatcttcccaatcctctctccctcaaacacagcctaagttttggatgcacaacgtgcacaccatctaacaaattccacttaaaattctagaaaaaactgtacatgtgcttccaatagtactacacatacatgtaaagtctccgcttcaaagttatttttatttcatccgtttttttttataaaactaatagttttaagaatataagtaagttagaatttggtctctctctatatataatgaattttttaaagagacttcacacacaattacaatactattggaaatacatgtataattttttcaagaatttttgaggatgcacccgaaacttatttgcataggataggttacctccttaagtagactagtgtcagagtaatatattaccagctcagttttttcgcgaacgcgcaaaaggattacacgtcaatatattagaagaaaaagaatttttgttacaagggaagggagaaaaagcaaagccaaaaactgaagcttaggaactactgcggcagctaaaagcaactcctaaacagcgggaaggggcaaagccacgctatcagctcagcttcacatagttcttttcacttagccaaagtagagttattcacactgttccctgaagctggagcaaattagaggattgcatcttccggctgtctttttgatgtcacaaattttcagactatttgagatcatttgcagtatgaggaatctccgatgagcccgctggcatgatggagaagtcctacttagagttgtagacaaagcattggacataaaagaaaaaaaaatcctacagacagagcaacaggatcaacgagtagtgaacctccaatgttgccaaacaagtgatgatgtgttgcttcagatgttcatttgatcagatatgctcagatccttacaacttggcaggtgaatacaaatggtggatcctgcttacgatatctgaaacaagtttcaacaatcaacaccgatgaaacttccacgtacctctgttgtttcgttctttttgtgcttttgtcatccataagaacccaacagtacaatctcttgagcgtgcagcttactctgcttgcaatgcatgagacatgacaacacagcaaaggttagttagcagtgtacctggaattagacaacatctgaagggcatcaccttgtctgcagctgcattggccatgcaatcaaagagcagatgggagagcagagcagtggagattcctgctgtctctgcataatttgcctcataccatcttctcaacctcctgattataagtagggagagttggagcattagcaccaccagttcatcatctgctcccaacactcagagtctgaggcatagcaccaaatttcattccaaacatggctggccatcaaagatcgacaagcctgccgtctatgcctcaccccaactacatcaagatcgaagaagagctgcgcaacatatgctcaggcatctcatcgccatccgccaccatcgaaatggtgtctgacgctctgaggaggcttggtggcgtctacaactgcatcaacgagatcataagcttgcatagcaaccaagcacatggcaagaagctggaggaagagatggagcggtctctggaggtgctggatctttgcagcgccatgcaagagatgttcgctgacctgaagatgaccatccaagagctgcagatggttctcaacaggggagaccatgcagttgttcaagtgaaggctcagtcatacatccgcctggtgaagaaggctaagcatcacctgaagaaggccagcaacaagtctacctctgatgaggatggaaggcttgtcagtctgttgacaacagcgagagggatcactgcctcggtcctgaaatctgccctagagctcctgtcgaagcaaatctccacctgcaatccaagcaagtggtctcttatctccaaatcgttccagaaggccaaagtttcatgcgaggaggtgcaattgcaggcattagagttgggcatcgttggcctagagagcggagctgagaatctgttcaggagattgatccaaaccagggcttcccttctgaacactcttagctcatagatgctccattggcattggcatccaacttttataggacctgtcaatcaccacaaattttgaataatatgtacgtaagtctaaatgtatagcaagatacataattgagaaggcatgcattgcttccttgcaaaaagaaattacacagttttgttaacatgtgatttgttccttctctaccatcttggagcctgtgtttaccctatcaacttatgaacaagtggcacattatctctatccaggtgtacaatcggaagctacgcaaactgacttgactactgtgacaacgattgtttgatttctcaacacttccttgcacgcctgcaaactcttaaaatatctcaaaaaattttgccagatgatgattgcattcgtgtgcaagtgttgcatcctagaaagttcttgtcaaaatttaagctaactaatcaagtcacatttctgctgtatgcttagctgctcactgctaccttccctaataaatatgatttgacatgatcgtgtcatatctatccaaccgaaactttgatattacaagataaattatactggttgttgagtcaagaatgcgtgcacttgcatggtcatcctttctgtggatagctggaacatgccagcgatgctgctgctgctgctgctgcatgagagatgaatgttcaactcgtcctaatgtaggagtatcagaagaaaaccaaaataattatttcctcaccagcaccaaaaggctgcttttcctccttccttcctgatgatgtatctggatctgaaatcaaactaaaccctcgtgcaagtatactgtcatcaatagttgagacatgacaggctcataagctcactcattagcatttgttgcactaattaaaaatcagatgaataacaacatgtctaggcttgaatggctatgtttcagaacagatcacttattatgacaacgcacaatgcagggaggttagtagatgagattctttctgtcgattgctctgttcaaacccaatcacgtttttggttctgcttcttcagttataaataagagaggagccaaagtgtttgagtaccagcaaagtgcatcttctctcttccttgctcttctcttcccattcccacagaagaaaataacaccaaagcttcaatcccgacatggcttgccatcaaaggtctgcaagcgtgccttccagcccttgctcaaatgataccacaattgagcagcagctccagaccctaaacacagtcgtctcttcaccatcagcaaccatcgacacgatgtgcgatggtttgaggaagcttggagatatctacaactccattgaggagctgatttgcacacctagtaaccaagttagcctttgccagaagctgcaaaggaagttggtggaggaagagcttggacggtcactcgtcttgcttgacctctgcaatgccatgcaagaaagcttcatggagttgaggatgagtgtacaagagatgatgttggccatcaaaaggggagaagatgcgtctgctcaagtcaaggcatacatccggctagccaagaaggcgcggaagcaattcaagaaggtcagcaaaaagactgcttctgataagatggactgtagggtggtaaagctactagcagaagcaagagaaatcaccgtctcattgcttgagtctacatcctgtttcctgtcgaagaaaattgagacgcctaagtggtctcttgtctccgccacattccagaagagcaaagtcatgtgcgaagaggagcaattgcaggaattggagctcactatcaaagaccttgagagtggagcagaacttctgttcaggagattgatccagggcagagtttctcttctgaatactcttagctcataggcaacctgagctccaataccctgtgataggcctccactttttaaaggatcagtcgatcacaacaattttgcaacatgtatagtcttgtggatatgtatacaaagttcactaaattaaaaagaaagagaagcaattttgtcaatttcatgctatgagtctttggtattattcacatcatgactgattgacgtttctcataactaaaatataggtattgtgcctcaaacataccatccatttacagggcaaaagaacaacctaagatccgggccgttccagccaagtaaaattttgtgcctcttataattttttgatgttaaaacaaaagtgacatgtctccataaggttatcaacttgttattacagccttgcgggcttcacgttaatggtttttttttatgggaacaaaggttatgttaactcacatgttcctctagcggaagatccttctgaaatggatcttgctctactcagctgaaacatgccagctccaacacacgagctacaacccggtaattagcattatcatttatatttactgatggaaacacctactaatgtcaaagagcaacaagaattgaactaatacacatgcactaataatactcaattaagaacctgttaatggttttccttgcatttccctcaagacccatcgtgacggttggaacaaatgcagattcttgctacctataattgcaacatgacagagtgttaagaccagtttgtgaagtctagtgaactaaatatgtgtacttcacgtgaaaagccttgataatgcagcacttctgcagcattagcatgcaacttcaacagacagcatctgggaaatcaaatggcatgattctttctgtctacctttcaaaagatgctcgctctctcccatttcttaaaaaattgatgctgtctcagttgcttccagtgtataaataggcatcgcctgaggagtagagacatcaaacccaagtttcatctttcttccacatctcccaactctcgaatactccaatacaaagatggcttgccacctaagatcagtcagtttgccatccaagaggcaatccaatgaagctgaaatcgaggatgagctgcaaagcctagaggcaagcatctcttcaccctccacgaccattgatggtctgaggaggcttggagatgtctacaatcagatcgaggagatgatccacttgcccagcaaccaagttttctctgcacagcaaaggaaaatgttggatggggaaatggagtgctccctcgagctgatcgatctctgcagtgccatgcaagagaacttcaccgagttgaagaccatcatccaagatctgcacgcggctctcagaagaggagacagtgcaagcattcaggtcaagatccaatctttcacccgcttggccaagaaggcgcagaagcaatgcaagaagatgagcaagaagactacttctgacaaggaggactgcaagctgatcaagctattgatcaaggctagagtgctcaccgtctctctactcgagtcgacatcgtgccacctatcacagcaactagtggttcccaagatgtttcttgtctctaaggcattccaaaagaagagatcagttgtttgtgaggaggagcaattgcaggcattagagtgcatcattggagatcttgagaatggagccgaacttctgttcaggagaatgatccagagcagagtagcgctcctaaacactcttagctcatagattctcctaaagtgaagacactctaacaccctgtgattggcctccgccttttaaaggatctgccaatctttgtacatctgtaaatgtatagaacaaaaagagcaattgaaaacagcagttttgatctagccagtgtctcatctccaatcatttatacatgcttctgatttctgatttcagtggtatctgatgatgtgattttgtgatgtgctgatgtccataaaactatgggtaacaaaaaaaaaacatgaaaaaaacagaagatgtgaattattgttgcaagtgaaacacgatttctcttctcaggaagatagagaaaaaagagagagattcgactagaataagttataagtagatggaatcaactttcaactgcttaatgctgtccatttctgaacctaaatgtttgatttcaaagtggccatgtgacctcgcacttgtttaatcccataatcagcgcacgatccttcaatggtggatcatgctggcctgccctgcatacacgcagcatgccagatccaaccccacgaggtctgaccttgtgattagcaccaattagtctgtaatcattccctaacccaatcgctaatgcgataacgcaacagtggaaggacggcggtaacccactgcaacgctaataaaaaagtagggttccgaactgacctccggcgggaagcaggctgcgggggcttgagtgcttgaccctgcagatcgccggcgacggcggccggtggccctgtggcggcgccgccgccgatgcgcctctcgtgagttttttttttttttggtcttttatttcgttttatttttatttaggggcggaaatttgaagagacgcgtggtgggttatgggccgtgtgggctttactatgggcgtcacatgtcaatttcggcccaagctgatgaggaagatggaggagaatcagagaatgcgcatctcgggtcctttcactttgttgacactttcaattttatcaaaacttggtaatgacgaaatttgaccaattttggcattaatatattttgatatgtttggtttaaaaccttaaaaagattttggatttagaatcacctaaagatgcatgcacctgtttggcttagtaccagtgcgctactggtttcattctcgccaataactggaaaatgtatatgtggtaattaagctcttaagaggcaccaacattgtacttgaaaaaggatcaaacatgcataatatcaaaataaaaggcatatgaacatcaaatactaaccgcagacagctgaaacatactataacaaagactgatgccggaaactgatgttgaaaaaacataaactcatctacacgaacggcacctaatacactgaaaaaatgcactaaatgtggatcatatccataatgaacacttgaacagagaaatgtgctgtaccatacaactgaaacatgacagcaatgctgtgaagacaacagagtgatatataatggctgaaatgtcaatggaccaaggctgtcatttataagaacaacgaatcctctcacacaagcaagaaccaaccacgccctcgtgcagatgagtttgccactttgccaacacaacctaagacatgaagcatcaacttgttagagatggttgacaatgtcacaatgtgtccttattttgcagcatgacaactcacaactgataagaacattttgcagtttagcacggcaggcaggagtaacatgctagtgcagaaaccgcatgattgattctcccatttcattgcatgcttcattggtctcaccatcttgaacttgaattcaacactaagcaacccgctcgtgcagctgagtttgccgccaataatcgggacatgatggtacaatcattagctgagctagagatgcctcttacatgaaaaaaaacatcagcttgtcgaggagttgggtggcttctgttgcagcagcacaacaattccatggctgtctacacaatcagaaatgccattgcttgagctcctttcgttatatatacaggcaaaccatgcccaggtcgacaccattgcagcacagtttcctttctcttcctatccatctccagagaaaagaaaacaagagaaaaatataatggcattccatctcagatctgcgagtgcgccatccagcccacggtccagcgaaaccaatgtcgaagaacagctgcagagcctaaaggcaacaatctcctcaccttcttcaaccatcaggacgatgaacgatggcttgaagaggcttaagagcatctatgatagcatcgacgagatcatgtgcatgcctagcagccaagttctcctttgccagtcacagaacaggaaagcagtggagcaagagctcgagtgctctctcgtcttgcttgacctctgcaaggctatgcaacagaacttttctgagctcaaggcaagcatccaagacatgatgttggttatcaagagaggagaagacgcagctgttcaagccaatattccatcatgcatccgccttgccaagaaggcgcagaaacagtacaagaagattagcaagaagactctgtcacctgatcaggagagctgcagggtggtcaagctgttggctgaagcaagagagacagccttctcaatgcttgaaatctcatcacatctcctctcgaagcaaactgtgatgccgagttatagcaagtggtctctcgtctccaagacattccaaaagagaagaattatctgcgaggaggagcaattgcaggcgttggagttggacattgttgatcttgagagcggaatcgagaatctgttcagaaaatcgatccagagcagagtttctcttctaaacgctctcagcatgtagatagaatgatggaacattcccaactctgacacctgtgattggcgtccgcctattagaggatttgttgatcaccaaaacaattttgtatgttcacctacatcatacatgaggaaatgtacaggagttcattcaatgaatatttcactcttttgcctctaatttcccccttcacttgacgcatactgctctcaaacaatcaccggacatttggagcgcttcacctgaagcatgttcaagcaaaaaaataataaattagtcagaagacacataccatttttggctgtcataatatatgcaattagtaataagtacacagttcccaccttgccttcgtaaagccatgggatggtcatgtcaccagtattcacatgagacaggaacaggcacaagatcctttgctccccatataactaaatagttgttgataaattgctcagcaatcagatgcaatagcacacatggcaccaatactagttgattagcaatctccattaaatgggtgctggagcatacacgtatgacaaggctcagtaatagaataagctgccatgctgattcctgctgccaataactggaacatgacaatgtgactcagttaggcctaatgcatcagaaatttggacagcacgtggaatcatcttgagattgcagcagatgctgaatgctgtgagtgcagaaggcaggccagcgatgtgatgctgcacgaagaacgtaccagataagaacacatcatggaggtgaagtcaactgttgcttggccgagcaaaggaacagctcttgttctctttcgtggcaagctcatcaatcccatgatctggatctggatctaaatttaaactacatgctcgtgcaatgagtttgctgccaatagccaggacatgatagacacaagatgagctagacatgccacttgcactgttacacacacttgattaacaaacataaaattcatcagcttgtcgaggagatgggtggcatccgttgcagcagcacattacttaaatgtaattgagattccaatgctgtctacagagtagagatgccattgcctctgcttcttcttcttcttcttccgttatatatagagataaagctaaccgtgtcgacaccattgtagcataccttctcctcttccaacttcagagagaggaggaaaaaaaaagtattacagcttcctctgaagacatggcattccacctgagatctgcaagtgtgccatcgagccctcgctccaacgaaatcgatatcgaagggcagctccagaacctgaaggcaattgtttcttcatcgtcttcgaccattgagacaatgagtaatggcttgaagaggatcgggaatatctacagctgcatcaatgagatcatgtgcctgccaagcagccatgttgcaatttgccagccactgcagaggaaagcagtggagcaagagcttgagcgctctctcatcttgctcgatttctgcaatgccatgcaggagagcttttccaaccttaagcaaagcattcaagacatgcagctgattatgaagagaggagataatgcagctgtgcaagtgaagatccagtcttatatctgccttatcaagaaggcacaaaaacagttcaggaagatcagcaagaagtcttcttcagttgatctggaaagctgcagggtggtcaagctgttggctgaagcaagagagatagctatcttaatgcttgaaacctcattccatcttctctcaaggcaacttgcgatgccaagttctagcaagtggtctcttgtctccaagacattcaagaagagagcacttttctgccaagaggagcaattgcaagtgttggagtcgaacattgctgatttagacactggagtcaagaatctgttcaggaaatcgatccagagcagagtttctcttctcaacactctcagcttgtagatagatcatataccactttgatcccctgtgactggtgtccaaattttaaaggatctgctggtcactgcaacattttagcaatgtgtatatacattagaggaattgtacagatattaagttgagaaacaaagcacagtattttatctacttcttgttgcatttcatccatgctttgacagaagcacctaattttcttataagatgcttgccattattgcctgttatagaagtagttagcaaagactgttcactctgatctttgaaattatttactattgtatggccacgttattcagatgccatatgttgcaccagcaacaagcaaaggatccttgtgtagtggatcttgctaccacagaaaaaaacaagccagcttcaacacacgaggttgagcgtgtaagcagactgaattgtgcatagaaaaacacctatggaaattaacaactgcaacaaaactagagaacacgcatgccagcaataaaactcaattagcaccccattaaaataatacattgagcacacaaatatgtcaagatccaccagtcaagtgaactagcctgctgattcttgctgctaattgttggaacatgacaatgtgatagctcatcgggaggacacgtagtgcactaaaaatattgaactgcacatgagtgatggaaaagattctgcatgctgctgccagatctcaaaccttgagagcaagttcaatagtatagccaactactagctccaattcatctatagccaatctaatagctcattcatacaatagttacatactacactattaatacctagtcccacctgtcatagacatactgcgtcttggagtccgtgctacagctggctacaaatctgtagcccgctgctcttctctctcctgatttatcttcttaaaatatgtttgcagctggcttatagcctgctattgtacctgctctgacagacagcatctgggaggtgaactggcaggattctgtttgtctaccctccaaatgatgccatatcttacaaatcctctgtataaatagacctcagcacatagctagacacatcaaaccaaaactttcccttcctcatctctcagattcaacagagagacaaagttttagccacagacatggctttccaccaaagatcaattagcttgccttctaggcctctctccaaagttgaagaggagcttcacagcatagaggcatgcatctcttcaccctccctgaccattgagatgatctctgatggtttgaggaggcttgaggacatctacagctccattgaggagatcatgtgcctgcctagcaaccaagtttgctcatctgggcagaggaggttgttggatggagagatggaatgctcccttgagctactggatctctgcaacgctatgaatgaggtcttcaccgagttgaaggccatcatccaagatctgcaagtgtttctcagaaaaggagatgacgcagttcttcaagccaagatccagtcgtacatccacttggtgaagaaggcaaagaagcattccaagaagactttgaagaaggttgtgttagacaaggagtgcaggatagtcaagctcttgagcgaggctagagagaacaccacatctctattcgagtcaacaatgcacctcttgttgaagcaaatcgagatgccaaaattgtccctcatctccagggcattccagaagaaaaacccagtgatttgcaatgaggagcagttgcaggtgttagagtgctgcatcacagatcttgaggctggagcaggacttctgttcaggagattggtccagagcagggttactctcctgaacattcttagctcatagatgctcgtcaagatctgtcactcttaagaccctgtgattggcatccgccttttaaaggatttgctgatccttagtatatggttagacttatagtgtacagaaaaaagttatacatgaaagaaacagaaattttgatctaattcttgtcgtgcgctcaatcctcacatattattgagatatatgatgtgattatgcaacacgatgccagtattattgcctttgtgatgaatataatttgcacaacccaacacatgaactatgaaatatatgtgccaagtaatattgttttcctttattttattatttttatactccaaatgattgctgatatactgatatgccatatggcctcacacatttttcttctagacatgaatatttggaagcaaacaatttgcgctggtccacaactgcctagttgtttatatattcatgtggccatgttacttcacacccgcctaagccaataattagtacatgatcttagttttggtgcatctcacgctacattcatgaaacatgccaggcccaagctacaaagctaaaagcttgcaatcagcacaatattttgtgggtgtgtgttcttagaggtggatcagtgttgatccctccttttatatttgttttctttcttcttaatgcaatgaagcacaacacacctgtgttttcaaggaaaaaaaagttacatcctaaatttgctgcatgatcacatagcttacctagtattgtgttcttgtgtatatattatttttactgttttggagcactgatacacatcttgataataaagcacgttttaattaagttcagaagtaaagagaatttcttttaagcacagaaaaacagtataattatagtgtgcacagcaagacacagattatcttgagacacatctcaagtttatctcagcaaccacaatttaaccatgcaatgtccatgaaactcataactcattggctcaccaggtatgtgcctcgacttggagaaagacatatacttattgagaaagaacaagattttgtcaacttcttgattgattacactgtctatg

SEQ ID NO: 3526 - DNA, 543 bp, Oryza sativa
acagatcgagagaatgtcaacgatgacattgcggcgaggggaagatgatccatcacatgacggcacatgcgctcgccgccgggtactcctcgtacacgaacttgccctcctgaacgagccggcaacccttgcaccctctgcacgacgacggcccagggcagcacatcgcctgcatcggcgccgccgccggccacccgccgccgcggcaggtgccgcacccaccgcagtacgaggggcctccgcatggccacttcggcgccggaacgccgccccatggcgggagctggtggtggtggtggccagggacgaacgctggcaacgccgccgccggggcttcgcactgcggccactgcgggtggacgacgccggcgccccagtgggtggggtcgctgcacggcccgggtagcagatgccgcacatgttggtgaactgcaggttcaccgtcgtcgacgacggcgccggcgtggccttggtctcctccttcacctttggcttctcctccttcttctcttccttcttgccttcgccggtttcttctcgtcg

SEQ ID NO: 3527 - DNA, 702 bp, Oryza sativa
cgagtacatcgcgaagaacgggcccgagttcgaggtcgtgatccgcgacaagcagcacgacaacccggactacgccttcatcttcggcggcgagggccacgcctactacaggtacaagctctgggtctcgccgcggccgccggtggcgccgtaccctcccgggtcgatgcacatgatgccgccgccgctgggtccgatgatgcgtgggccgccgatgcaccagccgggttacccaccgttctacgaccagcaccagcatttcggtgctcacggccatggggagtatgatgccgcgccgcagcaatccttcaagggcctctccgggccgcttccggtggatgtcgcagctgagctgcacgacgtgcttaccaatctcaatggcaccaaggagtcgatcaagggtgccaagacatggttcatgcaaaggtcgccgttcgcgccggctttggctgaagctctgaaggatagagtgtttgctttagaggattcggagaggcagctccacattatcttcctggttaacgatattcttttcgaaaggtatagcttcgatcggcatctgcttttggtatagaattgctatcctctgctgatgtgaaatgaaggcacgctgtctgatctgattgactgaacaaatcacatgatacgatgaagaaagccagaaaacattcctgctgcaaagatatctatttgcctaatggg

SEQ ID NO: 3528 - DNA, 655 bp, Oryza sativa
tctatatgagaagacaaccctttttttagtctttacatgctattaacacattaaagggggtgcaggtcgcaagctcgttttgagaggttcgctgatttgcttgcttcagataccttgaagccgtgtagcaaggatcagggttctagtgctgctaaggaagatccatataatgcttatgaaatgagtccaagtgatcaacggcagaatcatgaaacaactagaaaaagatccgttgccctctcaactagcgaagaaggaaggaatggtaagctaactagatgacatgtttggagatatctatttaatagtcgaatggtttgtccgtattaacgctgccaactagatattagacacatccatgattttcctctgtggtaaataaacaaatgattgacatcctgttactctcacctgtggcttcttcagggaagaaaaggagagagagttatgacaacagggatcctatgtcagagaaatatagaccagaagatgctctagaaccttttcagagcagcaagggaactgaggcaaaagaactattatctgtgaagaagaatttgggggatggtgacaacaatgagaaaggaaatgttgtttcttctgcaaatgtttttacagatagggtgagatgctttcttgcttattctctttatat

SEQ ID NO: 3529 - DNA, 1577 bp, Oryza sativa
tctagcaataagaagggggctaacaagatgaatgatcaaaacaagtacataagcatgtctggcaaaaaatagttagcacccagaataggtgtacagatcattgcattggtaatgaatactagtaaacacatgcaactgcaatatacaagcaggttatgatcttggcggtgggaacctggaaatttcaagtgcttgaactatgtctttagtctagatcaagcaggggaacatttatagaatttgtgttttgagcagctccaacagttatagttcacacaatgaagtcagaaagtttacacaaaacagagggcaccacaaactttatgtttaatagattcgaagagttttttagtctagactctagaagctgatattgcacttaccacgtagtacaatgcaaaattgtccttgtccagcatataagttgacctcagtttgaaccgaatcatgtagatgacaaagagagtagctgctagtgtagctgtatcaagtatggtatggatgtcatactccataacaaaactgcagtacagcctaacagccagaaatagtgctgttaaatcctgagacttgagtgagagtcctgcagtaatttagaaggtttaaacaaattagagcatgagttacataaatgtaggaattaaatgaagagagtaacaaaagggacaattaaaaaggtcccagagttgggggagggggtatgaggggtgagaggaaattcatcttgcaattgtaattttcaacatgcgattctataccagtctactccctgtcattcaagcagttaattcatcttattttattttttgagaaagggaggcacctccgttttcattaacgaaaacaccaacattacagaagtccttaaactgcatgcagttaattcattttgatgcatattaaataaaataattggtctatcctcaataaaaactgggaagtgaatgcagcatccactatctaaaaaaattacctgattaccatacaatttccactttcaaacaagtgattttacagcttgctaatgcatgcagataaacagctgtactgatgtagtgaaaaccagttcggttaaaaacttagaatacaatagaccaattgggattttgctattctctttccactcaagaagcaagaacaaccaagttgccacagagcaatcataaattccaagcaattatgcttttggaaagcaatggaattatgagatggaccatatcttggtaagttaattgcctaatattttaatgtcagaatcaccatctttatacccccttctaaattcttcatttgcacaaccaagcactcagacataatatgttttcagaaagtaaagcacgaaaggagatggaaaacaacaagttccatgacagagaaaggcgttctagtagggactgaagcagcaccaccaatctaaacaccataatctatgcgccgtccaccaggagatgacatactccctccaacaaacacttcaatcagctacctgacagaccagtactgctcaaaacaaactctgctagtgctaccctacaacacatctacatatagaatgtccacctcattactagaaaacc

SEQ ID NO: 3530 - DNA, 515 bp, Oryza sativa
  unsure (1)..(515): unsure at all n locations
gggccattggtgaacctcctcgacgagagggaagccgacgtcagccgggaggcggccgccgcgctcaccaagttcgcctgcacggagaactacctccatgtcgaccactccaaggcgatcatccaccatggcggcgccaagcacctcgtccagctcgtctannnnnnnnnnnnnnnnnnnnnnnnnnnnnnnntcctcctcgtgtgctacattgcgcacaacgtccccgacaacgaggagctcgcgcaagcggagatcctcaccttgctcgagtgggcatcaaagcaagcggccatggtgcaagatccattgatcgagaacttgttgctggaggccaagattagaatggagctctaccaatccagaggggcaaaaggttactactgagatgcacggttttgatgcagaaagaggcacatgtaggatgatactaccaagatgatggaccggcttcttcttcttcgtcgtcgtcttcgttgcatcaaccagctgactactgtatatatattcaggtg

SEQ ID NO: 3531 - DNA, 1105 bp, Oryza sativa
ccgtctccgagctcgccaccaaccaccccaaatgccaggacgccttcctccagagcaacgtcatccgcctcctcgtctcccacctcgccttcgagaccgtccaggagcactccaagtacgccgtcgcctccaagatgtccatacacaccgtcctcatggacaagaagaacaacggctccacctcctcctcgcaccaccacgacgcgctagacgccgtcgaccacgccgccgccaccaccaccaccaccaccgccatggcggccaagcccaccggaggcggcgccgccagctcgagcggcgcaggcgcaggatcagcaggaaccgggacgacctcgagcagcagcgtcagcgtcggcggcaccgtcgccgggacgaagcagcacaacgcgtcgctgtccgggacgagcaccaaggcgcgggagttcgaggacccggagacgaaagcctacctcaaggccaacgccgccaaggcgctgtggcagctcgccatgggcaacgcggccgtgtgcaagaacatcaccgagtccagggcgctgctctgcctctccgtcctcctcgagaaaggcgtcgacgacgtgcggtacaactcggccatggcgctcatggagatctgcctggtcgccgagcagaacgccgacctccggcgatcggcattcaagccgacatcccccgccgcccgcgccgtcgtcgaccagctcctccgcgtcgtccacaaggccgactacgacgagctcctcatcccatgcatcatttcgctcggctgcctttccagaaccttccgggcgaccgagacccggatcatcgggccattggtgaacctcctcgacgagagggaagccgacgtcagccgggaggcggccgccgcgctcaccaagttcgcctgcacggagaactacctccatgtcgaccactccaaggcgatcatccaccatggcggcgccaagcacctcgtccagctcgtctacttcgccgagcaagccgtccagatcgccgcgctcctcctcgtgtgctacattgcgcacaacgtccccgacaacgaggagctcgcgcaagcggagatcctcaccttgctcgagtgggcatcaaagcaagcggccatggtgca

SEQ ID NO: 3532 - DNA, 652 bp, Oryza sativa
acatttattgcggtttggacgagcgcgtcacgccgcatgtaacgcagtgcagcgcgctcgtttatccggtcagtgaccagtcacagaccgatcagatcgtgggttaggtggcgacaggcggtctgacgcacgcctcgccccatcccgtcaggatgagagcctccaagcactcgtccctagccggagccggcgtgttagctcctggagatggcacgttggtcccggtcagatatataccaggcttcatcctaaccattacaaacaagacattgtatgaagaggggcgaacatgcagattgataaactgacgcgtggtggacaagaatgaccgatttgtgaccggtctgacactggtcatgtcgtcagcagacagccatgttcccacgtcgcgcctgcttccggcggaagtggaggtaggtatgggccgtcccatcagaaggtcattcggacggcaaccatacaagtctccgtctgtttatgaaaagataggataagtccccacaaaaaagatagagatggtgcatgtggtatccccttgaggtataaaaggaggaccttgcccacttagaaggggaaattttcggatccagaacgatcagagagggagagagtaagagctctctggttctccagctcttttgtagcttcttca

SEQ ID NO: 3533 - DNA, 4471 bp, Oryza sativa
cgtcaatactaataaaactttagccagaaaaaaaatgtttttatgctttggtcatagagtcatggtgtggttttggggttacaaaatccattagctgaccagaacaaccaactcgctagtgttcgtgtagataggtacaagttgacgaactgacgagcgtttagatgtgtggtaggccggggcaagccatctgatctgctgattctctaataatctctactgtattgcctaatcaaggtctccggtatttgaccggcccggcacgtatcgtttattaatgcgcctcgtggagtggagaacggtgcgtgaccgcgcaggccacgacgacgacttgtgtgagaaacaacgtatcgcccggggcctcttgaccttgggtaatgggttccagcgagaggagagaaaaaaaaaaacgaaattccggcagcgagaatcacgcctgcacgccgccgggatggctcgccgtacgtcgccggcggcccccgccgcaaaatatatgacccgtttcgatctgggccgttcagatgagatcgagcggtccacactgggcgtcgtcgctgggcaagacgtgcggggctgtgggccccagtttttatgtgcagcgagggggtgcgtggtccctacgcaggccgtgcaactgggcctcggttccccactgtggccccacccacgttatctgacgcgatacggcccgcacgtgagttacagcccatatagtacgggcctgacgtgaatcccgttccggcccatctgctacggcccgcacggtagcgccgaatcccattcggtacggtgtgttgggctggtgaatgacctgttgtgcatgggctggctaaggggattgatggatgagctttaaaaggaaaacagtatactttgactccctcaacgatggcccgagtataattcatgccctccaacacaaaaccaactatatcaactatcaaaactggtgccccttggtgatttgggaagcagtattggctgatggggtggtgttgatttagtcttcgtcccacgtagctctagccctggcggttgtcccttctcgtcctctttatcttcggcaccgctaccttagccatcactgtgattatcgaggttaaaaccgccgataccatgtccttctcgctcatcctcaagccattgttgggtgactttgtcgtgcacaagcggtttgactctcccgctaactgaggtggcttggcgccgatgatgtcgacccccaccgcggttgctacatcggattcggaggtgacgatgaggagcgccatcccggtgtgaggcgatacggtagtggtgcgcgtccggtaagtgttgacaatacctgttgagatgaccaccggcagggagaagggcgcgtctgcgctggcgatgcagaggctgtcattcttagttcttggcgaggtaatggtcgagaagtggccatcgccaacatcgacggcggtgacgagcgctaccgaggcgcaaaaggaggatacaatgatgacggtggagcagacaaggaaggagaacaagatgctgacaagggagttggacgagcttcgaacagtagcaagggggaaaaggaaagaggaaaaagatggggagtgaggaaagaggaaaaaggaaaggagacaatcagacaaatgatgacatgtgcatcttatgtcaatgggtcccatctttttttttgggtgaatgatatatgggtctcacatatttttcttgtttttgtttttattctaatgccacataaacaccacatgggacagatagtagatcaacaccgccacgtagatgctacgtcagccaaaactgttttccaaatcaatcagggtcaccgtttatgctcgttttaatagttggagaaatcaatatatccggtatttgtgtgttcgaatatgaattactcataccatagttgataccatagtcgagggtgtcaaagtatatcttttccgctttaaaacaaatcaccacccttattttgctctttttttttacttttgctacatgaacaatttttatttttcattcggatgcatctctttcatatataacgaagtcaacataggaaaaattccaagaattcatttttttatttacccggtcagtccataacaattgaataaaaaaatgtgtacctttaaaagagtttaggcctcttaaaaaaaacataggaatttcgaagggatttaaggtggaattgactacgaaattcatattccctctgtattttcatatttgacgcttttatatttatttttaaattaaccaacgttacatataaaaaaggatggagggagttcattccaaacaaatccttattgttttctacaaaaaacaatctgaactttctgaaaaagacaggagttcgccctccagccatcgccatccaacgcactgttgtgttgcgccctcgtcaatggcgtccccttccaagcgcgggccgtacgccctcccctccgacggcgccctccccttcctcctccggtggtgggggaagggaaagggtgcgaggtcgccgtcaccgccacctcggcgaagtccgcgcctccgctcggtcagtgtgcgcccgttccgtccattaccaaccaaagattccactgcacttttgctcgcttcgctttctagtctcctgtacacatctcctcgctgcgatccgtgccctagctttccgatcttgccgcgatcttggtgggtatacttgcttgtcttactgacacacatggtcgcaatatctgaatgcgtcgcccttgtcttgtccccccatgagatgaaccgatcgatgcatgttgattttgggggtggaagaacaactttgatgtaggccaaatttagaggcatgtgtctcctctcacactagtttttagtgaagtgttgttatatgtgaatgacaatatgtgaaacaccttgcaaccttcagtagtagtcctctgcaatgacatgagcagatacgcgaagtcgtagagtttggttgcagcaaggacccatgagggtgtaggttttgtacagtctagtcccttcttctggtacttttgtcttatgatgatatcttggaagaccaatacttccgtgtgctcatgtaattcagcatcggcaacaatatagcttgagactgaatcgaggaatgcacacaagatctccatgctgcgttgggtcgtattcgggaacgatgccaatgaatgaacaagaggagcattccagttctaattgttagcttactattagcattgccaatttgtcatgcatatgccgttggtacagcctgctagaactaattccatgctctcattatctgtcagatagagtgatcaatcttggatgattttgtaggtagacaagctacacttcctagcattttttaattatatttttgtctgaagaggcaggcacaacattttcctttaagcccagtcatttctttcaaccttttcagaaagtcattgtgctaattgctaaataaagcaagagggataccttactgagggtaccttagttcaaaacgcaaagtggccatgaagatcaatattcaaaacctaaatatataaattaccctctaatcaagagtacctttaatgttaagcggcatcgattacgcgttttcttagctggaaggttggtaatccaggttgttattcagtgcatttagctgatgtagtgatggaaatactagacccattctctttttcatgcattttaaaagctagccacctccgttacatgagcagtaatcaactaaccatatccatcgaatgtataccaaatccatgtaatctgtctaaaaccttgcattttaatggaatcatgagcctgttggttagtggttactgcacaaacacgagatggtagctcagtggttacttctatgtgatcttatctataacattgactagctcaaccattggagaatcatggtacggacttgaaagtgtcaggtcttttacttgaaagctgtaactcagatgggttggtgaggactgaggagcctaaatattggtagtctcacttacatgcacatgtaattttgaagggtttttattattaaatgacctcatatatagataatgtcacttgttcttttagtaatatcttcctatcctgtcaaggtatagtcagagcttcagggaagcagccagaagttatactgaaaggacacacagacctcccactaagtcctactgtacaagcttgcttgaagttgggcactgaataatcaactacccctctcacataagagggggaaaaacaagagaaaaatgttgaagttactattcccagataatccctcctgtttagtttttttcaggaccaattttgcatgataataccaactggatgatgtcagctaaatcttctcatctagaaatgcagtccattgattctaactagtacagactacagatagtggaggcaggatggaatagaccaaccgactagaaagaaaattactcccatgatgatgggagtttccttctgggctgcaggaatt

SEQ ID NO: 3534 - DNA, 4155 bp, Oryza sativa
  unsure (1)..(4155): unsure at all n locations
attcctgcagccccactctaccatgaactagttactattaaatgcagttttgccaaatttgcctctctttttttattctatgtgtctccaatagtggataacatttttatgctcaaattgtcctcaataaatgataatgctaggctcattgtttttgcccttagaatatttcacagacttgtcgtgcccccacgaagctgcggttattgacctctgttttggactgttcaatttcaggcatatgcatgccttgccgtggacgatggatcatcgtatgatttgaaacactacaccggatgttaacttagaacttaattaatagagaaaccaactctaatatactcatgctcaaagtgtcaaaagtcaaaacaacactcgttttatcgctaatctgtaggagttgtacacgtcagaaacaacattgttttgttctgttttggaaatagaatataaccaacaaagaaaagggagaattttaggttgaaataaataaagtatattgcaaaaggagaatccagccaaacaagtaggagtttaggagaagacaacattgacaaatttaaaactctgcacacacttacaacagggatcacaatgtaataatatattaaaatattataaggttgatccgttgatttgagttggacattattgattggccccaaatgttaataaagcttggaatttctgtggaaaccattcacatggatcgagtcaaataagtacaggctgctgggttccagacaagaaacacagtgatatgccaatgtgcactgtatctgtactggacatagcttggtctagccactgtccagcgtcagcatcttgcagttccagcatagtgcaaaagggattcaatgatggcaataaaacagcaaagattagcatgatgttnattgttgggcgagtcagcatcaatatttattagcgtggattggcttaatctgcctaccacatgagttttgtgttaataacctggctgcgtaattccagccttccaatttgacatacagaaacaaaggtctaaatgcatttagttggtgtgactaactcatacttctggcctataagtttcaatcgtacaataaagaaaaaaagagtactcaaaaagttaattacatatctcttacctgctcatcgtaccacatcataaactgccacagccagatacctaaaactaagcaacatttgcttttcaacgaacaaataaagatgaatgaccttcaacgaagacttttaaacagatggacatcgtatttattcgactataaacatgcccatgtttattacaatgatgtgaatgaagatgataaataaatgatacatagagtagaaataatggcgtgtccatcgagcacttgggatcaaaacctgacaaaacgacgacggcgcgtatagttgcaggaaaatttctacatgatctcgacctagagcctcggtagcagcaaatggaatgcttccatgttttttttatagaacatttggtgatatatccttattgtttacacagaatctacaataattattcaccgtgcttcgtcttctagattgcggaacccggcggtaaggtcatcgtacagcttctgaaatttcgcaatcaaaacttctttgccctctgcgggatcctcgaatttttgcgacctgtgacaagcaacaaataccattggtcatattgcaatctacacagcgagtgttagaaacttgaaaatagggtagaaatgcgtacactaggcggtagaatagatcgcccatgcgatgctttatgacactgtatgtaatcttctgtccatcagcaccagctgcccgctccaccgcctataaaacaataaaagcatacagattattaaaatagtacttatgctacttttgtatgggaatatcctatttgtaattatattgagtaatgagtaaacaatgagtaacttatatgacatacaacaaacagtgcctctaatcagttcagttgtcttcaattagctccactcattcacctttcaatgtaaatgataccttaagtgttgaagttccatgctgatgcccatgctaggattcaattatttaaattcaagtgacaaatcgatccagagcctatctatgccagtaatccaaaacctagaactccgtatataaatccaactcatactactatctttttgttccagaaatcagaaattctagatcaaacaggaaccagtgtctcagtttcacgccactctatgatcttgggatttggggcctctaggtgacccagattgatttaaatataagctcacgagcatcagtgacagctgatagaacacaattattggaaagttttggcatgattttctagtcagctaggattggttttctaaagaaaattggcaaattatcgaattcctggaacaagagaatttacctgggttgccaatgtgttgaaatgaataatgttgcgcatcatccaaacagatttgtagaatgggcaatacttatcatatctgtttcatgcaacagaattgatcaattagttaatatggattatgacacaggttagtagaactatcaaatgggtttaacactcacggggtgaatgcattttgtgccaaataatcttctctcagaagttttgctgtctccagtgtaatcttgtcagattctgccagtgcgtctttaccaacaagctgaatgtggggtagagtcaacaataaatatcacacaaagaacaacaaaagctcaaatcttacttatgccacagcttgtttaaaaataacgtacgtactaaggtcaagtttattatcattttcaaaatattagcaggaccattaagtgaacaaatgccaagaaactggtacaaagcacttatggtaggcaagtaatatgtgcgaacacttctgataggatgttacatttgcatgatgcagattaataagaagcattacagccaggagggatacgacagtatgagaaaaggtaacttcaataagacaggtcaaaccatcgtggaattccaggagagtaaatattcacaaggctcaaaatagtacctgcactatttcatttaaatcatcttccctctgcaacacctcacgtgcctttgttctaatatcaatgaaatctggatcttccctctcatagtgcggctcaagcgcctgcaacacaaaacattgtattgtcacataacatcaaagcaaatgcgaacgaacaggaaaatgttcaaatataacttattagcatttcattgaaaaaaatgagttagaagaccaaaaacaattagaacaaattataaccatagaaactcgtatagttctgttattctagagacctgttgtctacttcctctggccactcaactccttcctattctctccgttttatattttgtcgctttgacatttttcctagtcaaatttctttacatttgaccaagtttatagaaaaaattagcaacatttacaagttacaacatcaaattagtttaatcaaatgtaacattgaatatattttgatactatgtttgttttgtgttgaaaatgttgctatatttttctacaaacttttaagtttgactagaaaaaagtaaaaacaacttatagtgaactctttcatgtttgcccttgtcaaataaaataagtgctacagctctcacaaataaatgttccattttttcaatagtataaaactataaatgaatggcaacaaaaaaaattactttattttcttccccttaatgaaatgaaacgcaattctcttgcattttcatgaaaataaatgaatggcaacaaattcattttagtactttcttaatctttgtgcacaagtctaaatcaacttacagttggaatctgaggggagaataaactatttaagcaagttgcttgtcagaacaaaccttagaatatttcgaataagatatgagccaattcactgatgggaaatgcttcctctgggcaagctttttatctaatccccagaagacctacaaacaagaacatgtggtttaacaacactgaaacgataaacattattaatcatgacagacttagctgcttccttacctgaacaatactaagggttgcagaggtaacaggatctgaaaaatcaccaccaggtggagagacagcccctacaattgtaacacttccgtcccgttttggacttccaagacaccttacttta

SEQ ID NO: 3535 - DNA, 3009 bp, Oryza sativa
agagcataccgttatgttcttcaagagtgcataggtaacatcaatagctctatacgaccttggatgccattttccttcagaccaatcaacatgtgtcactgaccaattagagattccaccaggatctaccatctgaagatgaaagtgaaagcatatgaaagaaaagcaagggaccaagaagaaagctaaatatcaattcaaaatattatttactgacattgaagagggttggcaaataatgctcatcagcaatacagttgcgtccctctgctggctgcagaacacaaaaaagcagaaaaaaattggtgtattaaataacattatgtatatatacattatttcaacgatatgaaacacgtgcttcacgatttttttttcttgacgagttaacacccttttgatttcctgtagcatatggctaaagcagttaaaacttagaaccaagtggcacaagtcttaaattcagttcatctccaaattatcatctctactaaagctttacaattgccaatagcagttccaaatttcatatctcaactaacatcctagctttgatcttcattctgacagtatcaccagggtatcattttccctctttgggataaatcctggtaccctggtacctactgtgatgcctgttactggctggttcccaatgaacaccatgaagatgcatttattttcatttatctactagatacactatagtaataggatttgtgtttagatgctaccaaaataacttagtaatcactgtacacgtgaaatgaactatagcatgatgggcatcaacaattaacaatcaatgaaggaggaacataccttgcaatacagctcgaacttattgtagtaaaggtggtctgctaaaatcagtaaagcatgccttcgtgttacagcaaaccactacaacacatacgaaaaccaacttagaaaagcataaaaagatggaagtgatatatcatcattctcacaaacaaatgtcctagtttctgaagatgttgacttaaaagaatgcctctaaaccaagaatatatgaagcgcctaacaaactttggggtagtaaacattctgaagaataataaagtagtaatgtaaaaatatgaacctgggcacccttcctgaagtccctctgttctatttcagggagcatttccacagaataccttccgcttccatgtggtccaggatcaaggaagctgatagagtgaaaaaacacaatgaaaaacgcacacaaacatgtgtgactaggggagatagaaaattgtgcggtgatcatagctctgtgttaatgcattccattctttaagtcaaaacacaccaacgttttctacaccattcttgtgatgtaacaagggtattcctttgtaaagaaatataagccaaaagattgatctagaataaaatgcatgatgaaatattcctgattttcatattcccagttattctctaggtcacagatgaaattaaagtagaaatgttataatcaatataccaaagaacttttttaaagcagaattacatgctctgaaagtagctatttcctgcacttgtatgtactatattttcctcttgtcaaatggatcaaaatatgagttcagcgctcttaccaatcaatgaagctgacgtttgttcccatcaaaaaattatatatgtaatcaaatgtatgtagtggaacacagctgtcaaacaaataaaaaggatcttaacaaagtgcaacaaaaacattttctttttgcaggcaaagttttttaaaaacaaaacctgtccgatagcaagacgaaaaattgattatcaacatcttccaatgcatttgctagcagcctcttctccgcatcaaccattgaaatcctcccccatacaacctgcacatacaaagacaatgcaatgctttagttctgcaaaacaaattataaaatactatgttggatgtaaaagaaatcacaggaatcactgatagcaaaaatttcaaaagacaaatcacagtccttttgcttatttgctgcaaaatgtactactaaaaagtaagaacttcttaggagaaccaacatggaatttcctaaacacaggaagtacaagccagattaaaaaaaaaagtgaactaagcctagctcatctgatgggtgtgggttgtgtacactaccaccacctaggctcaaatcttcttctttttgaatttagatatttctttttctttattttaacaacatagagtttctttgttaaaagcttgccttatatgcaggtcattggttgcaaatgtaatctcacttatagtcatcgaaaactaatccaagcaataacacaattttcttctttcttagtataaacaaaaggaacagttgtcaatgcataacaacatttcttattgttcataacaccttgctaagcagatgagttaagataaagcaagaaaagaaacaaacaagtacacagtgtgggggtgaacattagtaccttttcactatgaatctctcggccaacaaacaaagaactagaatgtacaggtctttcacgcgatgcatggatataaatggaatatcgatcctcatgaccctgcacacagaagttcaagcaaataaattttacaaactagatgttgatgcatctatacatagtacaaactccatcctcattacagaaagaagcacatgatgggtatatctgcgccacacctgtagaaatttctcccatagtttctcaaagggcaatgaacctggtgttaagaacatcaaggcaatctttggattcttcgagacaggcatgggcattgcaaggagatccctcataacaacagacgagacgatctcttcgtctgttcgctcccgtcgggtcacagtagggagccaatccttgaaaggagtgcagacgctcgaagcgaagaagtagcacgcggagtagcggcgcggagggtacgcgtaggccccgatgagcgcgacgcacaccagcgacagcagcacgattatccacatgggcttcttggcggcgcctcgttggcgcggagggggcatg

SEQ ID NO: 3536 - DNA, 2403 bp, Oryza sativa
ccataccatcaatttgttccataacacaaaaaacagcagcaacagcacaaaagtagtctttctttgctttgtcttccaacacaacaagagataaaaaaagaagctaacactttagatagatagcaagaagccaagaaccctagctcccgagtacctaggcggtgaggaggacggcgccgccggcggccttgatcttcttctcggcgaccttggagatgagcttggccttgacgacgatgggcctctctggggggagcatccccttgccgagcaccttggtgtagccgaactgcgtgacgtcgatgacgggggccttgccggcgccggcgccggcctcggcgggcaccatggaccagaggcgctcgacgttgacggcggggcagtggaacctgttgctgagcctgtggaagtagcgcatcccgaccttgccgaagtagcccgggtggtacttgtcgaacaggatgcggtggtggtgcatcccgccggcgttcccgcgccctcccgggtgcttccggtgcttcccgatccgcccgtgcccggccgacacgtgcccgcgcttcttccggttcttcttgaacctcgtcgtcatggcggcggcgaagggcggcgacggcggcggcgggtgggtggggaggaagaagggggaggtgggagagtgagtggggtgtttatagtgttcggtgaaggggtatcggccgttggatcgtgaggaggggtgatcttgaccgttggatggatgcgggaggggctcgattagggtttttgagggtgaggtgggctgggccctccctctcgctttgtgctcacttgagatgggctgttgaaatgggctagtaaaggagcttttaaataaattcggagtgataaagaaataaaccatttgatctacttagttattattatcgattggagttttaaaacatcaagatttaatcacatcgttttttttaaaactcaggtaatttattagatcaaagaacaattacatcgctcactagccactttacatgcctcattgtttgccttatggcttataagccaaagccaaaatttgaatagtaaaacttgattttgatggtttttcaacatagtattttttttttagatttggcatttcaatcactaagaacatatatataaaattttactcatatatcattttcttaaattgctaataaatcgttatggtttataataaggaccgtaacaattaaagccgatggcttctcctgccatagcagatcaagccatggccatgctactctagcctcccctagggtagtgaacaagagttaccaaggtaaaagcttcagaaataaccacacatttaagcccgcagctgctgtccccgaaaaccctccccgaaaaccctccatttaatcacatcgtttgtaaaatgtttgtaaaagaaagtttgtacttataataaaccacatgcatgcccttggctacatgcttatgcagcaacaagacataccctttctacgagttactgatttacattcagaaattcagatgcgcgtgtattttcacttcagagctgaataacatgaaaacgatgcatatgctgaaaataaaaatcagatgtattcgaataattttctgccattttcaactaattagtatttacacgtacgttgattaaattggtgagtttacggtgtagaacactgtacttcccagcagaaacgaagagaaaatgatgcacatcagaaacggagtatgtgtaaacaaaactcaagagggcagattaactgtaaggttgtgctggtgtcataataatctcttcatgtctacaaagaatggatcatataataacagttccaatctgacaaaaacgcctattcctcaacagatgggaggagctaggaaactagaaagaaaagagagaaaatgtgggcgtgaagagcagctcatagcaacatacaaaaaagcacaacatgttacaatgagggctgtatcaaaactaaataaatatcgcctcagccctacctagggactcagaatttgcaagacatcgccattgccgcagcaacgttgatatgtctctggccctgaatctgtgttacgcagctaaatatcaatttcacaatttacataaaatagaagaagaaataaatcctagggaattcctaggccaaaagcaaagaatcgtgtagagctcaagtggacgtgtagctggagtgcttcagtaggttgttgagagcttctgggtaaaactttctagcaaaaaggtagcatggtctctttgttccgttccacatacagggtgtcattgtcacaactttctgcgatagtgataaatgtacatatcaatattacatgtaggagctacatttctatgttttagttaaattccttgactgcgttgcatgcagacactcaaaagcaaatatcttcagg

SEQ ID NO: 3537 - DNA, 1253 bp, Oryza sativa
aataataattcctaaattttttaaataagacgagtgatcaaacagtacaagcaaaaatgcaaaatcctttatattatgggacggaggaagtataacatttgctctgttgctcatttctaaaacttctgaaaaacgaccaaaaaaaattacaaacttgcatctgatctgatccaacaggctggaggctttgacaagctgctactcgacagcctctacgaagacgagacgaggcggcggcagatcgccggagtcacctacaccggtagcattggaggaggagcacccaaccctttcgacaccaacgatccatttgctacgtcgagcagcttcttgcccccatccaatgtccagtttgcaatgctgaaccagcagcagcatcagtactaccagtctcaacaccagcaacaatactaccagcctcatcatttccaggatcatcaacatcaccataacatgtattttcagacacattatcaacaaaatcagatataccaacaacagcagcagcagcagcatcagtaccctgcacctcaggctggatcttccaatccgtttggtgaccctttcggtgacctcgtaccaatggcaatggctgtctctcaaaaacatggacattcaagtttgatatgaatttgccatattcatgttgttaatgatcccaggcaattttaacatagatgggttaacttagtcaccttctcacttgacttgagtagagcatcttgtacaacttgatcttcttcgtgctaacttgagaattatgatgctgtatttgccatctcgctctcttgcaatatccacatttactcgaaccattgtagatttgtgatgctaatctagtgttgatcccaaatacaatggtataacctgaataataacaccggtataatcccaacaaattctactattaaaatttgctgctctattaaaaatatattagagtgaactgcatccttatatgtgcattaggttacgccaaaatccaaggcaaatccaaatgcattaggttggcatccgcatctgacaggcaatacagatactacatggcaaatcttgatgcgacaaaccatccattcccaatagcatttcgatatcaagaataataatcagaatgatatgcggcacaaaaatatttgacataaacctacatgatcatgtaattcaatcaaaactcatgaatagccaccacagatcttagtagccataccatcaattcgttccataacacaaaaaacagcagcaacagcacaaaa

SEQ ID NO: 3538 - DNA, 7276 bp, Oryza sativa
caaaaggggcaaggtccaaggcatccaatgttgcactcatctatgaaacaacctgcaatccatgggagaaggacgacaaggagcctcgcatgggggttcgatttagggaggaaatgtttgtgggttcgattttgggaggaattgtgggttcgattgcgtgaccacgaaaggatatcgaaagctcgacaacgggtggttctaccttagacggacggtatgggctctgttggattgcattgctttcaatttgatcttcccgttggacaggaattcagcaagtacagcggccaaaacttgaattctcgaaaaaaaaaggattttcgtttcaaaagattaaaaataaagtaaaccgtgatggcttcatcaggttgacaacttgatatgacgagaatgaaccacaaccttgcaggatgacagaatatcagtgcatgtcaatccatgggctgtagcctgttagaataacaaaagatcaggccgaaaactctgattgctacaatctttagcgatggatacacaagcaaaaaaaagacatgagatgaagtcttgcaagcttaagaaaaggccacaaaatcaccacgtgattaatgacatacaaactgcatcaaaacaaagcagatgcaaatgttatgcctataagatgagaaaggcagggaaatacattaaacgaccgacaaagctgtcattagagtatatatcgaagcagctgtgctcaaattaactgaaaaagtttttaatcacaatgcatgcacttccagtttgaagttgcttatgataagatgcataggaatgtaacaataaactggaaagttttttgctgactttccgtacaaaataaaccatcaaacgaacatcatcacaactccaggtagctcatcggtggaagaacagaaattctgttagatcgaatcaaccacagacaaaccccaagtcctgcaatacagcatagataaaacagggcatgtagtcagccttcacatcagttgcagtggggttggtatgacaacatttaaatcatgaacattcgagtatgagcttggagtggatagagacattgcataattaaaaggtgcattgcagattggagtggctagagacattgcataatcaaaaggtgcattgcagaccttcccttgtgaataactcctctacagtagaggcatacattactcctaaatcacattatatcagcatgttggaagttcaacaaaacattatatcagtttgactgtttgagtgcccgtttgttcttcttaaaagaagatctgccaatcattgatctaaccaggtagcaattgaactcatgcaactttgaagaggattacataaaatgctgcaactacgctattatatattgtactaaggttatttcacagatatattgtaccaaggttatttcacagtataccaaggttaagtcagaagatgctcgtttcatatggtgtgacagcaatatgcataatttcaactaatttcatttcaattatgcaaaacagacatgaacaacaaggcctatgcactgactcaaaaaatagctgtgactctcctcctcactacatttatactacaataaacagcgaagatgcatccattcacacagcaaatgcttcaatccatacactacactaaagattatcaataaatatgtttgcttcaatccatacactacactaaagattatcaataaatatgtttcaccctttcaagacaagcaaacaaagcaaagcgtgaaatgcacaaaattagtagatctctgcaggactcgatatatatttaaagttgtaacttgttgcggtggagaggcctgctgatatccaagcagtactatgtcaaaggataaatggatcacgaccaccaaaccaattcagttgtactaaaaacctaataatcaaagttactccttaaatctatcatttaccttttcctataacctatattatcctcaccgtggtggaaatggagcaacatacgatccaaaaaaattcctaatcaaagttactccttaaaaaacaaaaaattcctaatcatttgttttttcctatgaaacaaatttaattctatgaaaaactaattaaacttactcctgaaaagctagtatcacttttttccctataataatccagatccctctcctgcaccgtgattgaaatgcattaaaaaaaaatccccaaccactcgtgatagattttaagaatagaaacatttcctcatatctccatagctaacatttccaatctaaccatcccaacggcaccgaacgaaacaatcggggaaaatcccagatcagatcaggggaggcaaggagacgggggaaccctcacctgacctcggatctagtggtgggcggcgccggcggcgccctgcctctcgagctcctcgaggtgggcgaggtggcggcgctccttggggaggttgatgaggtaggagaaggccatgaggccgtagatgacgtggaagagcggctccggcgagctggtctcgatgtacttgtcgatgtagcggtcgacggcctggtcgctgctcttcttcacgttctcccagctcagccgcggcttcaggtaccccggcacctcccgcaccttcatcccccggatctcgctgatcagggctcgcagcgccatggatggatctctccgatctcgatctctcctcttccccttcctcgcaacgtcagggctcgcggctagggtttggtggcttccgagacgggaggaggaggaggaagggtgggtgggtggtcaagggatggatttgttcgctacggggtgggatgggttgggctgggctaggctgggccgacctgggcttgtgtgacagacatgtgtagaggctcactgtttcggaaaaggaaaatgtataccgaaggtccctcaacttgtcattgagttataaaatcgtccctcgaccttaaaaccggatacaacgcatctctcaacttacaaatccagtgcaagttccctcggtggtttttgactccgattttattcgacgtgtcagctgactcagatggtcggtaggatgtcctccttccttcaggcgaggaatgcattgacctcaagcataggatggcgaggtcgggctcggcctcctcctcaggcagcattgaaaatattgctgaagaccgaatttcaacgcagaaatatcataaccgccaaattcggtctcagtctcggtctcggtcctaaccgaaatttagcaacattttcattaatgaaatttttcggttctaatatttttgcgttgaaattcggtcttcacctttcaaaaaccgaaatgaccgaaagaccgaagaccgagaccacaaatttcggtctaaccaaatgcccacccctacttgtcgaagctcttgctaccggcaaggagaggagtagggtgcggggactagggttacgacggctgtggggtggcttcactgatgaagataaaactagcatgtggagagagatgggaaagaaagaagatgggagaacggaggaagaagatggaactaaaatgtgggtcccacgtctagtcgtctaggggtattttggtctgtatgataaccgaaaatgtgacggtgatggtatgattttaattttgtgcgaattcgaatgacatgaatacgactagatgaattaaaataaaatttacctgagtgggcatatttccaatcaacccaaaaataaaattgcaaacacgcggattgcgagcgcgcgcacgagctaggaaagggagggagttggggagcttagctcgcgcgcggcgcggtggatcgcatgcgcgggcgggctaaaattagcgggagagggaggagttgatcggaaaaagggaggccgcgtcgcattgcgtcgtcgtcgtcgtcgttgtcgtccgtagcgggagggagggagagagtacgtgcgggcgtccggaggtctcagcgcacgcccgcggccgggccgtcgcgccgatcgcgatggggtcgtggcggcgcaaggcctacggcgccctcaaggactccaccaaggtcggcctcgccaaggtcaacagcgacttcaaggtccgtcaccttcactacattttttttatctcctccattaatttctctcctgttcttgtcgacttgtccatgttcttgcagctttcttttccttccttccttcctttctttctcgttgttgttgctgctgttgttgtagggaattttgttcatatggtcttgcaatcttgctttttctgttagcttagctgcatttgtccatgcaaatgctgcattgtctcaggatgaaggcaaatgcataatttgtataccctctgtcctaaaaataatcaatttctagaatgaatttggacaaacatttatctatattcatcctttatttctagaatgaatttggacaaacatttatctatatacatccttgtatgttattgggtttttttttttttgacaaagagggtagtatgttacctgatatttgctgggttaattgtttcaatggcaggagttggatattgcaattgtgaaggccaccaaccatgtagaatgccctcccaaggacaggcacgttagaagtgagtactcgatcatcttctcctccataatttagttggctaccttaatgccaaaatgtatctctttcagcaggtaatataatcttagaatccattttttttctaatcacattgttgcagaaatattcgtggcgacctccattaaccgccctcgagcggacgttcaatactgcatctatgccttgtcaaggagattgtccaagacaaagaattggacagttgggtcttgctcttacagtcctctttgattatattccttatctcgataatgtgcttgttgatggacattttttggttataggttgcattgaagacattgatagtggtacataggctcttgagagaaggtgatcctacattcaaagaagagttcctggcctactcatacaagggaagcgttttgcagagagcaaacttcaaggacgattcaagccaattaggtgattccctatcttgcatagtgatcaatgcaacagagagtcatgtgtatatatttttcccaaatcaaactctaattggaggatagaaatgatgcatcaactcacctagctagccttgatttttgccagcttgggattgctctgcgtgggttcgcgcctacgcgctcttcctagaagaacggctcgagtgtttcaggatcttgaaattcgacatcgaaaccgagcgtctgatgagatctcctgagtgttccagcaaggttaacattatctttctcacattatcaaaacgaagtccatgtagtgaatgagatgttttgcctcatgatgattaaactttcgttaatcctaacaagtgcaggcacacagtagaactagaaccctgccttgcattgaacttctggagcagttgcctgccttgcagcagctacttttcaggctaattggctgccaggtttcataaccaaaatgttttactagcacatccttgtaaagttgttggatgttgtcagtagcttcatccatatttttttgccattgcagcctgaaggtgcagcaggcacgaactaccttatccaatatgcattagccctggtaatttaattcgcaagaaatcttgcataggttactgatccctttatccaacacattatttgttcttaaatatcatatggtggtttcacatgtgctataggttttgaaggagagcttcaagatctactgtgcaatcaatgatggtatcatcaatcttgttgatatggtaaagtaattctttatgatttttttaaacagtcatatgctgttatcgatgttttatataaaagaagaaggtgccccatttttagaagaattctttacaatatcatcctagataggttatcgctttcagtgtcgctgaattgtaaatataaatttctggttcttattgttatgatgcagttctttgatatgccaaagtatgatgctatcaaggctcttgttgtctataaacgagctggccagcaggtatatatctcaattttataatctggtattttctttcatgaaaatggttgaccctcatgcttgtccaatgcacaggctgaagatctttctgacttctacgattcctgcaaacaacttgagcttgccaggacattccagtttcctactctaaggcaggttagttcatcatcttgatctcaaaagattatcttaggtctaaatcagagcaacaagatagcgaaacattttcatgaatttggccacatccctcatgatcttggatttctaatgctcattccttgcacattatattctgcagccaccatcatcattcattgcaacaatggaagagtacatccgagaagcaccccgtccctcgattaacagcgtggtgagtgcggttcttcatgagaaacaagtacttaagaactagtgcaattctattagtactattatgtttgtgtagttcttgtgtttcttttgggaaaaaaactgtaggagaggctcctacagtgaataaatataataataatataaagttataaatacatgtttatacaagtgaaaatacttagaaactgtctagccattctgaaatttgtgggtggtagttttcttttgccctatggataaccaaggcaaactctgctctaaacttatctttgcaaactttgagaaagggatttagattttttttttcgtaattcttgttgcaaaagcaggagaatggtgagaggaagctagtgacctacgaccaagaagctacagaggagtctgaaaaaccagcagaagaggagaaagatgagcctgcagagtctgaacaagaacaagagcctaaacaagaaccaaagccaccagaaaccactggagatctactagtacttttctgcactattttctctaatccatttatgtgctaatccaagtgtccacttccctaaatcttatttctttgtgtctgtttttgttttatatcttgcagaacttggatgcagaggtgagtccattggttgcagaactggaagaaaacaacgcatgggccctagcaattgtgggaacaggtatatttagctgtattaatctcaaataacaaaacattggccacttaaatttagctgtaaatttgcggacttgctgccaaagtttaaatgagccaaaaaagaagtcatcaatgttttttttgtgtgtttttttggtcttttgcttgcaggtgatcaaactaaggcatcaacttccctggacttgtttttctggcaacacatctgggtgggagcttgcactggtcactgcttcaagcagcaccagccaaacagttcaaaccaaat

SEQ ID NO: 3539 - DNA, 1886 bp, Oryza sativa
ttcgcccctcttcatacaatatcttgcctgtaatggttaggatgaagcctggcatatatctgaccggaaccaacgtgccatctccaggagctaacacgccggttccggctagggacgagtgcttggaggctctcatcctgacgggatggggcgaggcgtgcgtcagaccgcctgtcgccacctaacccacgatctgatcggtctgtgactggtcacagaccggataaacgagtgcgctgcactgcgttacatgcggcgtgacgcgctcgtccaaaccgcaataaatgtggttaggtgagccccgctatgctcaccttccccatatacgcggcgcaaaacccataaggggtcggggcgcctcggccctcggggccgagacgggagcggtccgacccctcggggagacaaagagaagggcggccgtatcaccctcgggcctgacccccccgagggggttaggccacgtgggtgatcgtgtctgcctcaagtctctaagtcatgatactcccggtcccatgtcaccgacagtagcccccggcgttatgccagggcgatcgccctccccgagggaagcggtcgggcgtgacgccacttctaaggcctggtgacaggtggggccggttcctacaggtgccgttgaactacatcacccagagggcggtgtgaggcagctgcgatgagctcgagctggcctcggggacagagacgagctcgggagctggggtccactccaccacaaagtcggcgagggcctggctcttgatcgcgtggcttggttcaaagcgcaaatcgaattcagagagttcgattgcccatttcaccacccgtccagtaccctctcggttatacaagatttggccgaggggataagacgtaaccaccgtgacccgatgcgcctggaaataatggcgcaacttcctcgaagttatcaggatagcgtaaagcatcttctgggcctgaaggtatcgggtctcagcgtcccggagggcctcgctaacgaagtagacgggccgctgcacctttcggcggggccgatcttcttcgtcaggggccacatctccagggcgctctccatccgagaggccacgcggggcgcactcggcttctgtgccgacgacctcggggtcagagggcgacaggcgcggccttcccgcagtggcctcggggccatcctgggggtcgtgggcgcctggcaccgtcggacaagcaggcggagggccagctccggccgtcgggggccttgggccgccgttcggctcgggggcctctcctccctgctctctctctcttcgggcagaatcccggcggtcgcaaatcgcgcgcatcagcaagggaaaaccgaccgacaataatgagcggcccctcggcttcgcgtttgcctttaactccgacaaggagtgcggtgacgacggtgcggacgacagcgacggcgaggccggctacccgggcacgtcggagtgagcccccaggcctccgccaatcttaatagcttttccttcttcttccgaggccttcgggcccccttcttgttataggctgatttaatctgcaatcaaataaagaggaaatttttgtgtcaatttcatttgttctgtgtatgagacgaggatggtctgtgccacggtccttctgtgtcttggcttgaacaagggctcgtgcccaggtcccagcctcaaacggcgcgggtcaaggctagtgcctggggagatccacatgtcgagactggccaggccgggagcgtggtgaccgagggttatgggtgacccgattgtgggtttttgccgattcccccccggagttcaccacgtcccggggcacggctcggttctgggccccttttggcgattttagccgacccgagcccccgagggtaggattgagcacaa

SEQ ID NO: 3540 - DNA, 676 bp, Oryza sativa
actgaggggaacaatgcatcaagtacacgctgggatcgtttaaaagtatataagaattagattagttgagtagaaaaaagagggggaaaacagtactttgagcatttagtggttcaacacagaaaccttaataaaaatggggaggaaaagcacatattattatgagtgagaaccatggtaggttctgtacaaacctgtcctgtaagaagaggtgtatctgcagcaagtttttccataacaggccttggtgaacgcacaggccatgtctgtagtgcagtacaacagattaaactaatgctttaatcctcagacatgttatcttcataaaagatggaacttgtttacctggagcatggtaaattcctttttgataccctgaaattccaattctagcactgtatcctgcatttatagcaaaagcagggttccatacaaggttaagcaaagttagaatgcatgcagatcaataggacatgggataaagtgatactgatagcatccactaacctgcaggctatattgaccagctggggcgatgtaacttattttccccatagcgccaggtggaagagcaaccttgtgttgcatcaaagtattttcattgacaatctgccatatagtcagaaaactttagcaaaggcacatgattaatgatgacagatctcaagctactatc

SEQ ID NO: 3541 - DNA, 894 bp, Oryza sativa
tcctgcagcccgcatttaatagtaactagttcatggtagagtgaaatattgccgcaatgcctcgtttgttcacaatatttatccgcggtacaatgtgtacataaaatttgggcaattaatacatgatgtactttacccgcacaaagtattcaattagatatatagagagataacacttcgataaaccaaaaactccgaggatttgccaatccgttctaccattaattaatcctttcatatgcgtatgacgtgggttttggtcgcgtgttattataaacaacaaatgctagatttcatcttcaactactactacgtacaagggagagtggaatgtcaaatcataaaaatccctgcaataaccacattctcctatgttgttttgtgcacaaacacaatggatcaatattgccatgtgaaagaatatctgggcagtcaataaaaaaaatgtatacactactatagcacatcagatgatctgaccaagaggagaagaagaagagagaggatcccaaccccaccacctctcctcctcctcctctctctctctccgatctgcctcgccgccgccgcggctgctcttctcctctcgcctcgcctcgtgcgcgcggcgagttcgacctcctcctcctcctctccgagcccccgcctcccctggctgcgggcggggggtttcgagggggtggacgcggcctccgtgtcggcttcggctcggatcgaattcaaaggtatcgctcgagctctcgctgctcttacggcggcgcttgatgagcaccgcggcgtagattgtgagatccatcgggagttgggattgatttccttccttttccaatcagtttaccccggatttattttattaatttgatgatacgtgatggtttagtattattgatagca

SEQ ID NO: 3542 - DNA, 1860 bp, Oryza sativa
ccgtcagcttggtgatggagccgagcctcgcgggcggtgtgccttccgctcggttgcctgctcaagaaagctcatcgtggaaacctaactgtaggtaaatttcttgtccaagttcagttttgatgaacactagctagtaatcggtaaattgttcttgtgttctagagagagagagaggagagagagagagatgctttagttatgtagttgttcttcactctctcatctctcctctcccctttgcaattcttggagcacttgctttctcaccgattaaaagaacaccaatggtgaggtttatggagagagagaagagactagagagagagagagagaggagggaaggagaaggtggtggcaacattttaaaggagcaaatgggtgagtgggagctgggaatttgggtttgttagggattaaattatttagtggtgttgcacatgtgggagctctttctgtggaggtttttatttcttgatatttagtggagaatattccacaatatcgattatttatcttatgagaatcaaggacttgtccttctttaagtgcatccgaaaattcttaaattttgcatagattagatatgatcggttgatcgttgtctctttatgaggtaagaccgtaagagtataatccagcggtctccaccaaaactttgtaatgtatagttttattttatgattttttttaaaaaaaactaatttatatgatttgtagtagttgagtgttggtgatcaaatgtgattgatgtacaaggaaggagtactgtagctttgtctgttgagcatttggatgtttgttatggtagattgtccgtgtacacctatatataataaacatacaaacttgcttttcggcagtttcgctgaaattttgttttgttgcatgttcatggaatttttagctctgctatctttgcttgcttctcttgggatgatacgatggatattgctcatgcatacggttacctgcataaacttgtttgtttgttattcagatcatcagatgcacacacgtacacacccttaatttgcgaaattttaagcgatgaagcaacaagaaaagagttagtttgcaacatgattattaaagccagtttttctctttctattaaagcatttcgttttttattttacctgaatatttctttcttttgacaaaatggctcgtgaactttctaaaagcactagggcaaattaggaaaacatatcttggtgtgatcgatccaatgtggacggctctctctgtttctgtgtcacgatcgtcatgaaaagaatagaggaaagtttattgcacatttgcatgtcacttgcaagtgttgtcatcaagcagaaagaaaaggtaaatcctaacgctgtatatattacaaccggaacccaacgcttcaaagttgtaatcatcatgtatgtgccaattaaacagtattatacatgctccaattaaacagtttaattaaaggcactgattagaaccttaagattttttttgacagatctatgcaggtcttgaattattctctacaggaaattcatgtgttccaaacaaactctgacaattaaggtagtattcgataaatgcgagtgctcatatatttataaatcaagtatggtaaaattgtttagtgctcatgtcaatttaattctgtcatacttaactagacatattagtgagcctaattaagaaattatattgcttggtgatataaaatgtgccaccctttttttttcgtacttttagcacaactcatctgtcaatatcttcctcttttctcatgggcggcaagcacaataaatccatccaagacacgcatcatgcgttcccaatatacctgaaaaccaatggtgggctgcaggaatt

SEQ ID NO: 3543 - DNA, 4430 bp, Oryza sativa
atatattgttgcttctttcttaaaaccattgacaccaagcccttccttggtgtccatctttaagctggacccaagtcttgatctgatctggttacaatacattgttagaactgaatcctggacatcatcctggtcttagacttcagagctgaaattcttagggataaactattctcagtagttttgtcctggtaattttgaatctattttagtattatatactacatcacataatctatgaaggattcacctgtatgggttctgccatcacaagtacagtaattgttgaaaatttactcagtatgaaacatggcatatgttcttagacacctcattatttatttttagtaaaccttgtttttgtccatgaattaacattttttaggggttgcttaaatatcagagcctatattttgtcaaatatgtaattgcttaccgcattttagagtaaacacaatgaaataatctttggattttcctatttacctaattccttcttattttcttttagatgtacacgatcttttcaagtactgtactttatgtggctgatgttatgtttccttacgtgttttcatttcatatggcaatcatgtgcagtccacatgttggcacactagaatttctttacttttcttagaacaaaggacaaagcatccaatacgaccaaatcagaccttttgggggcaagaagactgatggaatagatttaagtctttaagcttcatctgttgaatggatacagaacaaattctttcaaatgctttacacagatgctctatattggcatatagtctctatggagactaggttaaatatgaccagtagatttgcatatcatttcgttttccattctgtgatgagtggatataacaacttcccgcaaaactcttatcttcattatttgcagggtagcatttacattttggatatgcactgctgatggactcatcaatcctgatgctacgatattgttgataggcctgttgttcaaaatacagtgaattattccacaaaatatttgtgttgtaaatctgtttcttagctcgacaatgaatattttctgaacaaagttactgttagggggatgtgcatgcaaaaaagtaaaatattcaaaccatcattctgtatcatcaaggtttgttcatggatgagtagctagaaagactcggtgtattagtgaacttgaattgtttgaatgcattgttcctattaagaggctcatcttcctttattagtgttttagttttgtacgccttcaaattttagacaggtagctattgctactgggtgacaactgatgttccttgcaactgaagaacaatggtagacaggaacaggtgtagatgttccttgctgcccccttattgtatcagcatcacagaaatgtgaaagataaaatagcttgtttcctatactatgcccacctgagaggcgagttaatgcgtcctggtagctcatttcctttattttacagtgtgtgactaagaagattaacatatcatgttctcgttttcatgtataggtggtaaccatacaagctgttgttgaagcatttgctagtctgcctgataattctattgccttcagaattgatgatgaccacaagtacgtctttagataatttcctctctgatgtgaattgtgatgctcaagatgcagagaaggcagattgtgccagactctcctcttcggtccattccaggctactgtttgctgctgatcgagtgaatcaaatggtgctcaacgtggtcttgatatggagtgaatggccatagaatctaattccacagatggcaagatcacatccaagcttctcgtattccaccaagaaactattcctgggagcaaattctgtgccaggtcagtatgaaagcagcctacattggcacgtgcctcccggacatttttagtaccgcactgttgctacctttttgtgtacacctgatgacttacaaccagggattaaaaactgttatttctgtcaaaagaagtacaaaaaattctacccctcttcagtttgtataagcattgggcgtagttgaaaaaagaaccccaaagtcttcaagttttggccaacaattagtcaaattttattcctgtttagtctataaaatttatattaataaattcgtatttgagagtgtttttacacgatattggttttgtggccattgaaaatatattgtaagagaaattaatggttaaagtttaatttgaagactacaccaaattaaaaaaaaacgttctataaaattggacggagggagtagcaaaatagggcaatacattagtaagaacaactgcagacttattatcttgtttgtttgataaatggtaagctttcttgcatgctcataccaatactgctgtgtaatggatggtcccaactcccaagtgatgtcactaagattcaggttttatgacctggtgttttcctgatgcatcaacatctgtgatactgccatagtgtacgtgagcaagaatggtcaaagttgcaagttgatcttacctaggcacctagtacactctacgagatatgaaaataatgtgcctgcacatgcatggaccatatggtccacatagatgcaagaatgacaattttctagaggcaaattgtggttgggatagatgaggcaatgtttttttgtgacaatctgtaacttagatggatctcatctgcaactcaaaatttgcctctagaaatcagattctggtgttatttaccagtgcttaattagaactggaagttgaaatactgaaattcggttattcattagaacaaatctgtcgtctagaccataaaacttttacctgagccaattatgcacctgatatgtaatacactctctcttactgaaatttcagaagagaacataacatcaaattcctttactaattacttctgctcgtacataatattgcaagcacgaagtttccagtgtcttgcggtgagcatataatctcaaaactttcttcatctgtttaatctgtttctttagtgtgagaatcctctccatttttttttattcaagccacagttaagaagcattctagtgattactctttatatgtttcatccgcttaattaaatgatctctttgacctctctctatatatttctttgctgctacagaattgaagagcagcctgacggtgctacatcatgcagtcgattattcgatcgactaggcagctgcgacgctgagggagaagggcaatggcgcagagtgcggcgaggccgagtagtcgttggccttgagggcttcagatccacagttgtctgcatggtcgtccattagcatctggtggcacctgcactcggagctgcagaaggctttctcccccctacaggtttgagacatgcacaatgacgtaagtggttgctctactttttctcacttttgacaattccaatgtttaacgagtactagtaatattgcaaagcaatgtgtgacatctaaaaatgtgattggtgaacttgttgttttagtgatgatcccattctacattgaatatgttttgaattgagttaaaagggagaataaaatatgatctgttatttattgaagcaacagggaaaagtcttcactttcactctttaggctagagattatcatgctaatcacaggaaaaagaagaaaacataagcacggttatgatggatccatgttatataacattgtatattgatctggtgtatgtccactagttatttctgattgactagagacttatatactatatactttttacatgtattgcaggttagctgtcttccataaacaaagcaacttcactataattaaaaagctacaaactacatactctattaatcttttaggaagacaaaaccgtaacatcctcttcaaccaaaaagctagaaataaaaaaaaatactaggtaaaacttagaaggtaaaatgtatcatgtatgatatttggcatttccaattgctttctggaaagataatgaacttcttataactatttttgaatttttttcccacctatactaaggtgctgtgtgcttcgcagttaatggcaggttcacgttaccaataaatacaaaaatataattagaattccaaaatgaatgtttaagctcctgaaaattttaagcaatatatagaatagtccataaagtagaccttgggtgccaataagtataatattgtcaaaacaatatagtactattttcatcaaaattttgatattttttatgatgcatgaaattttatttacctgtacatgtagatgtcgagcccatcaagcctcttgtcacacaggaagcaccggctcaagaagtcagccgccggcgccggctcctcgtcggcttccacaagccagccgccgccaccgtcgccgaacccaaagtacacccgcttcctcacgctgccgctggcgccatcgacgccggcgacgtgcgtg

SEQ ID NO: 3544 - DNA, 11298 bp, Oryza sativa
gagcacatgccgcgcctcctcgccgcgtgggccgccgcggtcgaggccgtcgacgtcgaggcggccaccagggccgtggatgccctcgccgccgaggcggccgccgtcgccacggccgcgcggcggcgcggcggcgaggaggagtggaacgaggaggaggggaagaagaggatctgcgtcggcctcgcggcggcgctggcggccacggcggaggccggcggcttggcctccgccgcgtacggcgagctggtggtggagatggaagagagggagcgcgcgagggagatggcgggaagggacgaagagcaaaatcaaaactgaaccaaaccattgtaattgtaaattaaatcgtccttaaccattcacagatcattattagagtcctttgaagcatagaaatcgcactcaattatttatcaccatgaattgttcagaaacgaagcattcactttcagagtaaatctgatttaccatatccctaccagatgaaattttttcgaccatttggtcacttacctgaattctccaggctctcaccaatgatggatcatgaattcagaaggcaagctcaaccagatcagaaaaaaatagttccaaattccaccacatttatacttcgtagtttcagactttcagtctcttagctagtcagttctattacaggaatagggaagagtgcatgacacttcgacacgaggactctgaaaaactcaagtccgttcacttggacacatcacgtttcaaacgtagctgagctgacatagaagtaggaccagtagtttcacttggacatgccgccgttggggtggttgtcccagccccaggcgtcaaccacctcgccgccgggcatctgcaactgctccggctgggacagcccggccgtgaaggggtcgtcgccggcgtagtccaggccggcgagcacgtcggggacgcggcacgcctgccgggggttcagcgccggcgacagcccgcccaggtggccgagcccgcacgacagcgccccccgcgccaccatgtcctccgccatcttcacctgcacttacaaacggggacgaattcagagctcagaaaccggccgaaaatgcaggacggatttgacgatggctacagtgatgagcaatgcaatgtgcagatgaagatggagatgaatgatcaccttgacccggagggcctcaacgtctgatttgaggattctgttgtccgtgacagaagttgtgaattgctggttggcatccgtcaactgcttgaaaagcgatgcgttttcgccccggagctggtcaacctgacaaacaagagcatgatttgagctatggaaatctgaaagaaccggcactagcatttcgcattttgactcagaattacagctaccaattggcacatgatttgttagtcgaatcaatctgttactgtttgaattgaacaatggcaaatgttcggcaggtacaaaacttcagatcatatcagtttacctgtgactcgagatcagctaagtgagcttgctttctcttcctcgatcgccgagcagactcccgattggacaccatcctgtaatttgaagcccccaaccgtttcatgcaagttctttgtcaaacattccttctgaaaagcaatgttcaacttctactactagcgaatatgcccataatttttcacgcagtgacagacaaaatgcttgacatagtcgcttatgttcttggaataccttctcactctcttcacgtccaacgggttcgtgctttgttcgcatggaccaccctctatatccaacagcgattcactttcagaatccgaaccacttgtgcctcccagagtttggctctccttcatgttcagattggtagctgatgtgggacttgctgctgctgattacagaaaattgaacagagagtgagcaagaacaattaaataaactgaacattgtttgtgcctcatcaataaacacaattttgatgcagtacatgacacagtaacagcactggtactgtccatggatgtccatcgctgaaatctccatgagttgaaaaatccaagttgcatgtgcttttcagtgtgcaatacagtagcaaatcattgagtacatcgaacaacaagtatttttgtgtgcaaattgttgcagtcttatgaataattgatgaaaatcgtggaagatgacgagtgtgaggccgtaccacagattgatgactgcgactcaattgtcgtggagaccgcaggatgccgtgcgttcaggttctgggactggggccatatgtgattgggaatgccccctgtgatggtgctctgcttggacaaaaatataagtaaaattaatcgagtgatcaatcatgcaaatcaagaatcaagtacgatttaagataagcaaccagggcttgtaatcatcttccttatatgaaaagaattacttatcaccagtccttaataccaacttaatcaaaccctgtcatgacaacggaaactctcatgttatgctgttaacctaaaatggtttctcctcttccatgctttagaattcatgatttcctcttatcgggctattcaaataaattcttttaaaacacaagacatcattcgttcgcgaactaaaattgtgcaagtttggtgtgcttgtgttgtgatgtgtgtcttccatataatcggggaaaaaaaactcctagtaagagtaaatttattactgtctatccatattcatagtattaggatatgtcgcattaagttgcacgtaagtatatgagtatattggattggaggtcggagggagtacttgcgtaccaactatgaaaaattactgtacaagtaaaaaaatggtagaggatgaaccaacagtcttctacttgagaaaggtagtaggagtcagctgatcagcagcaattaacgaaaatttcgcagacatgaaactctagtcaagcatatacaagcacgtttctaaaaaaacgcatatacaagcaccgtacgtgctactgcaagctatccaatacagcaagtgttcaacttaattttagcacacgaatttaatactacggcccagtttagatccaaattttatcttcaaactttcaacttttccatcgtatcaaaactttcctacacacacaaacttctaatttttccgtcacatcgttttaatttcaaccaaactttcaattttggcgtgaaaacacaccctactactactactatactacgtagtcgcagcaggcagcataataatcagtaatcaatcactcaccgagtccgcgaagccgaagccggagaggtcggcggcggagaagatgccgagcgggtggtcggcgtcggcgtcgccgcccccgcttccgccgtggatgaacgcctcgatgtccatctccgattctccgtcgtccctgctgcttccagcggctgcggcgtcggcgatcggccgggtggtggcgcgcggcggcgtcggagtcggatgcttttcgagatgccccggcgagacagatcaccgaggaggagaagggaaagagaagctttttgtgttgatcgctgcgaggaaggaaagcagctcccttttgcccctcattcccctacgtatttacgatactgctttggaagccgccgcgaaatgcgttgcggcgtcgggggtagtttgggaaaatggcggcgccggcccagtgatgggagccgactcggatccgcaccaccgaccaccggcggcaacgtgacggcgcaccacgtcagctgcccgtgatcttctgtggccacacgtttttgcacctcacatgtgatatgtcctcagtcacacagcactcgggtgcaaatttttggtcacttttaaccccgaactattgttttctttcgcgttttagggtttgcattttgtccttgttttttttgaaaaatgaattaggccctgtttagatcactcaaatttttttatcatgtgacatcgaatgtttaacacacgcataaagtattaaatatatgcttaaaaaataactaattgtatagattgcgactaattcgcgaaacaaattttttaagtctaattgctccatgatttgacaatatggtgctatagtaaatatttgctaatgacggattaattatacttaataaattcgtcttgtggtttactgattaattttgtaattagtttttttattagtgtccgaacaccctatgcgagactctatataatactcgatgtgacacgccaaaactttataccccggtatctaaataccccttagttgtttgccctcacgggtgacggtaggtttgacggtgttaactctagcgcgaaagaacatttatattctcgattgttgttgtattttgaccctatatttttcaacccgtgcaactttgccctttccctagatcgcatagaagcaatcccatgaccctttcacccgccgctcaccgcaacaagccccacagtcaccacctaccatggcgtgccttaccgccgctcaccgcactaggcgtaggaagcctcacgattgtcgcaggcctccacgcgcctggccgctgcctcctctaaggtttttgggtggtgacggactacaagtacgagattcgatggtgcttggaactctatccatttactcagggataacaatgaatcaatatttcataaatcattttctcatactccctccgtttcaaaatgtttgacaccgttaactttttagcacatgtttgaccattcgtgtacatgaaagtatatttaacaataaatcaaatgatatgaaaaggataaataattacttaaattttttgaataagacgaatggtcaaacacgtactaaaaagtcaacggtgtcaaacattttaaaatggagggagtattttaaaaatgcccgagcgttgcaacgggtgaaggatattttaatcatgttactgttatgctagaaaaatacacatgctttgttacgggcaaaggaacagttagatgctataaagtctagagttaacatgtatatagtaatgtttcatgatagataaattatttattaggctaatgataatcaggatggataaaaaaacacacactctctctcaacccttgtgtgacaaactgtgatatcattgcactgggtaatggttaggtgaatgaaatttaacctcaatgatttatcgaagcaccttcatagttatcacaaatgcatatttgtgcttggacaattaatccgctctacgcgtgtaggatgtgaatgatgtccctaacacatggtcccgatgattgtagcattggagaaatggacgtctgagcaacgcacctttacgtataagtacaaaatgaattttttgggagttcattaattattttaaactacattttttatgacacttttatattcttttttcataattgataattgctataacattgcattgatttataatcacaatgcaacagtacactgctatgctctaaccggcaaaacctgaacagcgccagccgtaccatgccgttcctttttcttttgtagaaaacctcttagtgcatgattaattgagttttattattacaaaaattaagaaaaaatatctagtattttatatcaattgtatatagaaagttttaaaaacgcgctaacaaaaaccgagatagaaggaacggagccatggtgtgaagtttcacaccatgcacatattcaattttcatgtttttaaaaaatatcggttggttcacgtgtttatactgattttttttatataatataattataagatttcagaatcactaaaagtctgttgaagaaagaggtgcagaacttttgattttttattcatcggatgtgcatggtccgtgctattggttgagagaaaaaaaattacgcgcaaatatgatttgacagagggagggaaagtagacttattctagggcctaggtaaacgtatatttatattgatttttgtgtacataatttaattatttttaattttcgaattaaaaactgattcattataagataagatttcataataaattaaaatctgttggaaaaagagaaaaaaaatcgaagtcaaatataatttgacatgagggaggcaaagtagacttattttaaagggataataggtgtaaaaatgagaggaaagtggagtcgaaccagggtggccgaaatgaaaactttcatccctcaccaagtgggcagactactacatgtgagaagtgaatacatggaaaatatatataccgtatcaaacgtggttgtggagtagataaaaaaagcccgatcgggctgttaaccggattaaatccggatttagcgtagcgcgtggtaatgacgtacgaaaaaaaacacccggaaaccttacgtattttttaattagctatatatatatatatatatatatagatttaactaaaatccatggggcccatataaccagacatcaaaggtggaggcaaacgactgattccttttaaaaaataaaggcaaaaatacaaaccctaataagagagagcaaaacaacagtttatgttaaaaataaaggacaaatttccccatcatcctccccatgcgggtacgggaagcgggggcacccgtcaagttccccactgcccgtatggcatctacaaagatagaacctccatcaacgagtggaaaactacagtattgcaatcaaataaggtggtgggcgatggcacatgtttttaaacggctaaacaatgtgttttctagaaagtttatattaaaaatactatattttaaaaattatattaatttatttttaagttttttaactcatactctatccgtaaaaaaaagcaacctaaatgagggtttaacattacctaggactacgaacttggacaaccatatgtccatgtccagattcattgttttaggtggtgtcaaatcaccaattaggttagttttttttacggaggaagtacttaattaatcacacattaatccatgtctcgttttacgtgtaggaaggattaattccaaaacccacagtaaaagactcactatcctaatgagggctaaagtaaaccgggccaattgggccctattgattgggccgtgcccaaccgtagcactagcagtaggctgcctgaaccatcatcgccgtcgtcggcgaccgcccgctcgctatcgaggtcgccggctcgcgccgccgccgccatgcgagagcttcccttcgccgcccgacgagatgtatgtacgctccgtgaacccatcctccttcactaatgcattcccctactcgattgctctgctgcatccttagccgttgcttcagatctgaaaagctaggtccatgtgcatttggcgttcgattcgttgcatccagtcatgttggggatttgtgcgagtcgtttcgaattctctcctcttctctgaatgcgtgaagctgttgttcgaaaaaaaaaacccccaatattttgctggatgaattggaagttggaattggtgtagagaactatggaggctatcacaaaaagaaactggaatacaattttttttttgtagttcattttagcacaggtggaagatgcatggcttcttggtgaatgaaaggccacataatgctgacgagcatctttcacctaatcacccttgttattctaagctaagctcgaatctgtcgctagcacattgttgtgtacacctgaagctgttcagcattatttagctacttttattctgaaattggttagatgttatctaagcttccaggctcttccacccttcatgttaaacgttttaagcctcccgaaaagcatgacgatgatcaggatcgctttcccattgtcgctccatttccccgcaaacccgtacgaggcatccttgcagcgtgcatcatggttcagtagcctcttgcagctgtagccaaccgagaaccccacatttccatatgcactgcaacaatcagagccagatgttcagtgatgatactcatgttaaaaaataatcatgagctttctgcagaatgcagtgaatttcagtggcttgcctgacgacttcaaacaatatgctgaaaacattgaaattaagtggatctgtagccatcgagtcccgttctgtgatgcaaattagcattacaaagatagccaaataagacatatgtgagaagatccagttctccaatagcccttttcttttgtttatcttctcggtcttagaatcctcaccatcatgtctgggtaaaaacgaagtgtaaccagggagatacctacataaaaattagtcaaagtatgtgttaagattacatattaagaacaattcctctcaatgataacatatactggactaactgctttgtatgtaatatactgttgagcctgtaagtggttcttgaactactatagtcctcaaccaaatctagcactgagtctggcttgtgggattgtgtgattaaaaaattcctttcttaataggtaggagtactatggtaggaagctttcctgtgtattcttaaagattatctgatgtccttatgttccattctactatatgcaacctacctattagtgaagtacaatatatttgaacgttgctgcacatattcgagagaaccactatagggctattataagtgaaggaaggcaaatgtgatgtccatgataaggtagttaaattatatagtttactgactagagcaataaatacaggaagttttcttacttatgatcattcttattttggggagaaggtttgagaagggacttacatcatgatggtgtataggactaggattgctgaagagaggtttgacagatctgtaacagattcacctgcatgcctagcattgaccgactgaaatagagcggatactatcttttgatagttgctcattccatccaaagctaccgagctccactccaaagagaggaacaatacggtttgcagaatgatcaagctcacaactgttaaagtcaaataaacactttccctggtactcataagatgtttatatccaatggcctttggatattcaagaatgtaacgacaatccttttttccggtaatcttctcaagtgaccacaccattaatctcaagcatggtgcaaataatgtatttcctgctagtatctgaggaagaattagcaatagaagaatggagttcttctgaaagataatcatattctcatttactggagtgaagccacaatttccaactgaggagatggctgtaaatactgagaatacgatgatcccaatgccttttctctttagaattttatgtgcacttggtaccaggttaaggtagaggtaaataagtagggagccgcctaagtttgttattagaagatatcccatcactacaaaacctaaaaatttaatcgtcttgggctctacatgtcctccattttccatgcggagttcagaaaatgaaactgtaacttttgtgccctgggtgctgggaccaaattttgtggaagtaatagactcaatatcaatgcaaggtgagtgatcccttgtgctgactgactcttttgtaccaaattcggctctcataaagtgaatgccaagcattgaagtgaatacctcaccaccaatcagcattaaaatagtcaaaacccagagttgagcgcttgagaaatcctccatttcaacagtagccatgcttgaaacagttgatgcagatacggaagtaaatagcacgtccaagtctttcagagtatttgacttgtctcgtggcttgaggacctttagagatccatatccagcaaaggagatcagggcaaagtaagctacatggacaaagagtggattgttttggtagatgaactggaaggagtattttatagacttctgtgcagatttggtaaaagaagagaacttgctagctgcaaatgtgcggaaagtttggagttttttgtgggatactacaagacaatgattcattttctaactatttgtgtggagctaaacagcatgtattgggtgcttccttatttgcatcaatgtactgatgtttgtccatttatatagggaaaaaaatattctcctctccaacttatacttgtgatgttcgtacatataatctctgctgtagaacaaaagcaatcagcatcaaagagttagtggtgaacttactggacaacaatgacagaagaatcaaagagtgctttggattccatatagcttatgtgaatgtaaatgaagtgctgaaggatttattctctactgcgattgtggcaaataacagtctgttctgaaaagattatacaggttagtgaaaaatgcagaacaaagaattagcaccccgaatgcaatgatatttcagtatgtgcttttcattaggctgccttctgatgaaatatatgcttttttttttgagaattacacagtacaatgctgacactcacaacgcacgcacacttatgctttctttgatctgtgagtttcagcatgttggacatgcactgctttcaagagttcgaattcagttagaaagctaatatgttctcagcaactgatcactagtgatgtacttttgcttgactaccctaaaattgtaccttgaatattgcacctcatgccatttcaggatgtgggcattattgttgttaagcctctactttaatatattgtcttgaatatatggtttcgaagcatgaaatgaaaagatatgagtaaaaatttcaatcaaactacattttaaaatctcttttcaagtaaacaatttcagtggtcaaagcggcatttgttgactttgaattgaaaaaaattgacttgtttttgataggagggaaataggggaattctagaactgaacagtcaatacatgaaatattttttgcataagttttattggcgttagatccaattagagcattaaattttacaaaattgaatcggtgagatgatttggtcataaactcataatgtactgcaagtctgttttagagagatacaatgctatatgcgagaagaggtttacctgttccattttactcagagtaatttattccatcttaatatctgtaactatgcatatacagttgcaagcggttactcttatgaaatatgggtttgaaagcctatttttgctatcctaattgatactccctctgttcttttatgtatgacgttggttagttcaattttgaaataatcaatgtcatatattaaaggacggaagtagtattagaaactactagaatcacgtctttggttactaaataatatgctaatatttgtctccctacaaacagtgttttctttccctttttcttgaaggtaaagtctgacattttgttctggaacacaaaattagcccaataagcttggtgtattgaagaagttaaagacaagatctactgaacatatttgagctattctatgattgctattaatctagttggttagtgtt

SEQ ID NO: 3545 - DNA, 13918 bp, Oryza sativa
  unsure (1)..(13918): unsure at all n locations
tcgctcttccaagtagccgaggtcagggagcgtcggcttccttctttttgtcgctcgcaggcctcctctttcgggtggccagcgaaatgccttcgacggcgaggacatgaccctcgtcgtcggaatgggccgacctcttcttcctcctcctgtcccgccgccctgaccgagcggcggacccgggggcggccgaagctgccacaccggaaccggaggggttccaagtccaggcctcctccttgcgagccactcggtccgcgagctgaaaaagctccgcggtagtctggggctctttggaggcgatcttttcgagcatgcggttgtgccgcacaccccccctgaacgcgtagatcaccgcgtgtgcagggatgcatggtatggtgttgcggacttgacagaaccgctgaatgtatgagcgaagtgactcatcatcccttcgctggactgcatgtaagtccgcttcttcacctgggcgcggatatgtgccttgaaagttcatggtgaactgttggcacaaatcctcccaagagtggacggacgcgggtggcaagttcattagccaaccccgtgcctgtcccttcagggccatgggaaagaaattcgccatgaccctgtcgtcacccccggcggcctcgatcccggtcgtgtagacctggagaaactcggcggggttgacgctcccgtcatatttttcggcgatggtgggccggaaccttgggggccaacggacgttccgaaggctcgccacaaaggctctacagccgacaccaccaaccgggggcacggagggctgatccccgcgtccgtgttgatgtgacactccggacgaggaggcgccctccgttgcgtgggcagcacgtcggccattacgccggcgctcgatactgatgcgggcatccggccccccacgcagatcttcctgggtcggaggcgctgacgaaggagtggcggccgaatggcgagcaacagccgccgctcgccgcgccctccgccttgacgacacggagccggtggtagcagcgccagaggtcttggtggcggaggaccgcccaccagcacctaggcgctgccgtgccgtcatgaccaagttggccacgtcgtccagccaacgttgggctggagactccgggtcagggacaatgggcgggtgacgtaggagcgcgcccgcagcttggagcgcgccctggggcgtgctgccgtcgccgtagacgaggagacgacgctccccatctcgccgcacttccccatcacccgtggatgtcgaagtcgcagatccttcgaccctctcgagcgcctcctcccgcctaggactttggcgtggagggggcggtggagtacgagctcgacggcgtgggtttggctccccgtcgtcaccgctaacactcggagagaggttgtgcgcctttgcttgttcagccattgggctgaacaggaaaagcttggcgcacacgaaagagtgcgagagcttagaagaacacacgcagaaccccctacctggcgcgccagatgacggagcgtggggctcctcaccgggagaccgcgcaggcccccctttgccggttcggccgagggccctgggtgagattctaagctcctagtctgtgtgtggaaggttcgcgagaatggaaaaaacacaagacacgggcgatgtatacaggttcgggccgctgagaagcgtaataccctactcctgtgttttggtggatctgtgtatgaagaagttacaaagtgcgagccagcccccgatcgttccgggatcgttttctcctccttcttttcctctaagtgggcaaggtcctccttttatatctcaaggggataccacatgcaccatctctctctctctttcttttgtgtggggactcatcctctcttccctccaacttgacttctcttcattaatggacggagatttgtatggctgccgtccgaatgaccttctgatgggacggcccatacctacctccacttccgccggaagcaggcgcgacgtgggaacatggctgtctgctgacgacatgatcagtgtcagaccggtcacaaatcggtcattcttgtccaccacgcgtcagtttatcaatctgcatgttcgcccctcttcatacaatatcttgcctgtaatggttaggatgaagcctggcatatatctgaccggaaccaacgtgccatctccaggagctaacacgccggttccggctagggacgagtgcttggaggctctcatcctgacgggatggggcgaggcgtgcgtcagaccgcctgtcgccacctaacccacgatctgatcggtctgtgactggtcacagaccggataaacgagtgcgctgcactgcgttacatgcggcgtgacgcgctcgtccaaaccgcaataaatgtggttaggtgagccccgctatgctcaccttccccatatacgcggcgcaaaacccacaaggggtcggggcgcctcggccctcggggccgagacgggagcggtccgacccctcggggagacaaagagaagggcggccgtatcaccctcgggcccgacccccccgagggggttaggccacgtgggtgatcgtgtctgcctcaagtctctaagtcatgatactcccggtcccatgtcaccgacaattatgcatctagatgggttttattttttttaagaaaaaagtttgattgaattatatattttcagaaattagacataaatccacatatcaggatgtacacagttacattaataacatatcgattaatcgttctatacaaattctagagtaaatatcatgtttttagaccactaatctgctgctacctagagcttaaacaaggcttagtattacctcacctaggcatatgttttaacttgatcaagatacatggcttacctcgattttcattgcatgctttttaaattattaaacattacattctgtatgaaaactttatatatatatatatatatatatatatatatatatatatatatatatatataaaatatgaatttaagttgttttaaaacgaaagataaaattattcgttaagagtataataattaaaactcaattaatcatatatgctaatgatttttttcgtgttttatcttttatgtttagtgagtactccctccgtatgctaatgatttttttcgtgttttatcttttatgtttagtgagtactcactccgtccaaaaaaacaacttagtattcgatgggatgttttatagtccaatgagtctgtttagattcgttggactataagagcaagtataatagtaggctataagccagctaaatgctgagatataggagagaagagaggagagaggagaaacgggctgtaaactaataaccggcttagacacaagaacaaaaaaaaactctgtgagagagacaagtgggccatgtatcaattgtaaagagctaactatttatatgagtaggctaagagaaggctataaagaaccttatagtcaacaggtcggctgtattattagccttgctctaaaacatcacatctaatacattggtttttaaagagagtagaaacaaaagccaaagccacctgggtcctgggaggcgttgttgcgtatatgaaccgcaaagaaaggaaccacgtcagctggtctagtggtctccctgtcctccaaaaaccaaaccctatgatcacgcgacacgccatgatctgatccagctcccagacgttactagctcgtcgtcgacgtcgtctctgcagatgtacgtgtctaattaaacacacacacacacacaaattacgctttattagcgtattaaagcctctgattaacggtgattaattagctaaggattgtagtccacacaagctcatctctcatgatcatgaccccacaccatgggaatcttttaacgggcgacgatcggagccacgagcgctccggtgcctaactccctaaaatcatttttctagttaatcgcatggtctccatcggccatcgcatgctgtcacctctcctaccctcacaaatataaaaatgccaacaaaaggttgatcagattcttttttttccttttttctttttgcgtcccatgccatgaccatgagaagatttcttactgtagcatgtgtaaaaaaatcatatactactccatcccaaatgaattgtatttatagtatttagaatttgtcttaaaataattgtcgctacagagtattaactgttctatcaatcactcctcatttaaatttttatcctatatattctacccttagttactttcctactctcacgtaatatgtcatttaatgagagacattatagttttcttctcaaatcttaatatatgctaaacaatctacaattacaattattatgatacggaaatggtactatatatatgaaccatgtatcatttaggactagtttttgtcctaccaattctttgttagtagtacttttaaacagtgtttctagatattggattggtgcccatttttactagctccatctgttaggtagtagcaaatttgtcctaccaaatttaatggtgccaaaagttgatagtgtcaaaagttgcttaaaatttgacactatcaatattttggtatggctctaaaccaaactggctgtgatttgttgtgtaactgtgctattgagattgttgttcaaatcattttatattatgtaagaaagattgatcttgacaaaagaaggatggtcagatcaatcaggtgtgtcatccttgaaaaaatgtatatataaattaggtgcatcatatgctgatatgcatgtggacctgcatcaccagaaaaggaaatgcatcattatctaaactaatcatctaataatcaggatttggtccatacatacagagcatgatgaaaagagaagctagctaatagacagatcaaatagatcgatttgacactggataacattttcataagcaataattcagtggacattccatcactcatggccccatacaaactagagatagagtgaacaggaaaacaacattattcatactaattatgtctatctctctatctcccaatccaaaagctcaaattggagattaattagaaaattccaaaccgaaagaaaccaagcaactagcttaggtagaaacttttccttcaggagaggtgaaagaatatttctcttttgaccccaaaaaaagtagaaaaaaaatctggcctctctcttcgaaggcgacgaggtttttgtggacaaggatcactctacgactccccaaccaacggctcaggtatgtccataatttcattaagcacacaagctactccctccgtttcgaaatatttgacaccgttgactttttagcatatgtttgaccgttcgtcttatttaaaaacttttgtgaaatatgtaaaattatatgcctacataaaaatatatttaacaatgaattaatgataggaaaagaattaataattacttaaattttttgaataagacgaacggtcaaacatatgctaaaaagtcaacggcgtcaaatattttaaaacggagggagtaattaactaagaattatttacctgtcgtttaacggtggccgctagctcgtcagaagaacagataatatatttcgggcatcactccaacatggttttttttttagataatcactccaacatggtatagaataatactcctagtgtcatgtgaaaagtacacctgaatggtggtttattcacaagtggtaattgttttttttgttaattgggatggttggcgacgagaaagatcggaatggaaggggattgggtggatatgttagagaaatttgtcatgtgtgtcatattttgttagatagacacaaggttcagtttgatttagggaaatgatcagatcatgttgcccgggagtacatattttaggtgttaaaagttaggaaaagtctatacgtactcactttttcttactaaatttttactaacactgacatatcatgctataagtgtatctagattttttttataactttcatctacttgaattaaacggttgagatgattgttagtacaaatttagtaagaaaaatttagtacgtgtagcggtgctctaaaagttacgtcagttagatgagggattaactcttgcgccgactgcccattggtcagcttccgtacgacaattgttctgcgtataatagaagatataattatacttattagctaaaatttaaattttaaaccttatatttagaaatttttttaggttttacttcatcgtagtttattttttaacctttacttttagattattaagaacacatataaaaaagttttattcataaattattttttatttacaaataagtcgttttgcttttttctctaatatgccaaatgatgggacttttaaatttagaacaatttgtagggcatcatattacttgtgctaattgcagctgttttccttgttgagataatgagttaaaacccgatctctactttgtaaatggattacacggccaaaagtttatacaagagtgcttaagagttaagactcaaccccttacacgaagaacatgtctcaaacaaaagttaaccaaccaaaaaaaaaatacaaagttaagtttctaatctcctcccgatgttcctgttgaagaaacactttttctttaacacaatgtcatcctccaatttaagcaacatagaccaaaactgcgcccaatgaatctccctaaaagttacctatatattttttttaaacaataaagttttaacacaccattaaaaaccacatcgttcctgtttgaccatatcgctagccaacacttgatattttaccttaggttgaacaccattatccttcccttggccaacacagctccgagagtaagctacatagaagttagaatgttacaatgtgattataatattatagttatagctcaattaaatatagttatactctaagttatatatgaaaaataattcaataaaaaactgtgacttcagctgagtttagttccaaaaaactttcatacacatacaaacttccaacttttccgtcacatcgttttaatttcaaccaaactttaaattttagcgcgaaataaacacacctgaatctttaaaaaaagaactttgtaaaaaaaaaaccatgttggagtggagtatttagtagtacaaacgagcgggaaaaggtcaaagtaaaatcctactagtcgatgggggcgaggagaggagagcgaggcacagccaccaccaaagccggtggccgcgggtcctctttaaatacaggccacactcccctcgcactctcgactcattccaatccacatcgtctcgctcccaaccaaacctcccccctcgccgtccgcgcgcgcgcccgcggtttcccccgctcgccgccggtttcccccgctcgccgccggtttccccgaagcgcgccgcgcccgcgcctgcgcccgccggtcgccatcgccatctcgccctcgcgcggagactggtgtccctgttttgctctgtagtataaagccacgcaaacccccgccaggtgttcgaccgagtgacacaagagtccagcctcttgcaacctgtaatggaggtcggcaacggcaagtgcggcggtggtggcgccgggtgcgagctgtgcgggggcgtggccgcggtgcactgcgccgctgactccgcgtttctttgcttggtatgtgacgacaaggtgcacggcgccaacttcctcgcgtccaggcaccccccgccgccggttgggggttgaggtggtggatgaggaggatgacgcccggtccacggcgtcgagctcgtgcgtgtcgacggcggactccgcgtcgtccacggcggcggcggcgncggcggtggagagcgaggacgtcagaaggaggggcgggcgcgggcggcgtgccccgcgcgcggaggcggttctgnaggggtgggcgaagcggatggggttgtcgtcgggcgcggcgcgcaggcgcgccgccgcggccggggcggcgctccgcgcggtgggccgtggcgtcgccgcctcccgcgtcccgatccgcgtcgcgatggccgccgcgctctggtcggaggtcgcctcctcctcctcccgtcgccgccgccgccccggcgccggacaggccgcgctgctccggcggctggaggccagcgcgcacgtgccggcgaggctgctcctgacggtggcgtcgtggatggcgcgcgcgtcgacgccgcccgccgccgaggagggctgggccgagtgctcctgatccgccgccgccgccggccaccgcacgacgaatcttccggccgcctgagatagaaagtactaaaaatgcgaaacttgtgggcaatgattgtttgtttgcttcctccctaattaattaaattaatctcaaattcttaatcaccatcaaggacccaaaaatcttgtggtttaggaaggcctctcttgtggttaacatcaaatcacaagtctaaatccaaatggatgggactctaatttttctgtgtagtattagtatacaatgatgatagtacaatttgatttgttattaattggttattaattaaaggtgatttgatcaactagactttatgtggtcaagaatgtctccctgtattgtatagtaccaactaccaactcgatatttttttccttccaatctttgctagtcctgtcttgtgtttggtgttagttggtatctcaatgtactgggcttaccacttgtatggacagtattgttagcactaacaacagtgtgtaccccccagtcgtgttagcttgaatgggaagagccaatgatcaaggaatgctgtcctcatgtcttgccgatcgcttttgagccgatagcacgtgctacctccctcctaaaatattacaactcaatggcttatttggtttgagagaatttcaacccatgaaaataaaaaaaagtggagaaatagtaatacacgaacccattaatccatagaaatttttttgagtggatgaatatttttatatattttctctctacgacttgtaagaaaggaacattttcatttgattttcctatatcttattcatacaaatcccaaatggtacttgtagaaactaatccataaaaattaaaatcctttactttatctccaaaccgaataaaccctaaggctacgttcgttctgtcgtgttggagagaaatttttagcgtacgtgaaacgagaaagatgactaacacatgtttaattaagcattattattataaatttaaaaaataaatttattttattttcataaataacttctatatagaaacttttgtaacagacatatcatttagcattttaaaaaacatactaacaaaaatcgaaattgaagttttaagttgaaaaaaaaactaggcctaatacaaaatgagacatactccctccgttccacaatgtaagtcattctagcatttttcacattcatatcggatatctatttagattcattaacaccaatataaatgtgggaaatgctagaatgacttacattatgaaacgaaacgaatgaagtatttaacatgaggaacaagagggagtgaagcagataggaaaaaaaaaaggcctcgtggtggcctctcgtagcgatcgtacgcgagacggcgagagaggcggcttcaactgcgtacgcgcgtgagtgagcgacacggtgagcacggccacgcggcccagcaggagggagcgtcgcacctgacctggtccctccctcccgcccccggcgaccttcaactccacctaactgcaactttttagtgctatgggcttatttgattcttttactgtgggtgtgttttagttcacgctaaaattaaaagttccgttgaaattaaaacgatgtgatgaaaaagttgaaagtttatgtctgcaagaaagttttgatgtgatagaaaagttagaagtttaaagaaaaagtttacaactaaactcggcctgtgtttagttcccttcaacttccaactttcctgtcacatcaaatggagtattaaatgtagaaaaaaaaccaattgcacaatttacatgtaaattgcgagacaaatcttttaagcctaattacgccatgatttgacaatgtggtgctacagtaaatatttactaataacagattaattaggcttaatagattcatctcacactttgcaaacgaaatctataatttattttgttattagtctacgtttaatacttcaaatatgtgttcgtatatgtcaattttttttgccaaaacaactagactcggcctttagcctaccaattcatcgacaatgccaaagcaatattaaaatattagtaaagtaaaattattcagctaacatttggattggtaccaatataaaagtcaaattctcatagtatagtgaagaaacttctagaatatgatcaaataagataaataagataagataagagcactaccaaacgtttgacctcaatccaaactaatacacatattatacttttttcttagtattatgggaagaaggttaaccttaacaaagttttttttcaagcttcttgtccactttaaagattggtaactgaaaatctaattgttctaaaaaaaactgaaaatatactccagtaagaaaaaaaaccatgtaaaattctctccattacagagccacatggtaactgcggtaacatatgagacgttacattttttttttctttttgtggctgtagtgaacaatgcccaattatggtagtaacacccactttgtaagggcaacatgagaatctctcggcatcatatagcatgcaactatgtctagcataatactacctcattccctaaatgtttgacgccgttgatttttttaaacatatttgaccgttcgtcttattcaaaaacttttgtgaaatatgtaaaactatatgtatacataaaaatatatttaacaatgaatcaaatggtaggaaaagaattaataattgcttaaattttttgaataagacgaatggtcaaacatattttaaaaagtcaacggtgtcaaacatttagggatggagggagtaatatttaagcccttttcaaaatgcatgaattttactgttttagagttttatagcttcgaattttacataacttttaaccaatggatatagcccgttttaaataaaataaccataagaaaaatagacaaacatgccgacaattgtaaatatagagagacaaaataattctaaaatttaactttggtatagagtaactgactatgagtgctacatagacggtaagtgtaaatgtactgtaactgagcgtaataacaaattggatatacaagaacataaaacttggtacaaaatcatacgaacggaaaagcaaaagatagaagccaaaaatctatcggaagtaaaatagcaaaatcgttcaacttttatatgaacaaaaaggaaaaaaaaagttacatattccaaggcagaaacttaccagtactatacgaaaaaggccattaatctggccctaagcccggcccatctatccacttcgggcctccctgccatcatccaccccgacctccgcctccgcctccgcccgccgccgacgactctccgactcccactccacctccaatcgaaccccacccgccgccgccgccggaggcgtctacccctgctctcctcccccgcgcgccgccgatcgaatccgcaagccgcgatggattcccttcttgccaactacgcctcttccgacgacgaggccgacgaaaccctacccactcctcccgccgccgccgcggcccgaccgaagccgccctccggtggcggcatcttctcgtcgctcccgcagcccaagtcggcgctcctcttctcctccctcccggcgcccaaatccgggcccgtcttctccgccatcccgcctcccaagtcctcctccgggaaccctaagcgggtcgtgcagttccgcccgcctccgatccgccagcccacgggcgagagctccgacgaggaggacgacgacgccgagaagcgccgccctagcgaggccgagccgcgcccgcccgtatccgcgggcacggggcctgtctcttcgttcctcccgccgcccaagcgctccctcgggctcggcggtggcggcgccgccaggaggtcggccatagacaccgctgcgccggagaggtcgaatgttgtcgccgctggtccatcgtcctcggccgtcaacgcaattgcccccgaaaggcctgatactacctctgccgatgatgaagacgatgaatcgaatgggagcagcgatgacgatgagatgcctgtgccggaggagcagcaggagcagctcgctgttgattccgaagctggacagcagcagcagaatcagcagcaaagctatgatgctggagttgggagcagtaatggacaggaaggctacgcatgggatccaaattactacgccaattacggtgcaaactatggctgggatccgagcggcaatgtgaactatgggactgaagcgcagtatgcggcatatggaggagagcacggtggagtgtatggaaatacatacggagtagaacatggtgatggatatgggcattcgacggaaatggcatatggagggggctatgctggtgggtacgaacataatgcggctgcagcgacagcaccgccaatccagcagccaatactgccaccggaggttggtaggattggagggaagagaggtaggagcgatatgccggcagagattttagaggttaaccaggcagagctgatgaagaaccgaccgagggaggataagtccaagctcactgggatggccttcggccctagttaccaggtaccgagtcagcttgttatgatttctacttagcttgcagcattattgttatgttcgattatttttctggcaagtatcacatgtagtacataataggatgagatttctagagtagctcactctcttgccagtaactgtaatcttttatccattactatgactggttagagcacccgacactgtagttattcctacaaatggtttgttggtaccaagataattggcttattggttaagcgatacagtagtatttatttgacttgcttgtgatcagtttagaatgctgcaagctcccaagcaagtatttattggaggacataggcagaatcatgatacagtggttctttcttattgtaattttgcagttcattatgtcagccatattattgattgctgataacctctgtaaggacataatttgataattatgttacttatggttcatacagcgtttctgttggtgggtgcctgggtggtggctttatgctatttgcatgtactattaataacatttgatctacttttatttggccagtgactgtaggctagatctggttctgtataaaaggtttaaattatagtgggtggaaagggtattaggttaacttatgtacatatggaacatatatcacagcttcccagtgtgaactataggatttcagttggaaagcaataggagtgatgttttttgcagatccaacatcccttatcagtgaccaacaatcttagttattacttcctccgtttcacaatgtaagttattctagcattttccacattcatatagttatatctagattcattaagaactatatgaatgtgggaaatgctagaatgacttacattgtgaaacggagggagtaattaacattgaaatgatggtggaaaggaaatttgtcaaaaagatggattctataagtttccaacatgattaaagttgcaattgccataaggtgtttatatgtcatcatgtccaccgttagtttgaaaagatctaaattgtgagtgagcatcatgagctcataagtgataagatatcatttttgaaaaaccaaaccatatttgcatcgctaattaagtaaggatcgttctaacccaagatttctatcttgaacgcagcccgccccttcagcaaaaggaaagccctccaagctgcacaaaagaaagcaccagattgg

SEQ ID NO: 3546 - DNA, 2074 bp, Oryza sativa
tcaaaatatatccttggggttttgtgaaattttgatcgtaatacctaagattttgtaggttttgttttagaaaaaactaaggtcttatagaatttacttaaaaaaagcatatacaacagactatgctttttggtacgtagtgtgtcttgatgagctcaaccttagtctctcgcaatctatactacaggaatgagcatcctatgctgttgagatctctctatattttctcttgttgagttttgagacacgctgcttatctagtattaattgctaggggactgcatggtactagctatagcaagtgcggttacttataaaaaaactagaatattagggaaggacctaatatcaaataattagaaggggtgaggttttgaacccagatcgtctagcccaccaccttgtgaagctagctggaagacccctggtcatttctcaagtgcggttacttataaagagaacaagacactatagagccttaattttcaacacacactatcatattttttgcattagaagcacaagattggaatagttatgtcaatcgatagtacacgcttaaatgtgtatagcctagtacttctcctgacataattgctatcattaaattttgatcgcatccaagaatatatatgtccaacaaaaagctcgatcgcttagcccgccaactttgcaaaaatgaaatgaaaaaaataggagtattggcctaagttattgatcggtacctcctcctcaagaatcgtaaaggagatttcatataaacagtaattaagaagataccacaaaagcaaatacaggtacatttcatcatcatttggaaattgccatgtcaccagtcaccactgcattgtacatatatatcaccattgcatgtaaaacttttttctactttaagattatatatagttcacatcaacagaggcgcgattacaattaataccatccacaagaatttaaatcttggtgttcatagatatatgcacgttactatgcttttaatcagagtttgtctccttaagtttaagtgtgtgtccacgctcatggtcatgggtgtgtggatatatagtggtgtgtgcgtctttctctatatataaattagtaatatgcctatgttttagaataggcagatcctatataattgggaattgcatggatagttggattatattgaggataaagcatgggactgtttgggtgagtggattaagaataaaatactatatcctacatatgtgtatgtggttaattatgtacgtatacataaagaagcggatgacttcgtttttaaaagtagtagagataaaataatatttttttcttttgaattatatgaaaaaggagtggtgagtggatcagttctcactgcagcgcggctatacaaacgctccattaagtttgggtatagacatgattggatgttcctctaaataaagaccaatggtttccttagagaacctgtttggacgagcagtacaggccagtaactcgacatgcagtaattttgtcagtgcattaatgccaattataaattttgttatatcatattaattataattaatcatgcatgtctctttggtacaagctagggcactctcaacgaccatggacagtgtcaatagaagtattatcgacatcctaattaaaatataaaaaagttttagggttagatacgggtatcaaattaaaaggtaggtaattaaatatgtgatgattgtgattgattgagaagggaataagttgttactattttaggataggaaaaagtacgaattaccccccgaactatcatggtcgtctgaattacccccgaaccataaaaccgggcattcttcaccctcaactatacaaaccggacaaattacccccctcgacccaatccgcggtggttttggtccacgtggcgtacgcgtggcagtctcgtcagcactctatttataaaaaaatattgtgggacccacctgtcatctcctcatcctctcatcctctctcttctctctctcactcttcctctctctcaaacgggaggacgcgcggcagcgtgagggggaggacacgagcacccggcggcggatgc

SEQ ID NO: 3547 - DNA, 6689 bp, Oryza sativa
cacatgtcagactatctgagggatgttctgttcccattttggataactcggtgatcaagcgagcaggggccggctgggttggattattcggatttgtttcgatttggcgttacatatgcgctgtgcttgtgtccgtagatttgttcacttgtgtgcaactgtgagctactactactggtaatagtgttatgctgctcggtgtggggcccacctcccacaggcatcgtcacctaacaacggtgtctggttgtggcccctgcgtcaagattcgtgcatggtcatccatgagttttggcgccaacggccaagctatttcaaacatgagttaatatagtattatcgagtagtaactaaacgtgatcaaattttcattctttttttggttcatgaaggtggatggagagaaccctaacctgtacttcagcaaggatgatgttatactatgcctgctgccactgttccacatctactcgctcaactccgtgctgctggctggcctgcgtgccgggtcgaccatcgtgatcatgcggaagtttgatcttggcgcgctcgtcgaccttgtgcgcaagcacaacatcaccatcgcccccttcgtgccccccatcgtggtggagatcgccaagagcccccgcgtcaccgcggaggacctcgcctccatccgcatggtcatgtccggtgccgcgcccatggggaaggaccttcaggatgcattcatggccaagatccccaatgccgtcctcggacaggtaaattgatgccacattacaatcattgcgcggacgaaaacaaaatctcctctctctctctttttttttgagtcactgacaagttagtccgtcatatcccttcttctttagggttacggtatgactgaggctgggccagtgctggcaatgtgcctggcgtttgccaaggagcccttcaaggttaagtccgggtcgtgcggtacagtggtgcgcaacgcggagctgaagatcgtcgaccccgacaccggcacctccctcggccggaaccagtccggcgagatctgcatccgcggagaacagatcatgaaaggtacacacatcacccacccccacccaggccaaaccctccattgatctctagataggatgtcaataccctgacgctgacgtggcgcaaaacgacacaaggccgttggacactcgcctctcccactgttgggtgggcccggggtggcgacttctctcccgcacacttggctttcaggtcgtacatggcgtcttgctgcgagctgagtgaacaaacttgctgcagcttaatttggtgcataggttggaaaccaactcgtttggtcccctgcgattaggccaaaacacatgtttttacatgcgacgatgagtcgtcgtcgtgattttggattggtctctaccaagccacaaacgtggtagtctagctgccagtaccagtagggtaggttccagtttccaccgactgaatctgaattctttcggagaaattctgtgcaaaaccagctgaaaaatcgatatcgtctccgatttctttgaacagaggaaggttctgattctttttttttttttggcttttgaaacgtggttagtggctgatgttgaggggtcggaatttcccgtactggaaacagttgaggtgttgctgattaggtggttcgttgggagatcctttttattaaaaaagaagtggacagattagtggtttggtccaagctccatggcgatgattgcctgaacagctgaaagaggagagaggaatttccgtccactccacgtctttttttctctgatttatttgtggtagcagtgacctcgcgtggttgttggcacgcaccagctcgcatcctagcttgcagccacacaacgacgcacgttgctactgcaaaatcatgctcatcatcatcatcgcagtggcacgatcctggaatccaagttgcgatgcttcttcaagcagatgaaagaatgggggaaaagagagagagagagagagagattagagcaagtgtgtctgccacatggatgatctgaagatcagaaaattcaggaagtgaggttccactaatgtttgttttcgcaatgcgtttttggacaaggcattattgcaattaggaacctggcaggtcaaaggcttttgggtgaggcgaacatgggcattggcaatttaggcttatgcgtctagtatgcgtgtgttcggtagtgggcttatagttggacatgacatcaagcaaaggagaagtggcagcttatcctgaccgtatcttatctcagttctcaccatgtggatgtcatgtccattgttcacaacttattttttctgaagatttcttcttttgaggacttgttctgaacctgtttctctgaagaactgttctgaacttgtttctctgaagaactgttctgaacttgtttctctgaagaactgttctgaacttctaattgattggatatttagttggcatagtcaaacctgtactacttacatggtacacaataaattatgtctactggttttaaaatggttgatgttgtcatgcgggccaagagacagctggtaccggttaattagaacgagatgttttctttttctaagcctttcctttcaagttcctttcagaagtttgttaggttctagtttacctatcaacggatcattggttggtatctgcttggcgtgcaaagtggagatcacatcaatttcagtcgccagccatgcttcagttctcctgcatctttctgttcatcaaccactactataatgaaacccaaaccaaaccaaacacccaaagcttagctagtcttctagtattaatcaataccacaccatcatgtgaagcaagtgtcaccatcacataatgcaggattagcatggacatggcatctcaagtaccaagttgaataaggaggtatccaattagcactgctgcatctcagaaagcattgcacaattcatagttagaacaggccaaatgagtggtccatcaacctaattgctgtcactggcttggaaatgtttggtggcccatcatgtgaaattgtgaacaagaaaagccacagttgggtgactgctccagttgctcaaagtccagcctgaaaatcaatcaaagaaagatggcaatggcgtcacaagtcaatcctaacctttgtcccattaaatttgaagagtctatctgaccaaaccaaactctagttggtacagtaggtacaaatcccaagactctttggtttggttgatggatgcagccgccagcatcctggatatctttgtgaagtttttacctttttttttactttgaataaaacttagaattctaccagtgctgcaaaaacaacagaaaattcagaaaatgattgccacttcaatgctggcaccaaacaagaatcacctgaaaaataagttcagtaccctgccaattgccatgtgcatgtacacatctgaaaaccaatgactctccttgacgttaacagttacagcttagctctgccatgtgcgtgcatgcactgatgcaaagctggatccgatgtttcctttggattatttgatctgcagtacagaattttgtcaccactgaaactgtcttctccttcagaaacagcaggaaatgattcttggccgtactgacgagctgtggggaattttgcaggctatctgaatgatcctgaggcgaccaagaacaccatcgacgaggacgggtggctgcacaccggagacatcggcttcgtcgacgacgacgacgagatcttcatcgtggacaggctcaaggagatcatcaagtacaaggggttccaggtgccaccggccgagctggaggcgctgctcatcactcacccggagatcaaggacgccgccgtcgtctcgtgagtccatctctgatgaaattcgccattgattaatcgcgagagaatgtagtgaactgtcactgattcagttgctggtgaaacttgttttcaggatgaaggatgatcttgccggtgaagtgccagtcgccttcattgtccggacagaaggctcagaaatcaccgaggatgagatcaagaaattcgttgcaaaagaggtactaatcacatgcaaatgacagcaacaaggattctgatttaaatcttgctaaaatttttctgacacgtttgcaacaggtggtgttctacaagaggatcaacaaggtgttcttcaccgattccatccccaagaacccttccggcaagatcctcaggaaggacttgagagccaggctcgccgccggcatccccgacgccgtcgccgccgccgccgccgatgcgcccaaaagcagctaaggccaacgccgacgttttctctattttcagtcacacaaccggtgaaaaaaaaatgcagagatatgatgttgctgtccatgaaaatggaggcagaaatggagcagaggaagtttatagtttggtttgttggttggttgatgctgctgcagcagcttgtgcaatgttcataaaatggcattaataatattattattattattatacatagatgatgtattgtttttgaccataagaacaaggctgattacaaaataatacagtgtattaattacgccctgtttctctctactttggagattccagatgcttccttttacacttggcctagtttcggaccaaaaaaatgggtgaaatttgattgcatttgagtggcatttcagggagaaaattattttctggaacatatgcttttgaaaaaggccccagtatttgagtatttcaacctcaaaatggagctggcccactatatttcacgtgaagcccaagagacatcgaggcccatgtaaggcacagtaaacgggccatttcgaagggaaagcctcacggtcgttggcctcgtttggtttcatggccataccatttgtgcaacaattggctaaccattttccaaacaaaattcagttttgaagaacaaatacctgcaaaaatttcacctccctccatttttcatataaccgaaatctatgataaggcaataggcagactattgatttgtctatagttagggctacatagtttgtgaatgttcttttcaaattatgcaacagattatttgcttcacattcaaaaaatatgtttttttcaaaaaaaaatagagactttcttccactgggtagtgtttgaatatcctgaaaataaagatgaagataaagattaagtgtttcacgtaaaatgaggtggtaataatatgtgattaattgagtaactcttacaaacttgaaaaatgaattaatctgatagtttagaacaactttcacataaaaagttttcgcacgaaacacaccgtttaacagtttgaaaagcgtgtcattttaatacaaaatttcatccactcttttcagtggattcgaacggggcctcgtgaattgataagaccaagtaatctgttaagtttctttctcaaaatttttaatttatctataaaactaaatagataatccgtgactcttaaattcttaataatctacaataaactgggtatggtagattggtaggtagctagtcgaggaatcaggacttcttctgtcacctatttatttctctagtcaaaggtttgctatctatcacctattttatttctcttcctttcgattgtatatgatctatgtagtgaaagtgagatcaaaaaacaaaattggagttcataacttttttatttttgctcttccattatctgaaaacttacatagtctgcaatgtcagacgttgctaaaaagcagccatacgtagcttcaaattacatatgtacttgctggcctcctatagctagtagctataattctgagatgtatctgaacatacttatattcagattcatctctatctctagaattagagatttctagtgcggagaggtagctagtactgccgcgcgcgggcagctgcggcggtggccggccggcgagtagaggcggaagaggcggcgggcggagaaggcggagaggacggccatgccggcggcggcgaggaagctgcagagcatgccggcggcggcctgctcgcagaagcgggtgtagatgttgcagagcttgctccactgcaaggcctccacgccgatcagccccaccatacacgcctgcagcgccgccgccgtgctcgcgaacaccacgtacgcgcatccctgcgtgcatcaccaaatcgatcacaatgggaagaaacaaaacaaactcatgatcaattacaaatcgctattatgctggtttttttttctagctagctagctaccacttgaccaacaagttggattcttaattaattttactgcaagagttttccaccatggaacttgaagtcaagtactacctccatcgtgctataatataaacttttagcgttgacacgagtattaataaaatatttaaaattcaataagaaaatattgtgagtggtcgataagtagaagcctacgagaaaatcgaatggtgaaaagttatgtttggttgaaaagataacattgatcgagacgtcattatattttaagataaattatatttcctccgtcttaaaatataagaatctagaactggacgagacatttcctagacagagaattgttctatccgattttaggttcttgtatttgtattttagaaccgattttaggttcttgtatttgtattttagaacggagagagtaaggatggattgaataaaatatattttgaagaaaagatcgatgtggactag

SEQ ID NO: 3548 - DNA, 35335 bp, Oryza sativa
aagctttgggatgttactttgaattggggatttggggattgatttagggatatacatggcactatattcgggagaaaatatagagattaaatctgggcaaaagaaaaaaaaagcgctactctctctttagtcccggttggtgttatcaaccaggactagagattcctctcatttttcccggttggtaacaccaaccgggactaaagatcgatctttagtcccgggtatttgaaccgggactaaagatagtgatctttagtcccggattcgtactcccggttggaaaaccgggactataggggggttaccaatcgggagtaaaaaggctttctcaaccagtgatggggaaatttgttgtatccaaatatatgtacatgttttataatactatgcccttctttggatatttaaatgcatacaactatatgtaaatattttcatatatactatttttaattgaacaataaataacttgatactaacccaaaatgtagctttcaacacttgtaattgaagactagacacaccaggaaattcgataccttccagtacctcattaagagccataaaaacactgagtaaaaagaagactggttgatgtaaaaaccctatattaattgtaaaattaaagggaaaaaatccaaatattccccctaaattttggatggaattctatttgacacctgaactttaaaactagacatctaaccccttaaattttgtaatacagttcatgctaccttctaaggtggttttacataatggttttacgtatttgagatcttacatagttgtatttaaataagttcaatatatttacgtatcatcaattgtaggctgttaatttatatactatacaataatgttatagtattgctactctagtatttctctttgctactctagtatttctcttgcgagtaagagcaaacaaggggtaaaaagaaacatttaagtgaaaaatttacatatatgtttcaatgcatatttcgcatgatcaaagctcagccaaaacatatgctaatgagataacgactttgtaaaactaccttaaggatccgtatgaacagtactataaagtttagagaactgaatgtccggttcaaaacttcatgttgctagatggactttttttttttgagaattacacagtacagcgcagacactcacaacgcacgcgctctcacccctatgaacacacgcacacaaaccctacccctatgagcattttcgaagactgggccggtaaagtttagggaactgaatgtcccgttcaaaacttcatattgctaggtggacttttgatttcaattaaagtttaattaggtggttattaattaggacttctttttcaaatttaaaatttgatactgcttaaattacaaacccaacctaaaacaatcaaacaagcacagtagtacatgcactggcctctctctctctctctcctctgcctttttaagcagccacacgtcgagtcgtctcctccacacagatcgcacacaccagtagctgcactagcccactgtgatcactagctaccgagctgcactgcactgcacacaacttgttcgtcccgagtcccgaccaccactagctagctttcgcacgctcgccgcgcgccatgatgagcagcaggctgaacgccggcgcgatggcggtgccagcggcggcggtggcggccgacgtcgtcaacttcgggtacgccgcccccatgccgccgccctacgtcggcttcgacccagccggcatgggcggcgagcgccagctgttccagcacggcggtgcatgccatggcctctacgacggtggcctcgacttctccgccgccgcggcgttccaggaagcggccactcttggagttggcctgccgggcggcaatctgctgcagtccctggcgccgcccgccgccgccgccgccacgccgtcgtcgctgcagatgccgatgatgatgtcgctgccgggcctgcctgcgacggcggccgacgtgtacccgttcggcgtcggcgggttcgtgaagcgggaggatggccccgtcctggacgtcgtcggcggcggcggcggcgggaggatcgggttgaacctcggccgccggacctacttctcccccgccgacgtcctcgccgtggaccgcctccttctccggtcgcgcctcggcgggatggggatggagatggggatgggcatgggcgtgctcgggctgggcctcgccgcggcggcgcaccaccaccagccgccgcggtgccaggccgagggctgcaaggccgacctctccgccgccaagcactaccaccgccgccacaaggtctgcgacttccacgccaaggccgccgccgtcctcgccgccggcaagcagcagcgcttctgccagcagtgcagcaggttagctccgatcccgcgcaaccatgtcgctgccaggtgggacccagcaggcacacgtgtcgctgccaggtgggacccagggcacagccacacacgcactcacacacttgacatatagctgattcaattccgtacgagatgaacactgcagcaaactggtgagatatgtttgcttgtcttttccggtgcctacttgccaaccacgcatctcactcactttccatgcatgcatggatatttctatttcatcaggatggatcactgtacattcaacctacttcatcccttctaaaatatactacctccgtcccaaaatataacttttagctataaatctggacacacagttatccaaattcatagctaaaaatacttatattttgagacggagagagtaaataattttatatggacgagacattttctaatactacaaatttacgaatttagacagagagcatgttcacactggtatattaagggaatacccccctccgtcctaaaagaaagttcaatcctaactataaacctagacacatatatgtccagattcgtagctagaagttggttttttatgggacggagtagtatgtcatattcatttaaaatctcttatattttgtaatgatggagtaattatataaatagctccccagatgatttgcatgcatgcaattgagcttaattatgatgaaaaacaacctgatcactagctagtggtagtgtatagctacctgcattattaattcatggccatgcaacagagaaaaagctttcttttcttcagttcttgcttttcttctctctgtactgtgagttcatcatgcatcaactgtaaaagaaaaaggctactagatgagatattttgatccaagagtttaatctgaggtcagatgctaattactagtattagatgatgcttgcatgcatgtcagtcagatcagatcagagagcacaaggcagtggttgcactttatcactgtagctatacctagcgctgcatgaccagtgtagcacactcatcattgcaactcatctgacgatccatggatggagatacatggcccctatatatatgtcccagtatatattactgtataggagtacagctgacagattgtacacctactagcccctacataagcagtctctgtatctgcatacattggcatatttacgtgtacatgcagtgcggatgcatatgtattacagttaatttacagtagtagcagtgtccattaagtctaatttggtactacatttatatattcagtttgatttaaatttgtgttcttaatttggacaggtttcatgtgcttgctgagtttgatgaggcgaagaggagctgccggaagaggctcaccgagcacaaccgccgccgccggaagcccaccgccggcggccaatcgtccaaggactcgccgccgccgccgccgtcgaagaaagggactgacgccagcatcgctagctcctacaccagctgtgaccaccacaagggtacgtactatactaaaatttaactcaattaattagtttggtcctcagaagggagaacacatttgaaataattcaaaatctaattaagtgtggcaatgctcaatatataatgctgaacgttagatcgatctgaaagcaaaattcagatactgatgttttcaaatttcaaactatgtacagactagattaatgctcttcttaaattaaccatttagatcagagaagaaaaatatacaaattaaagatgaactgaatctttttttctataactaaaacacagtcaataactcacctcagtttgtaaaagggaaaagtaccatcaggatctgttactcttcactgtttttgaccccaagcacaagccttgctattttttttcaaaaaaaaaaaaagaaagcccttgctaaattttttgttttttttttagaaaagctaggtcgttatataacgtctattcaccaacttgtctatataatggagtgctactacgtaccatagtccatagatacgatcttttgtgcaagaacgtggcaaatatatatacagacataacacatatgacttgacagttgtcacgcctagctagatgctacaaccacgtacaactagctgatcgatcatgcacacttcgcgccaaattaagctttcatgcacctactatagctaatactctagttagcaaagtacgcgtcttaaaataaaacaacctaagataatatggtatataacctaatataacaatctagatagaaaaatgttcatatttgttaaactagattatatttaggttgttttatttttggaacggagtgagtagtttacgtcgcaattcctgcattattctacatgtgatcatcatctctcttcgtgcagcagctgcgagcaccacgacggccagcggcgtgagctgcctgcaggagcttgcagaccaccacgacgtcggcggcggccatcaggcagccatggcggcggcgccgccgccgacgctgtccctggccgcgctgccgccgcaggaggaggacgacgaggacgaagacggcggcctcggcaacgtcctgatgatgcagcagcaccatcaacggcggcgactgcaacacgacggcgacggcgacgacgatgtcgccgccgccgccgcccaccaccatctgatgagatctctcgcgcggcagcagcagcagcatcgccatagcagcggctgcagcaacaacaacgacggcgacgacgacgaccacaacaacaacaacaacatactgtcgtgctcgtcggcgtcggaccagcagaacagcagcaacaacaacaacatgcatttcttcgaggtggatttcatctagtcgtctcgaaaccaaaaaaacatattaattcgtcagggtaaatatcctttggaattaattaccgatggttttttcgaaccgattcacgtgaaaatcctgtaaaattccaaaggagatctcgattggattgatatgtacgtgtacatctgtgtttttcagaaaatttagagattggtcgatgggaagtaacgagaaaagggagtagagataggctgctactgctggtttgactgcattattatgagacgatgagttgaaaagaaagcagctagctgctgttgctgctgcagctgcagttgctagctagtattagctaggttcgttgcatgcgatagctaggctggagtgagtgtgtagctaaagtttgctttttttttttcttttggggttttcttttcactgtgttaatttgtacttgctcttgctgcttgccctttttactagagagggggggggggggggggaatagtgtgcagctagcatgtgttttttctttgttcttttgcctttttggtgacaatatgtaaattatgttgctgtgcatcatgctccttacaacgaaacactagctctgtttgcatctcctcttgacttgttgtaacttgtaagatcttaattttaaatgtcgaataagttcatgattaattatctcccttgtctcgttgagtttttagaccattatgttgacagatctctgaacatgtccctggtctggaattctggaaatagctctttgagctccttaatttggtgattatggatcgctactgtctagctagctagctcccctaattagtcacagcaattaatgtcctgtccaaatgggagctgatcacttacaagtgacattgtctatacataatactccctctgtattttaatttaaattttaatgtatgacgccgtcgactttttaaccaacgtttgaccattcgttttattcaaaatttttatgtaaatataaaaatatttatgtcatgcttaaagaatatttgatgataaatcaagtcataataaaataaatgataatgacataatttttttaataagacgaatggtcaaacgtcgatcaaaaagtcaatgttgtcatacattaaaatacagagggagtatatataaaagacgatagtgatagtggtaatcagggtacaaaattattaaaaaccgcttgctttcatataaaatggagatttcgagctagctagagatcaaatggcttggtaaaccaatcatttttctttaaaaaacaaaccaaattttagtcgaatttcaccgttagtcaaaccattggtactatcaagagcggttatcgagggtggttctgtttagttagccgggtggtaccatccgacaacggaattttctatatatgcatatggagtatttgttttgcttgaaatatgttttgttcgacaattagatcgtttgtttgtatgtcttgtaataagatcatttgagcaatacaattgaaaactgtatgaaaaatttaaagtttatattttttttatatacttattctagttctagctagatgagaattaactatatataattaattgaaaatatagaacaaataactttatgtgccttgagctaggctgcaataagttgtactgatcactatctacggagaacctatttgagttgcgtcatatataaggcataacaaattttgaattttagaacttgatatgatttagggttttcttacgttggtttcgttgcttagccttgtcttttggaccgttaacactagaattgtaaaaagttcgcaccataaaatacctcccaagcatgatttctaggtttagttaatgcatgcctacaatattactactcatagcataggccggccatcgatctcataatgaacgttggcctcatcagcagtgaatagaaagggtgaacatatctttctcaataactagggtatctcttcgtattgaaaggcggtaggaccagcaacgacacacacacacagttactgctgtactgcagtaggagtaataactaaggatttcaattgaaaagaagagatgaaaagtactactagtatcaatcaagcagggaccggaccaagatcgcatcacattgtttatctacatgccgccatcgatatatgcctgcgtgttttaaatttatggcagtgaaatctaacgctccaagaacattaattcaaaagctagagatggatctcgatcagtgaacaaaatccattaggtagttcatgccaaaattgaaagtttggttgaaattggaacgatgtgacggaaaagttagaagtttatgtgtataaaagttttgatgttatggaaaagttggaagtttgaagaaatattttggaacaaaacaagggcatagatagttcaggaagaaattttgattgatatatagacaaaagcgatgatctcataaaagcttgagataccagctgctggatcttttatgagctctatctgtgctgggacccaaattctcttttcttacggatatttaattgtaccaacagttcgatcaacctcattgtaaatatgctcttatgcacttaattaacaaattaattacctgtagtacatgggagagatagatggaccaaatatataatactccctataatggcttgtcaggactgatcaggagttgttacaacaattcaattgcttctgcaggccagaatcagaaagaaatcacacagcaggatctctccccattttaattactcctctcttgatctcttcctacaattgatggaaccaacaggcttttctttcccgttgatcccgtcacacgcatgtatatatatctgaatcgttagctaacgaatcaagcatattcaatgttcataggatcacccccaaatctctctctctctctctctctctctatatatatatatatatatatatatatatatgaaaaaatacgaattaccccctgaaccgtggcagttcattcagcattctatttattaaaaaatgtgagacccacctgtcatactcctcccactcttcctctctctcttctctcactcttcctctctctcacgcgcacggcgaggcagggcggaggggcggcagcggcgaggcaaggcggagggcaggcggcggcgaggcgagcgcggaggcggaggaagcgaggcggtagcgaggcagggcggcgcacggggcgggcgggtgagagagaggaagagtgagagaagagagaggtagagtgagagagagagagagagaagagacttgacatggccatgtcttgaggtccataaagtctatccgtgacagggtaccatatttttttaataaatagaatgctgactggactgccacatgtacgccacgtagaccaaaaccaccgcagattaggtcgaagggggtaattcgtccggtttgtatagttgggggtgaagaatatccggttttcgggttcagggggtaattcggacgaccgcgatagttcgagggggtaattcgtactttttccatctagatatgtactgtctgatctgttctgaaaacaatgacatcctaaaatacgtacagacacacatctctcaaaagaggacagctaggggacggaataccgttcatctgacggtatagtttatgatcttgatcgtgcacgacattctgctacccccgcttctccgaagggacgcggcagtagtgctcatctaatcaagtctcctatctgggttagtttggttgcactgtgaggaagcgggactggttggcctatgtgggacacagctagtctgatagtaataaaagagttttcttattggtctacacactctgatgtggactaataatagtctagtatctcgttaggtcatatgctgatgagattgggacaattgatacatatattcacaataaatattttttgttgggtcgtgtgctaattagggtggaccaataaagatacacacatctacaactagttattataaagtacggagaaatcatgtacttattgtcacgccccgaactagccctgagcggaactagcccgtgacgctccaatttaacctgttaaccgataccagtcccaggaaacagtgctggtatcacaggaagacagtatatcacagcaacagaggtctctttattacagagtaggagtacagtcatgttgggctgcggacagatcccgagctcgcaactgcattacaaaagggaaagcggaagccaagacttggaccaatcatcacaggcgcgacttgggaactaggccgaaaccctaaaactcatcatagccgacttgctcctagaagaactcctcgtcggcgggggccacattatcttcttcagcaactgggggggggattatttatatagagcaagggtgagtacaggagtactcagcaagccatgggaattaagtgtttaatgcaggcttcaaaggaaaggctgttgtttttgcaattgattttatttaaactcctttttgaaacaactaagtgagtgcttctcaaacgacacggatgggacagtgcgtctcgtccggtcggagtatgtgcaatgtatcagtctttgaattgatcagggttggcacccggccaacagctttcaaacggccacccgagcctggctgatcccatcaaccgcagattttttcaaacatcgaacccattccacagcagcaatttcacaaagcagtagtcaaacaaaactacgctaggaatcacctcacatccgcccatgaccgtgggcacggctgttcaaacagtttaataacctctgcatagggggtacactttacccacacgacattactaacccagatcttccagcccgtgcagaacggccacgtctagagaccttaaggctttcatgacaaggcatttcgaaagccgacacaggttcaccatatgccaacgagaggggtcccagaccaacaacagattaggtcccagaccatactgtgccaggaaacccgggggttctccccggcaccaccccgttgaatccacatgtctcttggcatcatggcacccccgattagctagttactcagccaggggtgtcccattccacccatgtggtcgcacttgtcttatgttcggatgaaattccaaggaaacagtccttaagtgcaagagcgggaaaccgtactcccggtacgttccccggtccgcgattttggaaattcatttagttcgcaagcaccgacccaggtgtcgggttttccaagtcttttgtaaaacccaagttttacccatcgttggatattttaaattttgagggggggtgttccgatgcgcgtacccgaaggcccatgcatcgaagcacaatagttggcaagggaggtttaagtgttcaataattcacggagggtaattgcagcaattaggattgggggccagcaggctatctcacaagccgcggccaaattacttgtgtagatcctattcatgcaatatttgcggaaaagaaatacttagatttaaattataggtgcaagatgatcaaaggtgtcttgccttgctcgagaccttgagcttgatcctcgaaatcctcgcactgcgggtcttcgggctccgaaactacacgcgagacgggacaactcaacaaacggtgaaaataaagccctattatggacctctaagcgtgccattagatagatctcgagatttgaggaattttagaagttgaacggagtcaaacggacttacggttgggaagatattgaatttctaagattattggatttttgatctaaaggaaaaaggatttatttaaaacctttttgagaaaagaaaagaaaagaaagagggaggggaattagacttccgtcgggcagctagggcgcggcccgagagaaaggggcggctcggccgagcttaatgggccggccggcccgagaaggcggcccaaggcgcgcgcgcggccggtgaggaaagaaggagccggtgggccgggtccatctcgcgtggtcccgagtgggacccgcttgtcggcggctcggctcaccgtgagcgaggtgcacgcggggcgtgctagggtttgggaaggggaggcgcggcgcacgcgcggttcacggaggacgcggtgcgcggcaggcccacgcgcagcctcacagctcaccgtggaccatgcgcacggggagggtggaatggagggagcggctgaccgggtcggccgatttggtcgtgccgaggtggcaccgacatggcgcctacatggctgccacgcgggccggctggaggaagacgaaggcgccggccgcgaatggacggcgggcggtggcggtttctccgggacgccgtgcgacgacgaggggcgacggggtgtacaccggaatgacgagggagaacgagagggagcaagccaacggcttggattcgccggagggagttcgtcggtggcggattgcggcggcggccaccggcggcgagagaagaggggaacgatggcgagacgactagggttcgattcctccggactagagcatctacacgacctcgggattgcattccttgcgccggattaggaggaaacgcaccgagggtggccggcgacgagaggcgctaccgagctcgggcggcgacgacggcgagcacacagtgggcggcggcaaggcttggggcggcgccagctagctatggggaggttacacaagcttctatcgaaaactaaggggaagagggggaacgaggagggagcacggggagatgcactaccgtgcgggacggggcacagtgacgatgggccgacggcacggtagtgatctctccggcatcgggccagggaagcggaggaagacgatgcgcccgaagtccccttcacgcgtccttcgcacgcaccagctctcccggtgcttggcgatgaacggcggaggcgagacagagggatggcaatggcgtggaggtggcgagcgaaacgggaggaggaatcgatgggagggcaccttggttaaataggaggcgatgtcggtttgggaaccgaccaagggcggtcaagggagcgagctagcgctcggcggttgcggccaaaacggcgacaggggggtgacgccggcggaagagaaaagggaaaatgaggagagaaaggggggcttgccccttgccactttgggaaaaggaggagggagagagggcgacgcggcagagggaggaggagctcggcctccatcccttgaagctagcgcgcgaaggtggcggggccgggtcgatgacgacggcgatgacggcggaccggtttggagcggagcggcgacacgggcggcagatgcggggcaggcgcggcaggtgctgacagcggcggcgactggccggtcggccaacacggcgtgcgcgcgcgggaagcaacggggcgacgcgacgatttgggcggcgttggcgggaagcggcagcgagggcggagggcgctcggctcggcgcggctcacgagcacgcgcacgcggcgcacgggcagagcgagggagagagggagagagggagggagggagagagagatgggccgagaggaaatcgacccaccaaacctgagggaggcaaaatagacttttgcggaggaaatgaattgggaagaaaaaaaattgagattagggtttggatttgacgatggatcggggattcgagatccggaatggcacggagactgactgcaagcgaagaaacaattttcgcaattagggtttttagaatttaaattttcccgctaggcgccacgacggaacgggcgctacacttatcatccatgaaaccccatgatacttggtactacatagtaccttatatgttatgaacctccaaggtaacagacctggtattacatatgtatcatatgtggtatctaggtatcagacttatacttagacccagtatctaggtatcagattttgtagatatcgtgggtatcatatatgatatctgggtaccagatttgataattagacttggtacctaggtactagattttgtaaatattgtaggtaacatatatggtacctggcatgatacttgatacctagggtatcatatatggtgcctgggtatcatacttgatacttagacatgatacctaggtatcagattttatagatactgtgggtatcatatacctgggtatgatacttgatacctaaggtatcatatatggtacccgggtatcatacttgatacctagacctgatacctaagtatcagattttatagatactgtgggtatcatatataccttggtatcagacatgatacctatatatattagatatggtacttaaaacaagataattaagaaaaagatgaacataaaacaagataattaagaaaaaagatgaacataaatctagataattggccatggctctttccagcaggcccagctagtatgtgagcacctcttatgcatgtcctacaactaatagaagaagaagtcacgtccacactcagcaggacagtgcgacaagctagttcatcacgtgggagcctatccatatctcgcatatgaggtaggcatcaacgacataacgattcgctcacattaatcgtcccgtgacaacgggataccgttttatagcttttctcctctcaaaatcgtaaatcattaagaactataaaagaattagaacttgatatgcaaaaaatatattagcagatttgatgtgggaaaacttttgaatagttataaatatatagtttgaaaaaaaagtaattataaaacatgtgtattagagacatgtcggtatgcaaataaaactttaagaagaagaaaatagaacttgtacgtgttttgcagcacagaattaagagagctattgatcgatccagcagagcgtaggccatatcaatgagactcccatgaatatgcagaagctgcctacgaagaagctaggatagttgctaagctaggtagcttcctgttgatccgtatttctccctccatccttaaaaaaaaataaaccctgagttttcatgtacaacgtttgaccgttcgtcttatttgaaaaagttatgaaaaaaaatttaaaaaagcaagtcacgcataaaatattaattatgttttatcatctaacaacaataaaaatactaattataaaaaattctatataagacagacagtcaaacgttaaacacggaaatttagggtttgtttttttttttgaacggagggagtacaatactatatatactgtacttatatggttagctttagcaagctaaaatcctgtgtatgttacatctgtacatgtgctctaggtgcactttggaaaattcgtacatatatacacggtttaattatccggacagactttagcttggtggtacatgtcctgcatgctgttctgtacttctggtagggattaacctgctccgcctatattaaaaaagcaatttttatatatgaattttaacttagcgtatgtctagatttatatataaaagttacattttcgagatagagggattaaccacctaaataaacatgatattttaactctaatacattggcttcaatacaatgcaacataactttttattcatttgctctcaatatgctactctacttaatttcgttcttctcctcttgtgacttagcacatttgggctagctagctattcgcatgtaatgccacgatctagtgtactctttctttttctctctttcttttctctaaactcgcctatacacatttctccccccaacttcatggatcaaacaacacgttaacttcgaatatctaacatttagatttaccatcatcgtcagatttgtaacatccagtcaacttaattaattacccctgcgtgcatcacagcttttaattaattgggagagagaattggagtaaatgtatatggctgcttttcctctgttcggccataagaaaagctctaggaattgtggtaaatggcaaaggcttgtgcatgcaggggttgataattaaaggggcaaaagctgctgttgcagcgatcacaatccgaaatgccatactagtatgttgagtcccataggacgcccttcataaagagaggggtctttagatccacgggtgtaaagtttcggtgtgtcacatcaggtattatataaagtgtcgcatagggtgttcgggcactaacaaaaaaataattacagaatacgtcagtaaaccacatgatgaatttattaagactaattaatccatcattagcaaatgtttattgtagcatcacattatcaaatcatggagcaattaggcttaaaagattcgtcttgcaaattagtcgcaaactgtgtaattagttattttttagcttatatttaatacttcatgtagatgttcaaacgttcgatatcacagggtgaaaaattttggggtgagatctaaacagggccagagacactaactctcaggtagagggccaacgactataccatatcagaatattagggtctattttagagagcttaagaatctgagaagcagctggttggtagacagcttctgagaatctcaaaaagctgggttttccaaacttttagttcattttctggattctacaactacagctttttagaatctgaaccaaaaattggattgtttgcgggagtttctggttatgagagaagctgcagcagctagaagctccccaaacagacccttaagcttgttgccttatcaatcatggttaatatttaaatttaaaacttaattttagagttgattttgaggtcaaagtagtttatttctcaagctgttagagctattatacagctggagctatgaaactctgagttctaaactacaacctaaacagaactttctcatttttagttagtttggaggaaaaacaaaagatttggactcctaagaattaattcttatgaggcatactcagtttgtaggaatgtaaatataggtaaaccggaaattttccttcctacaagttgaaaaataattaaaacataaaaaaatcatccacttaaacctcttgaaaaattcatatggattaaagtgtgcatacactcatattttctctttttatatttctataaattaaaattcctccaaaccgaaatatcatggtgtgacataggatgtgcactttacctaaataaacacaggatgtgcacatgtactcctaaaagtattaatagttggccatgttttcttgtttcaagaccctggaaacatccaattaatcatgtacaatcaaatcatacgctagtttcacatggcggcacggggacaaaatctttttttcaaacagtccctatgtctatatatataattgccttgtcgtggcagctcccgcgtgcgtgcatctattacttgttttcggacatctcatacttctcattttcttaagtgatcccccctactcctaattactaggagtactagtactcgcatggaaatgaatgcaaataacaggacaacaccagtttccacttcccagtagatgcatgttactcagggtccaccctccatgcttagatggaagtttagacagattacaataccatctgtcaactaccacaaatgggttttctttctcttttgggactagtacaatttgttaattactgttccttaggctatgaaaatatgaaaaaaaaatgaaaatgtaactttgatcgctaatttctattacagtatatatattgcagaacttgagaacattatagtattatgaaagtatttctcaggacagcctacaacgacttttatccaaactaaacattcaaaatgataatgttcaaaagtttgaaagttccctttgagatgtgtactctaaacgattggttttcgtgaccagagtaaaatctagttgtttacatcttttagcattgtctgaataacaagagatcagattattcttaaagtggggatccgattgttttcaaggcaacatgaagttctctcaatcattagtccattactacataagggtaaagtcatactaataaaggaacttttaagtctaaaataaatgagtatgcagatggcgggacaggttttgaagtcaagtccctacgtgcctactaaccaacaccatgaatccgaacctcagaacctgaactgaactgggacagttcgcgttcgccctacagtgataacaataccatcatttgggcctgctaaatgtaaggggctctgatggtgatggggccggccgggctgaatttatggacaagtacagaagatgtggggctctggactctgggtaattaggcaagtttacactagggctgttcacccgggaattttcattttaaaccttttaaatttttaaattttaaaaataaatccttttaaaactggcctgggtacccttcctctcatctccggcgttctcgtcgcccgagtttgtgtcacgcaccgggtagattcagaaaatttcccagatactccctccatccttaaaaaaaagacaatctagaagggaatgtgaccactcctagtgcaacgaatctggacagagcaaaggttacatctcctcctaggttgcctgtaatatctcgcacaagaatgtccatctcactgagacatgtttctttctccattcttgaagaccagaggaggtgtgatcctacacactacacaacgataggccggaaaggcaaaaaagattgaggcggccggctccttacgcgacggcgatgcgaggggtgccgcgcgcggccagtgatccgttaattccagaaagcactcaggtgtcaatgtgccatgccacgcacatggtggggagaatgaggggatcatcaaccgatagcccccaccaagccgcctcgtgattcgtgctaaggagcatgcacacccccaggctcctactactactagtagtgctgctgttgtttccatgctttgaacttgttgctatgctattgtgtagtaattgtggactagggtagccagatgcgtcagtgcgtgcacgttgccacttccccaattcactatagctcctccagagttggagctcggaggcaggggcagatctagcgaggggcggcgagggctcgagcctcctttactggcgataggattatggaagtcttcactaattctttttaccatatacattcgaaggggactatagatatgtctagtttgttcagacccttctgttatttcttaatacgccactgctcggaggtaggactgtgcagtgactactaactacaacacatgattaaattgaaagcagaacagctcactctcagttctgatcacctagaggaaaaggggatgagagtagaaggcacaagggcaaaatttgcacacggtctacatgtgtatatatatatatatatatatatatatatatatatatgtgtgtgtgtgtgtgtatatgtagtgtatggtgccgcgctaggcttgccatatatatacatcaaaggaactcatcaaaagttttagaattccgaagtgctaagaaactgaaggtaaattcagaatagtagtagcattgcttagttagtctactgaagatagcaacgatcaaaggcattaagcagtttctccctgaatactggtaattagaaattactggtgttagctcgaacctggagtgagccttttacagttctgatcttgcgcattcttcatcttctgctggccttccagtacctgcagtaagtaagaatgtacatcaagcttaattatggccctagctttatcttgatttttaaactaaaggatggaacggagaatcaagaagccgagaattacctcaccttcttgacttccttggcctcccaaccggtttcttcgcctgggttggagccaagtctggctcctggccaaccgctatcggttcgccttgatgtgatggaccactccttgatcgggttctgctgtcaatgtattggcgacgatatacattagcaggtgaacttctcctagtttgagtgctcctttgcaggctagctcctgtgcaattcctaggactgttttcaagcggcacgcctgttgatgaactgaatagatggaaggacacaattacttacgtattgcaataaattcttttatcatgaaaatataaaatgtatatagtagtatatcatctgttcattgtggacagtttacattgcttgatagaagaaatgcatttcagattgttcataactagtaaggcattataggctgaccattggttatggagcatgtatacacattgcagaatttagatattaagaaaaacaattcatgccatattattgcaatgttgtattaaagtcataaaacaaacaaaatgaaccataaataccagatatcatgagtttataacaggaaaacaacattggcccatttgaagatacatggctgccatggacattacctgggcgcagcctccttgtcctcttgaaacataagttttgaaacagaacaagggtcattgcagatggtgcctgctgcagaaaaactaagagtatcagacgagttaatagtagaaacctaaggtttatactcacagaatcagaaactttaaactaaatgcagaaacgtactgttacggtttttgcgtgaaaggactactatttcaggatcaaaaggaacaatatcatccaaaggttccaccttaataggaaaggtatttgtcaggtcctgtgacaaaatttggagttactttcagtaacagggcaccacagccgaatttgacaaattccaaagagcgacacccagtaaactagtgttgtatagtccaagtacccgatcagagtatggatagagcatggtaggacaacggttatcccggttggcttcactagtggctgaagcaaaggtccgtgcagttacagcaggacgcttaccacggagagctgatatgtcattatcagtgtcatcatatgaaacaatgttggaaaatattaggttgtccgtcccgagaagggggatatctttgaacagcttctttgtatcttctggtatccccctgaatgcattagggtacttggtggttgcctcttcaaatgaagctatatctatcacaaaataaaggcacagaaatagttgatgaccaacatatatcccactagaataggctttacggttttgaaatgtaattgcaacaattacaacatattttacctgaatgactcttaagaataccatcctgcctatttgaaatgttcaaatcatttagctttggtctgacacttcgggagtgagactcatcgaggttatgtccagtgcaagaattacttcttttcagagcctgcagttgttcaacaaaactgcaagttaggctcctataaattgaactgtgtgaacctggttaggcattctctttggttgatttattcaggcttgcagttctgcagttttgatcttcattatttatagttttgtttgctcctactataatgattcaatagcagatgatattccacttcaagaagaaaagttagaacgtttgcatcattccagggtcaaacaaaaaaatgcaagatttgaacaaataaaatgagatacctgctctgagatagactaagtattgcccacgaaaaacttttaggcatgctgttagccaataaagaaacatcacttggtctagaaaatgaatggtattaaaatgacccaagaaggttagtagctcagaattatcaaacccatggcctatactatgaagaattttgtagtgatgggagaaaaatcagaagaaattaataacatgaataaaacctcagaaaatatggtgtactttggcagtttacatcatcagaagtagtcataaaaaactgagcacagtctaatggtattgaaaaggcgaatataaggtgcaatgtaaatacatgtcatgaaattctgtgatcttgagtaccaacatatttagtgtaaagtatatttccacaaggttcagagagttggggactcacatgctgactctcttcaagccatccgttctcaacaatgttgttgtcaagctgttggctacaatcatgaacatttgaactcgcagagcaagtgtttggacgaaatgaagagtatggaacatgatcttgctgttggctagtttgccaagcaattggaagaacaatagaaggttcaaccacatcagggtctgagtccacaacccgctcgtgaattatctttatcagtatatcacattccgatctggcacgtaattgaagaattgaagtcaaacttagcagtcaatatgttcagaaattgcctctgtgataaatagtcataataagaacgaatttccctatcaaacttatgtctttttttctatatcatctcaaggagataataacagaaaggccacgctcttgaaatttggtctgatagatatattagtaattgccggccacagatacatttagcttatgaaagtactaaaatttttcaccggaaggaagtactgaaattcaatgaaaataaactcatatgattaagctaatacagatccaatagtgaaaagattggttgtacaactaaaaaactacagcagaagaaaacaaagatataaggtatgataccttgagtacgtttcttgcaaaagcatctgcagtatagcatccttgggatctatctctgagacaagtgctaaggatcccacaccactgtcttttagagtaatctcctttccgctctatgatcatgaaaaggacattcttgatcaatctcttcatcactcctaaactaagatttacagtccacttgaactacagagatgtacaaagatggaaatacctggttgaactgattgttagaagcaaagtgcgcagtattatctgttcatttaagaagatatagatcaggcaaaaagggagcaaactttgatgtgttttcatcatcgagaaatgtgaagcacaaaacagagtaatggggttaatctaatcatctgttgctacaaagtatcgcatcaaaaggattcaatagttgcatgtatggcgttcttagataatgtaggagtagaatgcatgtgcttttagaaaagctacaggaaaaagaaaaactaagtatgtttcaatgctttgtcctaccagagattaactgaaacttcaggtggcagagagaggagcatcgacaaggtcaaattccagtctcaattttcaagcattgtacaatgggattcagcccaacaccccacaccattttccccctactgttcaaaccaatgaccagatcactggcaatcatacagaaaacacaaggccacctacacttctctagttttaaaattaacaggttcagtacaatatccgtgaggaaaaaatatttctccaagttctctccaaattggcaaatgaaaccactactaaaacctagagaatccgatcatattattatacctctaactccgtgttcgtgtgatgctgcactcggtttgtgcaaaaattaactacaggattaggtagcgccaaattcactcgaatatttcgcaggctaaccaaccacacggacgcgccaccatctccagcgacggacggcaacggctcacgccgaacacccgcgagggcaaacagcatcaaccacggcgcaaaacaacgcagcgcactcggattctagaactccgctcgagggaaggatcgcgtaccgccactgccgcggtggccgcgcggaggcggcggagactgggacgacgactcctgcgaggaggaagcggagccgccggtgccggagtcgggggagtccgggccgagcacggcggcgaggaggcggccggcgccgcataccaggccggagaaccaccctccgggccgctccgctggcggcggcggtgacggtggatcatcgcctgcggcggcggttgccatggatggggaagtggagaattggagggaaggggattgagaggaattttttttggttttggaatttgtgggcagttgcgctcagttactgcgaatattaaaatgaagtgatttttcgaaaaaaaaaatcccggatttttcgccacggtgaattttcagctttttttctgttttatttgctcgcttcgtgaacagcaaattccagaggcttattgaaagcccgtttgaaaagctttagagcatcaccaagagaatcccaatatttcattctcaaaactattctcaaaactatttttataggaattctaaacaaaatttgatgtgctaaaatattgatccctccaagagattgtctgaaattgacttcctaaaactaaaaggtgggccctctacaaaaccactaactgaaatttatttccgtctctccctatgtgagatcactctcgcgaactcctaatcgcggcctcgacaacagcacatcaatagcagcaccagctgcaaaatttaggaaaaacagtagagaacaatagcacgagaaccagcaagcagcaacagataccttaatcttcagcaagtgcaacaaaggtaatctgtaaaaagaatcacaagtgactgaccgattgaaactccttggtaaataaaaaacatggcacaagtttgagcaatggtgcaagagcagagattgggatcattcacttgcatcgctgaatgaatcaccaacggtaaactgcttcgacggatgaactcatcttcatgagagaccaatcccagcaaaaggaatgagcaactccggccgagtcatgatgatgggagccgatgcaggcgggctaatttgcgtcgtatcgaggcggtggctcaaatggaggcagcgatggtggttgggggatagacgaggaagttcaccggctgcagtgcagatggggccgctgccgctgccaaagcacaagctgccaacaccggaaaagctttggggagcggcgtatgatttctagccggccgcggcccgcgggtgagatggggctgcctgcaggacaccacgatgaggcgacgaatgacctcgcggcgaaccccaggtgagaaaatttcatgtggcgcgggaattcgctcgggagagggagattgggagctagcgcctctccccacttgtggagaacgaagaatccgggcttgggaattccaaccagtgggagcttggctagggattctgttggactgggtttttgaacgaaaatccccaaatttcaggattgagaaaataactacaacttcttaaatcaaaacttctcccaaacaattcaaattttttttagattctgcaaagttatagttatcagttatggaactcaaaagcgaactacgaagtactccctccttccaaactacgaagtactccctccttccatgaatttgaatttttttagattctgcaaagttatatagattctgcaaagttatagttatcagttatagaactcaaaagcgaactacgaagtactccctccttccatgaactaacgtcataataggaggagggagtattagttgttgaattcagaaagcaaattaaaaattaaaaattggtttttccagccgtttctcggaatctaaatctcctaaacaccctgagtcagtcacgtttcaaactcgttcaaagcggaaaagtaatacaacgcttatgtatttcatatttgagcaagtcgagaacagattgttttgctttgatccatggaagttgtcgtaagtttgaaacgaaacgtagaattcaaattgcctttgatgttatcgaaccatgaaacacaaaactgatagcttatctaatttggctaatcatgacaggcaaatggtattttcttacgaaatatgatctcacacattccgagcaacgacagtttcaacgcataacattaccatatcatggcatagttaaagatccaggtcaatctgcatcagttgtacatgacacttaattgttcatgtcagcagcatattacaataatcaatctggacatggcccgggctatctcattccgcatcctctatctcggtatcctctggaacgcctcggagatacaaaacgttgttgcacctgtacagttcacaaatgaaacaaataagaattatacatcagacaattgaatatgttttgtgggcaaccacaatgttgaacaaaagcaggtaacaagcaattaatataggcttataaccaggtaagaagcattgtgggtagagacaataactactaccgggccattgtgctactgccggtaacaagagaataaagaacaatattttctgtagatatgggaatctttttgtacgagcatggctataggagatagttttacaatgattctttttaaggtggaccccaccttaatttgcagaataggcatagcacattgtgagctttgtaataactgttaccacctgaaccccaggcccacgttattatccactttggtagtatacattgcggttgctctttaacgatttagtcagcaaaagacttcccaagttataagcgctgctacttgttatacttctgcatttgagtaaattccatatactctgaactctatcattctatctctccacattttaccatactatcattctatctcttaatattaccagtcagactgaaaacagggtaatagcatgcaagtaaccaacagatcacctatgagtacataagtaccagcggtaagccaataactacagatgaatctggtccaggactgaagggcgatatatagagttaccttatcagtatctcacccaagtttccagagaaatgcccatcaatatactcctctgtattagccagctgaaagcagtagacaattaggtaaattgcagcaaaagaagatgacacgtcgatccatattggtaaatgaacgaatttaactgatacaaaatacaaaataatacctgcagattcatataagagtcgacagaaacaagatatcctgaaaggggggtacaaaaagagtatcgtcagcataatcgataataaggcacagtctgaaaactaaattacaacaagaggacccattttaacacatgatttccattgaagttccattgtaaaaccaatgaaagtggatgttcttgataagtgccatgaagtaattgtccatggaagcaagaaatttcatgtaaaaactggacaaatttcaatgttcctgaaacctcagagatttcattctgaaatttcaatcactagcctaagcatatcagtgaataaaatgtgacgggtaaaagtatagattacctttgtattccataccccacttaagtttgacaatgacaggcttccctgtcaggttgttcaagaaaggcttcgggttaactggcacagtctgcatttagaaacaatccattaatagtatataaaagagtatagacaagatgtatatggaggcaccacttggaactgaataccatgaataatcatcatgaagaaaatcagaagaaaacaaatactagtcaggtcagtacaatgtctgtaacaaatcaagtttgttttgcaattatctgcagcaatagaacaccaaactgatgtgttgaagccctaattagcgcaagacgctgggtgctactccctactcagccgacagaccagcagctacataccgtaactgattacgcaggcctaacaagagacaggcagaagccaatccaggacagaccggctaggggcaacgcatgacatttagaccactgggtcattgtctttgttttccccactcaaagagggatacaatagttcctcaatgctcttctgaagctccaattcaagtaaagcatagtccacatagagaaccttgatgtgaacagctgagttgtcaagtttcaaatattttttacaagattaagctgaagatgccctttcctcttcagcccatactgatgtaccagtcagaatagtgagcaaggaatgggaacacttcttgttcttgcatcttgagcagcatggcagattcaagtgtgtgcttcccattcaaactcttcttttactctgaaatattgaatttcattttatcacaatccatggatttttctgatgttcaattcgatttttggcagttgtgctagtgatatgcgtaaaggaatcacagtttctgatctgaacatctcagaaaattaatggagttgtactccctccgtactcataaaggaagtcgtttaggacaatgtttaagtcaaactttgggaatataaatcatgaataactctcaagttgttgagtttgaaaatataaaaattatatgtatagatttgtcttgaaaaatactttcgtaaaagtatacatatatcacttttcaataaatatttttatagaaacaagaagtcaaagttgtgttttggagaccgtgtcgctgtcttaaatgacttcctttacgagtatggagggagtatgtatctttgttaaatttctggattgaaatttctattttctggttttaattcaatctggcacgctttctgtttctgttctgaattattcagctatcaatctgtcaatttctattatcaacttgtcagtctgaatttctgtgtgatgcttagtgtgcactttgcatgcgctgcagcctgaactagtgcacagtcctgcagaacctaatggggccagccagttccactgcaagagggacgggccaatttttctccctggtttccaagtggttcccatctaaattggggcagagggtataggtgacgggttggcccatcccgtcccgttttcggactgatctaccatgacttgaggataactagggaggttcgtgtgccgcataaaaaaagaaaatcagagcacatcttccaaccaaacaaacagctctacatccatcgttctttcaacctgaaagctaagcaagggtccaaacttacactcctgcgccataaaagataaccataactcaaaccacatcttcgaaacaagcagctctaggggtttcaaaaagaaaaagaagaagaagaagaagaagaagaagaagaagaaacaagcagctctacaaccccaaaacgaacttttgggggattttctaaatacttcaatttttccctcaccacaattcgacatgaaacctatcccaaatcacacatccgacctatctatcctggaggtcatagacctagaacagttaagccctccaatctatatccacctactccgaatcgagcacacgaagctacggctacgagactaccacaacagttggcaccaaatcacgcgacaaaaaaaaacattcgaagcgtaaacagatccactacacgagataaacaatttcgcggagtaatatcgagggagaaagagagagagagagagatgagggcaataccgccattgaaggggggtagccgccgccgccgccggtgccggtgctggtcggggatgcgtaggggggaaggcgacgaggcggcctagctagggttttgaggtggggaactccgataccaccgcctgaactaaaagtcgctcgatgggccacagcccatttatcggtttgagcggttcgaataaatccatttatgtccttcgtctttccgtcgagttttactcatgtcactgctctcttcgttccatattactccctccgtatttctctcttcgttccatattactccctccatattttaatgtataacaccgttaattttttgataaagtttaaccattcgttttgttcaaaatttttgtgcaaatatgaaaatatttataaagaacatttgatgataaatcaagtcacaataaaataaataataattacataatttttttaataaaacgaatggtcaaactttagaaaaaatcaacggtaccatacattaaaatatgaaggtagtataatttaaacatgtgatagtggtaggtagatagtcaaaatacgactatctttaaacgggagtatatcttacggcagtatgtcggagagccgtttgcattgccataggacctaatttaacttggttttataagttgaggtccagatttttggtattacggttaagatatattaaacttgacaaaaatatgagggacgtcaagtggaattatttctaagcggtttaaatttggggtcgtgcactctttccttttaaggaccatatttaaaaatgttatgtatataaataatccaaattttctctttttattaacatagtacatatgcagacgtttatataaacatgcgtacacacttacttgcttatcattgaaataataattagccatgaatgtgagtcctatgtaaagtctatgactctaaaacaagcgggcatgttccaccaccagaaacctaaccagtcgagttacgctcgcttcgtaattcaaatttgtttttatttaccataatttatataatgtgttgtcctgttgcagttaaatatagtgtaaacacaatgtaaagaagaaaaatgcagtcccttgtttatttttatttgcaaaataccgttatctataacaagaggggcaaattgatttttaccatttcattcaaagtttgaccttaagcattgactacatgaacctgaaaaaaatattcccgatactaaattctcaatgcacccacatatatcaatagtttacagaagcacttttcaatatttgtttggttctaacacttcttacgtcaaggttggttgcccaaaaaagaagtcataatgtgtaaacacacatgtttatataataatcaattagtttgttggttctaagacgtcctaactcctactcctagctggtcagggttggttgtcctgaagaaaaaagaagcgcacatatatgtaaataattgcatatacatgtacaataataaccgttaagtatatagatatacatgtgttcacaaaatcacagactcacaggcatgtgtttggctagccgtctgaatcaactccatgaaattcggatagccaacgttttgcatcagtactaacttctgccgaactcgtaaacaaaacctaaggccattagccagtaattgttggtgacagaaaacattagccccaaatactgttaaacttctttaaataagaattgttaaatttcataatgaggctttccacgacttgatgtttagctacatttatcacccagttcaattaaattaataaaaccgcaactgtgtagtcacgtagatgacgatttgcagacagagatggcgatgcatgatttcagagctggtcggatgagcaactgaagtgacatagaagtagcagctaacatatatatactccatctatccaaccaatctcgtactagattataacacatcttattactatgaatttagatatccaaattcatcgttttactatgtaacacatcctactatgagattaatttattttatgagattaatttatctttatgtatgctagttctgaagacaatatgtagttaacatgcctaatatgttttggttgcgcactttgttaactagcccccattttttaaaaaaaaagaaaaagaagaagaaaaagctatatatctagagaattttgtatatactatgtgaaataatattatagagctttttgaaacaagggattgtttcatactcattcctttaaattttctatgaaataaaccagtctaagcaattttggggggaaataagcatgagatttcacctcatggtttttcctctttcacgtgttttttctgcgttctaatcgaacgatggttttgtaatttccctatgttgcaaaattcacgaaagttatgttgtgaaattccgtaaaaatccaatgagtatgatagtctatttatacgtttttcttattctaatgtgttttctcagtcctgcgttttaaagggttcttagcccgtgcgaagatggaaacagggaaaaaggttatgtcatatatactccctttatcccattgtaaatgcaaccataaattttcatgtctaattttgatcatccgttttatttaatttttttatgattagtatttttaatgttattagattataaaatatgaatattattttatgtgtgacttatgttttttattatttttttaaaatttttttaaataagacatacgattaaatttggatacggaaacatatggctgcgtttaaaacgagacagatggagtatttgggtaggggattgcatcgaacctcaaaattgactagctagtctattatatttacttgatgaacctagtaggtgtgtaattaagaagatcataggataccggaggttatttatggcgacatgcttgtgatccaccttgatatatatcgttgttaaacaataatgaacaaatgcaattaatggttcagatcgatgaaagtgcttaattaggcttatacgtactaactaaaaagaaggacacgaacagcgttattcatctctgtgttacatatccaaccattttatacttgttagtagtggaggcttacgagtacggatgaacatgaaccggacggataatccatcagaacatatatacacatgtgacaacgttttttcttctcctagaaaagtcaagcatttactccccagctaatcctatgattaagtagtaatacaactccaacgtgttaggtgattcgtttttatttttatttttttggcgcgagtgttaggtgacttgttcgtgcgaatgagacatgcattgcatatacacatgtttttgtttgtttaatttgctccagggactccaggctagccgatcgaagccacttctggtgtctagattagctagtgcctaaaagctggagaacctaatttcagcatcgatcgtctccgccggctaacaaagattccttgtctcatgttgcaatagctagctcacgtaggacatgcaaaaacttaatttacagtatgctttgaaagtataattgcatgaaaacctattagtataaacggctaccggcctgtcattcggcattttttttaagctatagtcgtcatttttatgaccgttggatatgtgttaagattcgtgctggttattggatgcatgataaaattcgtgttagacggccggtaaaaaagatcagcacatgtggtgagttacatttgatatatttttaagggattttcagtcagtcccatgatgtataaaacataccttaatcttaaaaaaaaaattggactaacatatttttgatattgacgaaaacatccgttcaacatatgactatcaacggatatatcatttatatatataactgacaaaacaaaaaacaattagccgtaaatataagtacatgtgttaacttgaatccatatgaactgatcacaccacatcagttgagctacgcttattttgtgtctttcaaaacacatcgtacatttgggctgtgtacatccattatggatgtagaggccggattttaatctattttctaaagaaaaaaacacacatcgtacacacgttccaatcggacactgccaaacgtcttcttcacacactcaagtcatcttatctcctcccggcttccatttttctctacacagaaggttaggtatatctagctaattatcagtactatatatacacacacccaaatccaaaattccaagtgcttaccttagcttagatgcgaccgagcgaccgaccgggtgtagccgcgccgcaacggagttaacattccacccggccgcggtgtaccgtgcaccggtgtacgtacgtggccgccgtgatctacagactacgcgacggtgggccccacccccaacaaccgcggctcgcgcgcgccctctcgttcgcgcgcgccgccacacggatgcctttttttcctctccttttttttctttttgcttggaccataccgaccgagcgagtggacactggccggccgacccgatccgtcctccgccactatacgtgctactgctacctttctgccttttctaccgtgctactggcgcggtgtgactgacgtcacggtgacgtcagccggtaggttcgtttctccgtcgccggggcgtggtaggtgaggccgggccggttggacgtcggagcgggtctccggtccggtccggtctagcccgtggaagcaaacaattgaagaagaattccttttgactctcttttaattaaactattatctctgattgttgttttgatcattcttttttcttttttaccccttccatagatgctacactgcataagtccaagcttagtgaggtgtggtgaccatcgctaagctgatcggaaccgtatttttttttttttggggttggtggtgttgttagattataatccgatttaggctatgttcgctccagcgtgttccgaaaaacagaacgatccattagcatataattaattaagtattagctaattattttttaaacatgatcaatatgatttttttaatcaactttcgtacaaaaacttcttaaaaaaacgcaccgtttagccgtttaaaaagcgtgcgcgcggaaaacattgaagatgagttgagatacctagggtaagaacacggccttagtattggatgtttccttcccttatatagtttcttacgtagtgtccgtttcctgtccgtttcgtaaatattttttttatatctaccaatggtagtgtccgttttgtaaatattttttttataattaccaatggtctttgagaaactctaatatatttcacaaaagatatacctatgtacaaattttctctgaatcgtttctcgttagttttatactccctctaattcatattataagtcgtttgactattttcctgattaaattttattagatttgatcaagtttacagaaatatttagcaacatctaaaatatcacattattatttttattaaatctcacataatatgtttattttgtcttgaaagtactattattttttctataaacaacttataaaaggaaacagagggagtagtaactgtttttgttgttatcgtcaaacttaaatttatttggtattaacacatgcaatgagggaaaaatgtcttattctaaattgggaaaaaaacaattatagccaaaagcttgaggataaagacactccctcatacacgatgtgtcataggtaaacaacaaatatatgaaaccgtcaattctttaggataaaaaatcatactcttgtaaaccaattctaaaaattcagcttgccacatatacacacaaaatgacatacaaaaccaaaatgtcacatcacatatatagaaaacaaatacctaaaaacttggatattccaaccacaccaaacttcttcgccaacagcttccatattttagacatgacatatatgccgtgcaaacgaaaaagatttactctacagcaggcaaggagaaaaggggagatacacgagataaaagtcagtggcctgagagagtgaaaggctgaaactcgagcacaacccaacactgccagcagaaaaaactgaaaaaaccagaaaagccaatggtcaccaaccccaacaaaaaagcgagcgaccaatgcgatgggggttccgtaaaatcccatccccttcccaccctacccaaacacccgctggtataatggggttggtaaacgacgttgacgtggcacccctgccccagtcaacgaaccccccctccctctcaccaacccaatgctcctctcgcttacaggtgggtcccacacgtcatcctctccgggccccgctcaccaactccccccaactcccttctccctcccgctcccgccagtatttaacccctcccaccttccattcctcccctctccaggagacctcgccgccgatcgatcaatcgccgccgccgtctcctcgtgtaaccctagcttagtggattagtttaagtgtttgccggagattatggggtcggtggcggcggaggaggtggtggtgttccggtcgaagctgccggacatcgagatcgacaacagcatgacgctgcaggagtactgcttcgcgaggatggcggaggtcggggcgcggccgtgcctgatcgacgggcagaccggggagtcgtacacgtacgcggaggtggagtccgcgtcgcggcgcgccgcggcggggctccggcggatgggggtgggcaagggcgacgtggtgatgagcctcctccgcaactgccccgagttcgccttctccttcctcggcgcggccaggctgggcgccgccaccacgacggcgaacccgttctacacgccgcacgaggtccaccgccaggcggaggccgcgggcgccagggtgatcgtcaccgaggcgtgcgccgtcgagaaggtgcgggagttcgccgcggagaggggcgtccccgtggtcaccgtggacggcgcgttcgacggctgcgtggagttccgcgaggtgctcgccgcggaggagctcgacgccgacgccgacgtccaccccgacgacgtcgtcgccctccctactcctccggcaccaccggcctccccaagggcgtcatgctcacccaccgcagcctcatcaccagcgtcgcccagca

SEQ ID NO: 3549 - DNA, 1249 bp, Oryza sativa
acttttcgaccaacgtttgaccattcgttttatttaaaatttttatcatgcttaaagaacatttgatgataaatcaagtcacattaaaataaatgataattacataaattttttaaataagacgaatgatcaaacgttggtcgaaaagttaacggtgtcatatattaaaatatggagggagtattatatatcttggaggcttaagaacggtcatatataccaccacccatgcgggggagctaattgtactcgatccatcggctaattgataagaaaacaaaatcaggtaattaactaagtgtaaaacaaaataatacctagctatacactcagctgaacccaggccacaaaggcaggcagaagttctccctggaatgcatatgtctctcctcctgtatatatcgatcgtgtcctcccttcgtcttatattacccttcgtctcataatataagaaattttgagtttttatttacactttttatcactcgtttaattcaaaaaattttaaaataattatttattttttttgacttgatttattatccaaagtactttaagcataacttttcgttttttatatttgtataaattttttttgataagacgagtgctaaaacggtgtaagcaaaaacttaaaatccggaacggagggagtacgttctagctaattaagctactctcactatcacacatcacggaagaataatccatatatccctctgaaaaaaactggctgcaggatcgatcgattagaggacaaaaaggccagccacctcggtctgggtgctcacgcttttcccgatcgatcagtactacgtgaattgaatgtgcattacctagctatactgcgtacagtactttctctgttgcccagtgtgcacactactatactgtttggacacacgcacacactgatcagacagtgtggccatggctagctgcataaacctctacttgagcaatactacctgtgtactcctcagataacgtttaggaatcttccaactaactttacaaggtggtgggctagatgatctggattcaaagtctcaccctttctaattatttgatattaaatcattccttaatattcgtgtcttttacttgtgtgctgctcgctccgtcctataaaataaaataaattttagaaaaaaatatcctaaaatataagggattttagaattccaagacaatattatattcttcaccggcctatcaaccttattcatcacctactaaacttttctac

SEQ ID NO: 3550 - DNA, 12380 bp, Oryza sativa
acttatatattggccgaagttatgttgttttggtatgtatcctggtcaggttttgtgactatttacttttctttcattgtagaaatcttagcaacaacaatattggtggaactataccagaagatctacctgttacactgcagcatttgtatgtgctattcttcctcttctggaatttttttagctcttgtgattgagtgatgagatgccttatgttccttgctggtgcagttttatgtctgataaccagctcactggaagcattcggacgtcactatcaatgcttcagagtttaacagacatgtatgactattgtcctatttctgttcctaagcagagaggttgctgtactattttttttctgatctgtctttttgtaggtctctaaatgataatcatctcgacgggaaactgccagatgcttttggttcccttactggccttgtaaatttgtaagatacctcattttcctctccttttcattttgcttattcttactcttcatgtgcacttgctcatgcacctgagagtatatcatatcttcattttccccaagacccgagagggttggcaggcaaggggtgaactgttaactcgttcataacatctagcatttgaccacagtgatatttcatccaataacttcagtggttcattaccaccttctctgggaagcctgtcatcattgactacattgtaagtctacaagtattttcttatatagttttttccctatcatttttacttattttcatgccttgttattttacaggcacatgcaagacaacaaactatccggaacccttgatgtcttgcaggatctccccctcaaagatttgtattcccacactctctattgtgtcatcatattactgattcacttttattagtacaccattatgtataaattggacaatcagcaattgtattctcagttatgtgttgatttataaaattgatctgcttaacagacattttcttctggtctactttagagatgtcatagtataaattatgattatcctgcactttgtcattattttgaagtaacatgcaacaatatgttagcagacacaaagttctctattattcaacagtcacattgaatttgataaggttgtagaaacttgacatcctttcacaaagtacatggcagtcatacatttgtttgcagaagtataatgtaccatgtagtcatgaccagaaccgggacttttaggttttaacaaagctgtactagttagaaaaaagaacaggtgatgtaagtgatttagcttttatcttatcatagacattcacaagtcaaacagtaatttaaatccaatttgttatgtatgtctaatccagatcatcctttttcttagaatgctgttatgcatacaaatatgaaatatctacacttgtttctgataatatatttacctgaaacagaaatatagagaataatttgttttctggaccggttcctccaaagttgctgaatgtgccaaacttcaagtgagaatcctttttcttacatatttcaaatttattgatgcaattcacatagtacttggtattcctacataaaaattctctctactatatacttttgccatatgtaattatatgtaaggtaacttattgagtaattcattgtttttgtctacagaaaggatgggaacccatttaataccagcatagctccttctgcatcaccctcttcaacacctacaggctctacaccaacacaaacaccatcgtcaccttcatcttctggaactccttcgccatctagttcgccctctaattcttctggtggatctactgctcgagacagcagctctccatcatctaggaaacataagtcttcaaccctcaggattgttggatatgttcttctagctattgtcctgtttatagttacagtgctgctggtaatattttgcctgtccaagtaccaagagagacagtcaagacgtgattatacaacaagtcaggtggggagggttcatcagagggttgaagagcggaaagttaagcaagcttcagtgcagtcaaggaatgatgccaaaaaaggtcaacaattaatttatatattctgtaatatatttctgattatattttatttgttttatatcacagcatattgatgttctattaacaggatcaacagaggttcctgaacggaggcaggttcgtgaaataaatttggcggtaccaggtatagatgcttgtaaatctgatctatcaggtcttttagtactgtaatactattcacatttttaagttcagatgtataaaataactattcaattgctggcagctgctctcgagaagcctcctgaaaagagaaaagaacatgtaattaacttgcagcgatcagaaacagaaatttttgcttctacacctccgccgccgccgcctccaccaccaccacctcctcctcctcctccgacaccaccaccgccaccgccgcggccgccgccgccgccgccaccaccaccacctgttgaaaaagtgattgtaaatcccattgttaagccagagaaaagagttagtactccacctaggacaggtccctcgacatctgcaacatccttttctgttgcatcacttcagcaatatacaaatagttttgaagagggaaatttgataagagagagtaggttgggaaaagtatatctggcagaacttcctgaaggcagggtatgtttacaaaatactgcttcatttaaatggaattttatgattattgaaatgctatactaatcttcctttatcctatgcagtccttggaagttatgaagattgataacccccatgatagaatacccgtagatgaatttctagaactggttgcaagtgtatcagatattaggcatcccaacatcctcgagcttgttggatactgtgcagaatatggtccgaggttactggtttataatcatttcagtagaaaaacactgcatgatgtactacatgaagggaaggaattggatggtgcactatcatggaatgctggcctccaagttgctcttggtgcagcaaaggccttagagtaagttaccaagctgtatcggggttcaatataattaccatgaacttgtgcttatttaatttagtttttcatggggtagctttggtacttatattcttctttcagctatctacatgagagctgtgaacctccagtagtgcaccagaattttgagccagccaatgtgctccttggtaatggattctcagtaggtgtcgctgaatgtggacgggcagaattgacgctgtcaggttctgttacacaggtaacatctagggttgtacaccaacctggtggttgtgatacttgggcttttccgtcgcaagcagttctgatacatttcctaaaattcctgaagtccaattaagaagagtaaatttcagaaaactacatatactttgatcaaactatcacaaaactatagatttaaggcggtgcatcacaaaactacagatttaggaccgaatttatcaaagaactagagatttaagatggaagaccaccaaactacatatttagtaataaaatatcacaaactacatgttttgtagcaagttaagtactacctccgtttcaggttataagactttttagcattacccatattcatatagatgttaatgaatctaggcacacatatatgtctagattcattaacatatatatgaatgtgggcaatgttagaaagtcttataatatgaaacggaggaagtacaaaactataacatttataactcttaacatgatagtagtggtagggatttaaattgtaaaatatgtagtttcgtgataactctagtattaaagctgtagttttgtgatatttggccttaaatctgtagttttgtgataaaccgtgtgttaaatacttaaatctgtagttttgtgatacaacaccttaaatatgtagttttgtgataatttaattaaagtacctgactatctgtagtgttgtgaatactactctttataatttgactgcatacgagtaacaatccagtattcaagcacctaagcagctctcagggcatgacagctactaggtccagtgctacaacttccttccaaactagagcagccttatccacatatttactatcgcaggaaagactattgaaagaagggggttaaaattttatttatcttaagttttagattagttatgttgggccttccagctaccagcctaccatgcacatccaccacagcagtagaactcgcctcaggcctgaaattgatggttgttccctcgatttgttcataaggtgttgtcttttggttaggattattttcagttaagaagcttttagctgatgtttttaggagctggttcatttaagggctttaacaaatatcagttaagcaagcaaagaaacaagcaagttcgttcacatctctggtctggttgccccattgcatctcctaatgaagccattgctgcaaggatgtcctctctgtggttttaacttagaatggtgttcttttattccagttgtcaggtcgcatgagggcactgctgaattatgaagctcctgaaatccatgaagctgggacttttacctaccgaagtgatgtttacagttttggcgtggtaatgctagaacttctcactggccgtaaaccatatgacaggtcagtgattcaccgtaatatgcatttcttaattttagtttcataattgtgttagatcaattgtctccaaatgttgtctgaactttctagtttgcttgcttattttccgttacaatatgcagttctggtcctcgtgctgaacaacatcttgttagatgggctgattctcaatttcatgacattgagtccatatcaaagatggttgatccttctattcaaggagagtgttctgagaaagtactgtcacgttttgcagacatcatcagccgttgtattcgggtaatcaaatacttccattatcttttgagctaaactgtagtttctagtttctagcataatataagatagtacatgtgtcacttccttaagcatctctatcaggattttatgccagaattttctatagagagctgtttaattaggctaaaagcatcaactatctaaatttcctattagcccattgcataattttacttcattattgaggtcaaatgcattctgcaattttatatccaagttattatatcacaaattaatttgtttagtcattttgatacttaaatcacattcaggtaatatacttgtttatctgttcactatgctctgctctgcttgtgttgtttttcttttctgagaacagccatatgagatggatttaaaaatcatgtgattgatgaatgatctgaaatttcttatgcagccggaaccagaattcagaccatcaatgtcagagattgtccaagacctagctaggattataagtgttaccagtgaggaatcagagtaacgaagagatcaaggtggggccgtacatctaggaagccagctctcgcagctatcaaaaatattcagaggaaacacaatcatttctgtggagcatcctttcagtatttataatggacagcattgtcctttagtgtacatgttgattctggagccgcatttacctgttgaaaggtggtagtggtacagccaggggaacatgggccttctcattatgggccaagtagattcctgtacttcctagacattatcaaattgcatgtatatcttataatccattctaattttgattattttattacattaaaattagcgatgttcatatggtgttagcatatctgattgctgtatctctctcaaagctcgttcagaaatcgtttattttgtttgattaactccatgtggtttttgtgattttagaaagtatactggtgtagaggtgttgttcagaggcggatgaaccctctcgacattcatatgctttcttctgtgaaactggacatgcacattctcctcctgcagggaaaaggatctcatttaggtatgtctcatgtgttcgatttactcatattttctattgtctttcctttataatactttctatcattgcccacattcatatatatgttaataaatctatatgtatgtgtgtgtctagattcattagcatctatatgaatgtaagtaatgctagaaagtcttataagctgaaacggaggtagtattaccatatagtatttgaatggattatgggtttatggttttggttacccttaagtggtgagtgctagtaatagagacaaacgggtggaaatatattgcttaaaagatactccctccgtcccattttaagtgtagccatgattttccgtgcccaactttaatcgtccgtcttatttgattttttttttgaaaaatttaaaagcataagttacgcataaagtactattcatgttttatcatctcataacaagaaaaatactaattataaaaaaagttcaaataagacggatgatcaaagttgggcacgaaaacttatagttgcacttaaaatgggatggagggagtagatggtaaacagcagctgattactaccttgtctgttctgtgactggcagtctgtagtaacattaaatttgcttttgtagtgttagattagcactctatgcggaataatttggttatacaagagaaacagtactgtaggatgttttgcatgctgaaatttgctcttctttcaaagctagtactgatagctccaaccatctactatttcacttgcttccgtatgtgcttgagttagaaacgttttgtatcctttttcaccttttggaacagagaaaactttactgtgtcaacactggaagcatagatcccacctatgcttttggataacttcttgccgactaaaaaaaaatatttgccttttttttctagagtataacatgatcatctgctttgattggagtaatgcgctcctatactttgttgctttcacctacttttctgggatgcctactgttttgaaggggaaaaaaatctagataagtagatgcactcatcaaatcattaaaacctctacttatttagaaccataggaattgcaatttgcagaactccccatttaggacagtgacacgtacacaggtgcccggccacaagaaggttagttgccttgcacaggcacattgagctagggaacctgcacctggtttcagaaagcagttttgccgtgccatattgccatgtgggtggtgccaagttgcacagtaccgatattatgaggctggcaagagttgccgtagcagggggctctctcctctgccaagtgccttagcccctctcgctttctcccccacaaatgtcactcggataaacgagtgtctattaccattgccaaggcctcaatcttgtagtggtccatctgtgtaaggatggttatataggttagctggtccacatcaatggatcaaccgcactgtcctgtggttgccgttgatatgatgatccatggtacattgaacttttatttcatcgatgattttttattttctttcagctgtgaagactccatagtttatatagttattaccaaatatcagtgagatcaactgcattcctgaccgatgaaatgcagatcagatgtgcaggtttcatgaatggttttgggtctccccggttttcttttcttaacctgaacagaattagaattgtagtggttcatattagctctcatctcactgtcacactcatgcatatctttgccttgccaattgcagttggttgctgaatagtgggatctttactgatcctgcagaatcatggcgggcagatcatgcgtgacatcgcaggaagcaactcccaagttataacgggttgaatttgaaccaaacgtgtactctctttggcctgaaagcaacatggaagtaaccgaatgtactatgcgagtgagcttcaagtcgcagcggcacaagtggcgcatccctggttttgccatgctacagacacgcgtgcggttttctcatcgcacgcgtgacttcatcgtgcatgaatctcgtcgagacttgtcgttgttggcttgttgctggaggaaggtgacccgatgcatcgaaccggaaggacggatggatggcatctcccgtttttgtggctggtctcggttttccgggtcgtgtgggcccgtcctatcagaacagccgggtttggcattttgcagagcttctcttgctacctccgtcctaaaataagcgcaactatgagtttttgcgtccaactttaatcgaccgttttatttgaaattttttttataattagcatttttgttgctgagataataaaacataaaaattactttactcttgacttatgtttttaatttttttttaaaaaaaattcaaacaagacgaacggttaaagttgggtgcggaaaatcggttaaagttgggtgcggaaaatcatgtatgcacacggagggagtacgtttttgaccgcacgtcttcgttttgactgccgggtgccggcacgctagaaatacgctaggtggcatgtattcatcgcaattcgcaaaggtgaaagaagaaaagaagcatgccaatttgtagaattttaacaaaaaaatgagcggttattggagcgaacaatgaaaacttcaagggaattcggaggagcatgatgcctaccggaaaatcttgagaaaaattcacatccagatccagtgaaagcggatgtttccttctggtgttccttctagagaaaattccgcgtgcactaatcgaagccttaaagaaaccaccaacatgtgaaccatacgcctatctgatgtgtttatgatcgaccggaagaccgaagatggggttttctcaagcgattaataccaaaagtatccatcaattcatgtagctagttgttgatgaaatcattatcaggcctatggcaccacgattaaattgccaagaacttggtggtggagaagctaagcacggttgtccgatccagcttacggaagtgaacctttttgggtcggatccaagctctagccaaggtgttctccaaaaaaaaaaaaaactgaactgtacacaaaaaaattgagaacctttttggtttgagcagttgtttataaactgtagtaaattctaaattgtactagaacttacttttagaattgtttgttttctgcatttagctttggcactcggatcgcgagtacaagagtaagcaattgcaacataattttttttaggggcaattgtaaatttaccactagtttgaatcgttattgcaagaatgtcactaaaaaattataaaaataccaccagaactatcgttcaagtggcatactggcatatttcaaattaaaaaaaccaacggcaaatttgtaaatcttacataagtcaaaacaaacttagggcgataggagtgaaggtattgcacttgttgggcctcggttgccacctaggcccaagcccctctaaggatacacactcattgtatttgtagtgggtcccaccaataactcctctcccacttttcatccccctctctcctctctgtctttctccatcggcggaggaagctgaggtgctgggcgaagaaagcgaggtgtcgggcggagtgaccagatctagccaagcatagaagaagggaacaatgtgcttgggggcggatttggcgaccgtgccgagcagagcgatgacggcgccgggtggagcactacctctccttgtcggggtggccgccgcgggagatgacggtgctgctatgctcgccgaatccgacttggggctcatcggatccggccttgggtagcgtcagctgctcataggatccgacaccaccttaccccctttcctctcgacgcgacgttcgacaccacctcaagggacaacgaggacaagaatggcagtgatgctactcacccccctcccccctcatcccttctctttcgcggccacagtgtcaccctctttccttggctgacaagcccatcggcgtgaagcacgggtatgatgacgagggcctctcctcctgccagtcctctctatcccttccctagtgatatgggacagagagtatgagcctatatttgtaaattatgacgaggaacctgtagcttaatttggctcccggttctttgtgggggcaacaaaatagaccagataacatggagccgaatatctgagatagtcggttcgtgctaaataataactccgtgcaccgtgaaagccttcgtaacgagggagtaaagaaaaacgctaattcctttcagaagaagcgatcatcatagctccagcgtgatgacagaaacagaattcgccaaaaatgatagaagtatccgctgaatggtggtgggaggctgggagcaggtgcagatgcatcgcagcctctcttatctcggtcccaagaacacgtacagtacccaccaccgcaccgccttcctgaacgggacatatgtacggccaggggcaggtggcctactctactcgcctaggcatagggtggggactgactcccatccgacgcgcctgcaggccgtggaactggcgacagcaaagccggcctccacctggcgaaccccatccatccatccatctgctccgtctcgccctcgtcggatcgatcgagtgactgatacgcaaggctgcacgtaagtaccatactactgctgttctcaaaaaaaagtatatactactgctgcatccgttccaaaatataacaacttttagtctttaggatttatcccataatacttcctccgtttcacaatataagtcattctaatatttcttagacatataacatcaatataaatgtggaaaatactaaaatgacttacattgtgaaacgaggggagtaacttctccaccagcattctctttccaaccaatcacaaccctatgtcattcacttttcccaactatctccattactcatccaatcacaacccttcaccattcagggcctctttgaatcataggaatgaaaaaacagaggaataggaaaaacataggattctgataggaatgcaagtgtaaaacagatgattgcaaaacacaggaaaaacataggaatgactgtttaattgggccacaggaaaaatacaggaatttgaggagagataaagactcaaaggattcttttcatgaggttctacctcatgttaaatttcctccaaaacttacatgggaagagtcatttcataggaatttcataggatttcataggatccattcctttgattcaaagggctatataagaaaaattactataggaatgaaattctctaaaatacctatgaatttcctttgaatcaatggggccctcacttttacctattttcttaataacagtgtccaactctaaaacttcttatatcctgggacggagggagtacgatggatgaatggacggacggacggatcggggtcggtttgcgtgacgtgctcgatcgggtagggagccagatactcactctgttgcataaaaaaccaaacctaataccgaatataacatattatatattgtaactccagtaatgctttaaaccaataatatcgaaatatgacacattctagtattatcaatctttatatatagaaacatactctctctataaaaaaacgagtctagtcctggatgtgacatattcttatacagcgaatctagtactggatgtgacatattttagctggtcatttattagtactaggatgtgtcacatccaatactatattggttttttataagatgaaggaagtatctagattcgtagtactaaaatatatgttatattcggttctagattagttttttacgggacctagggctacaaagccaccagctgctgctgtgttcgacacggtgagtgtgtgcgtgcggttgcggccgtccatacacagtcgaccgaaccgaccggggacgtgcgcgttttttttttcccttctttctgttgttggatgagatagctgcacgtacgcagcagcagcagctactaccgtggatgcgatcggagccagggttaaaaaacgactaaccaaaatcggactttctttttactagtattagcaaatgggattttaataacaaaaagaggcaacaaactaatttatgtctggtacggtgacaatcatccatcaagttactcctactatacttttccccgcttatatactccttccattccaaaatataataaattagaagtagatgagacatatcatagtattattgacggagcgtggggctcctcaccgggagaccgcgcaggcccccctttgccggttcggccgggggccctaggtgagattctaagctcctagtctgtgtgtggaaggttcgcgagaatggaaaaaacacaagacacgggcgatgtatacaggttcgggccgctgagaagcgtaataccctactcctgtgttttggtggatctgtgtatgaagaagttacaaag

SEQ ID NO: 3551 - DNA, 678 bp, Oryza sativa
attgtgaaatatattataaaatcttgatgatgaaggcatttccctccccaactatattttcaatggttgctatccagttagatttttggtaacattggcttatctatatgtttaatttcctgttgctttggtcatttggactgctatatgtattttatggaccttaagttcatcaccaatgatctcattgtaaacaaaatcttatatgactttgccccccaggaattacgatagctgagtattaccgtgacatgggttacaatgtcagcatgatggctgattccacctcacgatgggctgaggcattgcgtgaaatttctgggcgtttggtacgttgtttttcttctgccatacttgccctcatttcctttttgtatttctcatcctagtgtactttaacttgcacaaagctctgtcctattctcattggaaagacaatcagcttccgatttcttaaacggtgtgccgacatatttacactagcagttattctttcattgtgttttcactagtagttatgatagcctatttacactaaagtagttatagaatcaatttacatcatttactgcaatattaccatgtatggctaaaaattgctaactgctaatatagcctttggaaatagaatacttaaaagttaagattgttataactcattcgtgttgattttttgaa

SEQ ID NO: 3552 - DNA, 754 bp, Oryza sativa
agtagttggcactgctgacaccatatgagtgtcaaccaggttacaccaggatcaccagctgaacatgcaagatttcgtcctggggatgtggtcgttgaatttgatggtaaactggttgagagcatcaaagagggtaactaagctaactaggtgtatcacttacagtattcctttaggaacctagtaattatattgtcctgtcttcaatccaagagccaagagcatgttaacccatatttataaataaaatatttattccagatcattgatatcatgggggacaaggttggagtgccatttaaagttcttgttaaaagggcgaacaatgtacctgtgtctttgacagtaataccagagaaagcagattctagcagatgactcacaattaatcttgcttgaaaggttgagcaaagagtagtattttccagcacaactcatgtatcctatataatttagtttatactccctccgtttcacaatataagtcattctagcatttcccacattcatattgatgtaatgaatctagacatatatatctatctagattcattaacatcaatatgaatgtgggaaatgctagaatgacttacattgtgaaacggagggagtatgccctatgaacgctttgttgagtttttctaaccaggggctacagatgctctcctttccagaagaggaaaacaaggtgcgagcgaattatagtacgatatggagttggagcaacaagtcaattttgccagtggcatatgat

SEQ ID NO: 3553 - DNA, 613 bp, Oryza sativa
atcctctggcaagttttttcatcccgtcacatcgaacgtttgaacatctatatgaagtattaaatattagctaaaaaataactaattgcacagattgcgactaatttgcgacgaatcttttaagcctaattgctccatgatttgataatgtggtattacattaaacattttctaacgatggattaattagtcttaataaattcgtcttgcagtttacagtcgaatgttgtaatttgttttattattagacaacatttaatactttaaatgtatgtccgtatatacgatatgacatggcaaaaattttcacccttagaactaaacatagccttactctcacgggaacattttgtctttttttttgttgctccctaaatataatgaatttgaagataacataattagtaatttttctagaatttttgttgaaatttactagttggtgttaatacgggaaagtttatgtgcactttgccatggtgttttctgttacagagcaactttatcatagttaggaacttgggtgtggctctagccgctcccagtcgaatgtttctaaattaaaaatccaaacaaaaatcactgaggtttacttgggacacaatctttacac

SEQ ID NO: 3554 - DNA, 758 bp, Oryza sativa
gtatcagagcttccttgaccctaggttatgccaaatggttacccatagaagccctctaaaaatgttggaaaaatagaactgttctcctccctttctcttttaattaaaccaaactaatagcacatgcacttcataatctgttttaatggttctcgttcaaaaatttattccagtgttattagtactgtacatctattactgtactaatggctcattttaccagcaaaagttttacaatattgttttatttaatcttgctgcaataaaataaatttaacatgttgattttataactttcttttatttcttttggaacctgatgttcaaaagtacaaaattcatttccaactgtttcaacttatcttgcaagcttggtttactttatttaattaccttttactttgatcttctaaactttattcaaattaatcccaaaacttgtgctattaattggataaatgtcttaactccctcttttcacttgtctttagatgccgcgctacaagcctgagtacttgtttggtgttgagggttttgtccaggagttgcgtacaatgtcctttgtcattggatttgggactgcccctttttatgcccagattcctcatgatcgtcatgaagagaagtgcgagtcaaagtcaccttgaacagtaatagtgaagatatcccctcagtgatgttcgaagctggaggaagaaactacatccatgcaagtcaggaggtggcaaggatcgccataggagagctccgcgatcgtt

SEQ ID NO: 3555 - DNA, 772 bp, Oryza sativa
ctccacgaatataaagcgaataataagcacgaaggagaagaagttcacaaatctaaagtctcatgactgtcacgtgttgatgacacagctgctaccagttgtaataaggggtatcctcccagacaatgtccgggcaacaataacaaagctatgtgctttcatgaacgcaatttcgcagaaggtcatcgatcctgatagattaaaagccctgcagaatgatgtggtgcaatgtcttgtcagctttgagttgatatttccaccttcatttttcaatataatgacgcatctgctttgtcaccttgtcaaagagatcggtattctcggtcctttgtacctacacaacatgtttcctttcgagaggtacatgggcgttctgaagaagtatgttcgtaaccgtgctagtccagaggcaagcatcgctaaggggtatggaacagaggaggtcattgaattctgcgtagaatttattgaagaccttcgcccaatcggggtacctgaatcacgccatgaagggagactacggggaaaggggactctcggaaggaaagcaataatgacggtagacaacaatttattccgtaaagcccatttcacggttctgcaacaatcttcattggtggctccttacatcgaggagcacttggctctagttcgcgcaagaaacatcggtaagtctgatgcatggattactaggcatcacattgatactttctccacgtggctgcgacaacatctcatgggtaacgagacgattaaccaacaactggccttc

SEQ ID NO: 3556 - DNA, 6584 bp, Oryza sativa
tttggtttgaggagtaaactaccgaaagtaaaattcagtccctgtcttcgagaacactgcagccagacaaggcaacagatggagccaccacctcatacaaatcgatcaaattaatgttcagttatttgcagaacagaacaagaaagaaatgaaaaaactctttctcctggaccacagaaaagtatacgtactgagcttctgaactgtccaagatcaccactattcagagaaagtgtttggacatagagaaaagtacatagtactacagtacagcaccgtgcaaagtcattgtgacatgtggactggtcgttctctgccttgtaaaattcaggcttctgcaggcagcatgatgcaaaatgcaacaaagttcagagaattccatggcatatgcagagcagacaagtctagtggactggagtacagtgagtctactgatgttcatcagagctgcatgccaaagtatccatgtctgcttgcagctgatgttaacttgttaatgcaagtggctgtggttgtcgaatcagatgcccattggatcaatccaaacgacagtgttgagtcattctagctagcatgaaatgttactattattttatcacactaaattgtcatgctctacataattaaggagagacacaacatgtcaacatacaggtctccatcacagttcatcagcatcatctctaaactattttacgagattaattctacttatttttttgtttgcaatggtccgtttgtcatcgtctgaactgcattctaacttctaagtgcatcatgataaggctgcaacaatatctttcactctttactctatcttttctgaaagtaatgccacggatgctttgtctctgatccacatggacgtcatcgatcacaaacagcactgcgatttaattaagcaattaaaccatcttgtagaggtttttcgtctggaatctgatcgagcgagctcatcgatggcgtcagggacgaaaatggccgcctatagcctggtcgtctcgtccatggcggcaaaacaagcaacgtttgccttcagaaatcttcagcagaagaaactgatcgccacttgtctgcttcgacttcatcagtttgcatcgatcgacttctctgcaaaaaagtttgattaatctaaccatcattaatctgtactatggacgcaaggttttttttacaactaatctaaacagagaacggaagaagagaatcttgaactgttcttttttttcagacagtgatctatctctgcacgaatactgactgaccgtgctcctctttacacgacaacgtaactttgttttctcaagaacaaaaacagcagagctttcaacggcaagttcttccgtgtctgatcatgtgtatatcctggaagaagagattttcttggctggagctggaaaaaaaactgcaccgggcgagacgatcgatcgatcgatgcttcggttcgctctgaaaatttggtcgatatcacgatttgtctgcacttgaacaagatccatatctggcatcatcatcagttgcatcgacttgtccgcgaaagttttttattattaatctctatcatcattttctgcaattctctgctagaagagaaggaagagcaaacgttgattagacaattgaactgctgtttaatttcccgagttcagactctgatctctgctagaatgagaagcgatttgattccgttttgcacatatatgtatgatgaaatcgatccagcagtggtggatggagttagttaacttgtcgacgatcgatgtaatttgcctgatgttgtctcgcatcagacagcgtccgttgcccgcaggcgtaaatataaattataaaagtactaaattgatactgcttctctttctcgattttagaactttgaacgacgaattcttggtttcatcatgtatgatgatgtgtatcctggaaaacctgcttcgattcgattcggtctgaaaattcaatggtacgttaccgtacaatggaagcttccaacagggaagaatattagatcagtcagagagaaaaggagatgaaatgcgtaaatagctctggtgaagtcaaggattgcgcgagttcttttagcacttctcattgtttgatccctacttgataatccgtagaaaaacaaactaaagcaactaaaataatttataagtagaagttttatatacttgtatcctttagtaacttataaaagcttatgttaaaaaataataaactactaatgaaactttaaaatcaaatctaaaattaacttttgaaatttaaattctgattacgtctgataagccaacaagcaaatgatgcggctgttaatactttttttcgttattaatgttttgttagcaacatgatggcaaatcttataataaaagcatgggcattaccaactatttagcattaaactaaactatcacatttactatttaaactaccgataaattagtagggcacattttgacgtcaatctacaatgtcccttaatttaaaacagagagagcactaggttttcggtaccccgcaacacacacgaatgagtttggaaaagaaaaagaaaaaaacatggaccatctaggcctatccaaacaaccaaactgaactggccgttcatgcaaaacgggccacaaatcttctgcacctcagcaatgggccaaaatacaacccaccaagcggaggctggggaggcggtggaaggagagagaagagggaaagagagagaggggatgacacatggggtcactattattgtttaaagtattttctgctaactcagcataaaccattttcaagttgaggatggagttatacttggttgtgtggttgagggacgaaattgctaacgggcggacgatcgccatccgtgcgcccacgtgatcgagtcatctttttttttacctttttatgttagaaattgctccttaactgtttttattttcctttttttttactattaccgattttcatggagccaagttagcgcttttttttccttttcttcttcctaaggagacgtgtgtacgtgcatatcatttctttttgcgaatatctatgtgggactttttaaaatttattttttaaattcgtttgaattcatctatagaaagtttatagatctaaagtttatacctataaagtttctatattaaaagtttacgtgtataaattttctacaaaaatttgtatgtatagggtttagacacagttagtttatatgtcaaaagtaaacgtacgtaggaagtaacatgttagggcccagtggcccacaactacatcctaattacactaggatttagatcatcccaaattactgaaaaatatgtgaagcaatggttagaataccaacaaaccagttgtatgtaagacagaaaaaaggcaaaaccaacgaaccagttttttttctcgtttcgatctcccgtcctccacacacgcaagttaggcatacaagtgggtccttccccgatcgctcgccgcaggcgccagcgatcaatcgcgtaatagggggacccgttgagggatgcggttcgattaaggggcaagataatgagagaggtaaaatagacttactccaatgagaaaaaaaacatagatccatccagccctacccactcttcattcgaaatgggcccagccgacttcacccatgaaatgggcctcgatacggcccaccaaacacgtttcccttttcttttctttctttatttcttcttctcgtctcttctcgccgccgccgccgcaatgctccgcgccgctcgcccccgccgagccggcgcgctcctcctcgccgccgcggccgccgcctcctcctcaggagcgctcgcgtacgaccgccgcggcggcgacggcgacggcgacggtgacggtgaagccttctccaccaccaccaccgcagtccgcatctcggcgtcctcgccgctccgccgcgcgctgtcctccgcggcctcggggatcctcccggggggcagtgcacacctcctcccgtcgccgctccctctcggtgaaggtacttcggtttccttccgttttctctttcagactagctcctgccatttttcggcgtcgtcgttcgtcggggtgacgtgtacggttctcgcaacggtggattgattcattgtttttttttcctactgtgattgctcgacgtagatgcgtgatctgctttcctgggcgagttcaatgtattttgccaactatgtatgaacatagtgtgatattgagctataaatttgtggccgccttgtcatatgcatacattctagcgtgtggtgtgtagctacggtgttgtgcatcaatgtgctggagttattctagtttaaccaccattgtgatttccggaaatggtggttcgatgtggaaatgaacaatgcttctgaatttttagtaggtgggtgagagatcctgtgcgtgggagtttttctttgtttatctgtgcagttgctttcttgatgggtagttaatttaaattcagtcattcctaaaataaaaaagttaaattgagcgtgtgcccccactatgttatattatatgtactctattgtgctgtgtaccaaaaggactggttgaggaccaatctgatggcatgttgtgtgtggagatgagaacatagtatgttatcccattacattgcagaatctgcgtatatctgaccatgtaagtatgtgctagatttcagctgttaacagttagctttgactttcgcttgttctgtagaaggtatgaaattgcctctacactgtataaatgccttttatgagtatttgagctgaacagcttctgtgattgtcaataaaatgttatgagaatattcacgatgtgtaacttaacaacatattcactatataagagaagcactcaagagaatttatttatttatttatttttgctgaaaacaatagtagccaccatatcttcttgattaatctctcgtatttttttccttgaagatcttaatgtgtacagtttacgtgcagggttttccttcctaaatttcttcacatctgcatcaaattggagtgcagggtttcccacccaaaattccttcgcatctgcgtcagttccacccactaatttgagcaaccagagctctgatggaaactcagatgattcaaaatgttgcccaggatgtattaaccgaaatacaatcgccaaggctgcagctgcagttggtcctgctgttgtcaacatttcttctacacaaggtaaaaactgtctaaaggagggtgtgaaaacttacagtcagcacattagctatacataataaacttttgtttgtctttttgtagaaactcatggatgggttctagagaagagcattggatctggaaccataatagacccagatgggacaatattgacatgtgcccatgttgttctagattttcaaagcacaaaaccaatcttgaggggaaaggttgttaacatgtcactaactttcgtagttttctgttcatctcaagctgtacacttcttcattatgtttcctgcacttattcatataaatctgtgatttttgctcagtcctgaatataatttactcacgggggaagtataccagtattttataggataaatccatgctgtgccaatagttttcatcaatatctgaaatatgccaaagaaaatgtgagggtaacatgcagttgtcttacgttggtgagacattagtggcacacataggcatttgatgaaactcaatgccatgatatggataaccccttatatcatattgttcttttcttcttcttcttcttttccggggttagtgtttttttccctaatatgggaaaataatcttggacatcagaaatacacttatctgatatactccaagctttagaattcaggcttttatgtactaacttatttccttatattagtacagatgcaacaaattacaattggcttgtattggaatttactgtttggttttgtatttcaaataccactttgcgcttggacaaactgagtgttataggcctttaatgttcttttgaagaaagagaatgacgtagaataatttttttctctgtactagtggtaaaatcctaaattttagtatggtcaaattattatagctgtgcttatgatagctatgaagtgtggggccaaattattgtccatgttagaatggataattcagtgcctaatggtccggatcatctaagtacttgttttcttaaaaattattatacaatagttgtgcttatgaattatgataaatacttttatactgtttcttacttagtactatttgataattcttgcatgattttggttgatataggttatttttgcaatgtgtttgtataaatcctgattcttttcttacaaaggttgaaattgtaataggttagtgtgactttgcaagatggtcgtgagtttgaaggcactgttctcaatgctgatcgtcactctgacattgctgttgtgaagattaaatcgaagacccctttaccatctgcaaatcttggatcatcatctaaacttcgaccaggtgattgggttgttgctttgggctgcccactttctcttcaaacacagttacagctggtattgtaaggttaacacctccctaagtgcagacctaatct

SEQ ID NO: 3557 - DNA, 1110 bp, Oryza sativa
atttggccacctttccggccagagccaactcggcctgctgtttgttgccccagaggaggacaacatggagacgatcgtcgcgcatgatgcgcttgtaatcacgtggaactcgtcgccagacaccgcagatcttgcccgtggcattctgatagacactgagagtgcccgccaaggtggtctccagttgatgctcctccaggattacacccgcatcatcaacgaattgaatggcacgcggacgaccgattcgcgatgaggtgtagaaggagtagtatagattcttcttgtggaacaggaaacgggcggtggccaccacattctgcggattgtaggtggtgtacatggacttcatttcctcacccttgaggaaatagaaggtgcggcccgttagcaacgcagcgtaatctataaatagggatcaaatgaaaggtggagataatccaggtgttagataaatacaatagttctcttgttaattaaatgtaggagctggtgaatgggattacaatttcccgcaggatttggcggattctattgggatctgggtgggtgtccggtacttttgtacttacgtttcatgttgcgctcttcctcttcattgggcacgggcacatccaaggctacatccgtatctgaaagatggagggaatacaaatagagaataagatgatgctgggcgataaggtacgaccttaaatggaatttagatagcaacaaatgcttcaaagcaaccgaaccgccgccagccattcaccatccatccagccagccatccagccagccatccagccagccaaccaactatccatccacaatttgtggacacaattccggcattcaaccaaaattccagttgaatgggtgaatggtgaatggctgaatggacgaatgccaggggatcatcatgaatggcaatgcaactatcaggtagagatcccacctccgaactaagaccttccatttccacctctcgcttccacccaggtggcattcattaatcgtgcataaattgagggcaggtagaaggtagagtttctcgaacgggaagtctaacctacatctaactagggaagtgctttgtatttgaggatgtgcggactctggggttct

SEQ ID NO: 3558 - DNA, 610 bp, Oryza sativa
gacatttatagctgatgtgagagcagacccacatttcctaagttgcagtgacctggtaatcttgcaatgaagatggttcagagtgatagacatacagtttttcctttggtttatcggctcattgaattggctttgattttgccggtggcaacagcaacagttgaaagggctttttcagctatgaatatcatcaaaactgagttgcggaataaaatggctgatgaatggctcaatcatcgcgtggtctgctatattgagagagacatatttgcaagcattgataatgataagatattaactcattttcaagaattgagaaccagaaagatgaagctacctctccctagtggtatgtcttattcttgttctgaaatttgtgtactgttaactttgattctcattttctcaatccatggatgtaatatgtgattctttttccaataggatcaagatctggagctacaattgaagaattcaatgaggatgatatagactccgaggaagataacacgtagcaaggtatttgaaaatgtatttgtacttctttttcgcaccgcaactaaatttgtaccatacattttgatcgtgcattagtattagtagcaaacta

SEQ ID NO: 3559 - DNA, 549 bp, Oryza sativa
gtaaaagtgccatgaaacatgagggcagataattgttgttaaataatgatacattaagcttaaggtggcataagtgtgcctctaatatagcttccccttagaagtgaacagttcatttcgatgtccactgatcttaggacaaaatatatatgatcaagtgtcacagaccattctcatatgtcaggaaagttgaataatcatgacatgattaaggcatgcattgagttttgcattatttggcatgacatgatagctgagattgccttttgaagcagtgttattaccatatgaagtataaagtgccaaaccaattcatagctgtaaagatctaaatgcataaaatcaatgaagtaaaggactaaccctgaagaatccatgattggatgtacgtcctgctatactgttgaaatatcttaaggcacacttgatccaatcgatattttcctgagtcagaagaccataagtgacaacgtcggttgaacaaactaattgcacgatacaaaataccatgacaataatgatattgagccattgccggtacttttttta

SEQ ID NO: 3560 - DNA, 539 bp, Oryza sativa
ttgaaaaggtgtcaatgaaaaagttatggcagggaaatcatcagaagcatcaatgcattcttctaaggttgtccatttagtgaatgagatcatcaaagggttcgtaactggcctatatgttcagtttgcatatctgacagagaaggagtcaaagtagtaaaccttcccttcctgtagaagagtcctaagcttaatcatggcaggtggatagatttgaacatggatgctattgccctgcatattgtgtatataaagcaccttgttagtaccatatttgtatgtaagtattaataaagaagaaatgagtgttaattagactataaccttttcatccagcaagacaagatcagtgtggaagatttttgtttcatcattcagatcatggtagtcccattgcctagatactcttgccttgaactgtttattagtgtccccatacataaggtctgaaataagcacgtataccattggaagcctgtaattaaatattgaagatatttagttttacgtatatataaagcatcaatgtaatgaactaa

SEQ ID NO: 3561 - DNA, 658 bp, Oryza sativa
ggtctgatcactcacttccatcatcatccataccatcgaagaacttggaaccttggttttcctgaggaaaactcagagggagctgtgtcagatcataccaaccagatatgatttcggatggatgtgccgacaattccaattacctcagataggcggatggaagtgctcggcgtagcgaagagagcgccctcatccatggaaggagaagagagcccccgttcatcctgctccaagccagagggatgcatggattgaggagtatgatctgtgtatcatatcattgcagaatgcttaattctctactaaatcatgatacagaggttgaaacttagaaacgatgaactgttcttgcttgcttcctacctacaatggcgtcgcggctgctcatccactcatcgactatgcgcttccaacctctgcattcgattcgcaaacaaacatgtcaacgaatgcaactggctaagaaaaacaaattcgatttgaatatgaacaatccaagacgagatgggaacacatggccatactcgatgagcaatcgaacaaggtgacgaatctgcttggagttgtgcttccggtagctgctcaccgccttcccaatctcggtaacctgcaaagacgaatccccatgaacacactagtcaacacatgagcttggttt

SEQ ID NO: 3562 - DNA, 1630 bp, Oryza sativa
caaagttgcatgcgataattcacgacttcaacagcctgaagcataagaggtgaagagggttcaatcaactatttcatccaagatagatgagcgatgagcgcgatttatttccccaatcaaatgggatgaaagcggttatataattcaatcaatcaactatttaacgagggaatcatagtcacatccgcttatcgatctctccgcattaagctcgggtcacagcgacacatatccaaccagcacacagagaacacaaacatgcatagaagacagagcagattaaaaaggaagaggctcttcagatgcgttaacgtttactgaatttcatcgcaacagataaaaggaagcaacaatcttttgcaagttcatgatgttcttagccaaaattctacgacatcataaaagacagttgtgtctggaggattgtgtcccgtcgatccaatactaaaaaaacatgccttgcattagcgcaactgattactgatggcgttcatgacgatccaaatcagtccacaagggtgcccaagatgtcatgctctctgaagagaaggtacctggaattccagatgcaaagattattagagcaatggtaaaacataatttatatcatatactgacagcaacagtatcagcataactatcaggaacatacagaatattggatgaacaaaaatcatcataatagatcattttcccactcaacgttcaaccaatagctagcaacagcaagcattctaaatattgaactaccagaagaaagcagcctaaacgaggaagcacgtgtggttcccggttcttcagcaacaccaccaccaagtattcgatcaattcctaactgtagcactcacaagtacttcctctgtttcacaatgtaagtcttctagcatttcccacattgatgttaatgaatctagatagatatatgtctagattcattaacatcaatatgaatatgggaaatgctaaaatgacttatattgtgaaacggagagagtaattactacttcgtacatggtagccataaacaacggtgctatagcatgctgccgatagaggtcatgagagcctcattggttgcccatattcccttattagggaataaaagttaatttataggtaaaacttttatatatttgttcctagcaacttaaaaaccaatgctaaaaagaaattacgttgaaaatatcttaaaatcaacttcaaattcaagtttgaaaattcaaatatatgcttttgctttggcttattaggccaaccgatggggctcatacacattattgtactatgagagcactacaagatctatcatctatgatagtatgcaacgagtggtaattacattgccctagcaatatgccgaaaggtacattctcactaacaagtgaagcaatggagagatagttcacatactctttttcagcagcaagcttgacttcgagtccaccatattcaggcaggagaacagtgtctccttccttgagagcaacagggatcagcttgccatccttgtcacgttcgccagggccaacagccaccactttaccaaagttgagctggattcagcggaacattcagagttaaacaatcaacattagcaaggtgatgcaactagtgtaataaaacagtaaca

SEQ ID NO: 3563 - DNA, 722 bp, Oryza sativa
aaaaggtgggatttcctctttatatatttcactttgtttcacaaaactacctgctgagtataatatggaagtttcaaaaagattgtttaatatcatgtgtcggttatatgaataagtaaaccagtaaggaataaatcaaagatctccttggatgcgatttgtcataaaagtctgctgttatgcggttaagaactttggtaagagattttaaatatttggcaaaatgatcgtgagcatggctgtcctggatttttttttttttgaaaaatttgaggtgtccatcaattaaagctggtaaatataaatagtacatctgtaagctacatcctacatgcactgttttttgaggctgtatggtacatattttgttggttaagagggaatggcgctgttgagtgctcagtggcatctctccttgaaacaggccgatctgattgcgcactaatatgttattggttactgtctcaggttggagcaacaaaggcagagttgttctgcaagacatttgaagaagcccataagaaacttgtatggacttgactcccagccatcacttcaataaccaccaccacgcaaaactgccttgagatctcacgatattgttctctgtgccaggtttacaaagagctgaacctagatgctgctcaaagatttctgaatgcctatgagaaacgatcatgaattatagccagatattgttcaaagatctgcagacgccaaac

SEQ ID NO: 3564 - DNA, 681 bp, Oryza sativa
atcgagcaagcatggcggctgcaaagctcgctcacacctcgcttccctggtcatggacgccgtcgtcgtcgtcccggtgcgcccgcttcttcctgccgtgcagcgacacgccgaacagcttcaccgtgtcgccgccgtcggttgctggagtcttgggcggcggcggcgtcggcgagtgatcgggggagtcgagctccatcagcctgcaggaggcggcggctggaaggtggtgttgcgccgccgccatggccgtcgacgagggggtggtggtggtggtggtgaccggcgcgacgtggttctggaggaagtagatgatgtcgttgtagagcttcttcatgtgcgccagctccgacagcagcagcgagttgcgccgccgcagctgccggttgtcctccgacagcgccgccaggaagtccccgccttcgccgccgtctccggcgacagtacagtgcgccgtcgtggcgggctcttcttggattagatggtggtggtggtacgccggcggcggcggcggcagcgagaagggattgaggtggtggtggtggtggtagggttggtgcggcatcggcggcggcggcggctgcgacgacttccgccggtgaatctcggcgaggaggtgcttggctcccttcttgaagaactcgttggcgaactcccacctgtcagctactatcttcctga

SEQ ID NO: 3565 - DNA, 646 bp, Oryza sativa
aattgcaaagtggattccgcgaggccgtactcttttcattgcttcaaatgaaaggacaccaggcttcttttcacctctatcagacaggtaatcaacacattgtgtcagctgctcttcttgactcaccagcattaggatctcaggcacgatttacatttgcatttggtttctgcaatcaatttagatgtgactttagcgattcgtgttctcatggatttaccacggcacatggtttgtcttcttctgttatcaattacttcctccgtttcacaatgtaagtcattctagcatttcccacattcatattgatgttaataaacctagatagatatatatgtttagattcattaacatcaatatgaatgtggaaaatgctagaataacttacattgtgaaacggagggaatacttcaaaaacatccccattcttaagaaactctactagttgctgcagtactaatgcactttgtcattctggaatatttattttggttgggataatccatttttttatttatcacaccatggcttacccatagaaaaaaaccaataatatgtacatgaccagcagtgcaatgtcataccattgaatgcttataatttcatgacacaagctggctaagatttctattcgttttctttggcg

SEQ ID NO: 3566 - DNA, 592 bp, Oryza sativa
ggatcgcataacactcgcagccaactcgaagcagcaaggagaagcagcagtagcaccacgagagatcgagggggggaagaacagcgtgggggaaacctgcttggacgtctcagggaggaggatgccgccggcgctcttcttgggctgcaccagcttctccaccagcacgcggttcagcgacgggatcagccgcctcgccatcgccgccgccctcttcttcttcttcttgcgaagcaagcaaaaaagaccgagcaaaagttctacactcttcgatcgcctccgccgcgctcgtggggtttagggttttaaggtggaggcgacgcggcggcgaatttacgggcttgcccctctccagggccctctagaacgttccactcctactggaccggcccacctccacggcccatttcatttaagggaccagctaatacattttgtcataaaacctttttagaaaaaaattgatatatgtaaatataatacaatgtaattatttgtaaattgtatgtatataattataatacaaattgtatgtaacttttcaaagatcctgtgataagtgatacgtagtagcatactatttccatgaagc

SEQ ID NO: 3567 - DNA, 719 bp, Oryza sativa
aataatgctgttaactgtggcagtgtggtattctttcctcctccgaaaggatgtagtcattcaaaggaagttgcatgtacttttcatgactactgatcacctaagcacttcatcaacatgcgcaaagagcagcattatttgagggtaatgtcatatatgactccttcaagatttgagatggttgttcttgtcccatccacctctttgacatgcattccatgtttttcagcttccttgagcactagaacatccatgctggtaatcaatgagagcagcgtgtcttagttaagcgaacacacaagttatttttaaatgatctatcaacacttgaagtagtacaaaatcaattaaagttagatggagagtaaaataacccaaaaaaaaaacatgggatgacttattgagagttgggattgctccagattttactggaatttgttacgagaagctccaaaaggtcccaactaagtgaaagggacaacactaaatagcttaattattttttaccacctttctgtattgcagttttttaaacagtacaatctggacataccaagtattatgctggcagtatgtgcaagatgtcagtacagtaatcacattctggcagtaccaagtaaaatatccacagtatgctgctacctgttctagcccagttaattgtaatcaaactactgcaagccaacctgtatattctatttgctcatgaatgcaactgg

SEQ ID NO: 3568 - DNA, 1501 bp, Oryza sativa
tcaaataaggcttggaggatttttgtatatttcctaaaagcctaaaatgcgtaaataaattttagtggaattttcagagcacaaataataattgagaagaaataaacaaagttgaaaaggttttataaaaagaaaaatccctaaaagaagtcttcttttcccccccttcccttcttgggccggctcggcccaattccctccctctctctcctctcccccgcggcccatcggcctcccccgcgcgagcgccgctgacaggcgggcccgcccgccaccctcgctgacgggtgggacccacctgtcatcgcctacctcgcgccgcgcccgccgcccgctcgtgccctagcgccgccgccgccgcgaatctcgccgtttcccgccgtccccgcgcgcaataaagagggggaaatcacccccgtgattccctctcccgtttccccctcttttccctctctccctccctcggattcgtccgatttgaaacccgcaatcgtcgccggcgtcttcaatggagccgagatctccgcggccgattcctctctctccggccgcgctttccccctcccggtgctatataatcgtcccccgcgcttcgctcttccgtttccgccgctcgccgctcgctctcgccgtcggattcgtgctcgcgccgtcctcctctctctccgacgtcgccgccgagctccggttcaccgccgtcgccgctccggacttcctcccgactcggcgtcacctccatcggcttcgccggcgtcgttcgtcgaccctcgcccgctccttcgtttcgcccgccgaccgccggagcaccgtcgccctcgtcatcccgaaccgcgccgccgcgttcctccgctccgttcgtcgtctccgccgtcctcgtgtctcggggtgagctgtggaccgtccctttagcttccctctcctctcggctctttcgggcgccgctccgccgcgccggtggtcgccggcggtgaccatcggggcgcggtcgtgccgcctcccgtcggccgtgccggcgaggccgccttcgggcgcgtcctcgcggctgccaagtgggcccggccgttagccgcccgcgcccgcgggtgcggctgacgcgtgggacccacggcgccgaccgccgccagctgcgtgctcccggtccaccgtggaccgagaggctgacgcgtgggccccactcccgtggacccggtccgcgcgccctctccctcggctgacgcaataaatgggtttttaattaaaatttaaatgaagaaattcgtaaatatccatttaaagagcatataaacttcaaatggccataacttggccatttgaactcggaattggcccgttcaagtctctaatttttccttaagaagtcaagaacccatttttgtgctttgttcctgcttgttgtatggagtttattagagtaaaagccttttcttttccgttggtcgtgtagacgctgcagcttcggaagatccgctctttgtggaagttgaagccgacgtttgggaaa

SEQ ID NO: 3569 - DNA, 1095 bp, Oryza sativa
aggaccggtcttcgggcctctgttgcaaagactaccgtacttccacatgtctagtggtaaggcttagtttgtggctcagtctagtcataaacaaaagtacacggattggagatggatgaagtcgggggtcgatggacattctccagggcaaatgaaggctacacgagctgcggcccggtagtcgagatgtcatggcacagggccggtgtcctgctgctaggggctcagtcctgcctgcctgtcccgggtgttccggccgtaggcgggattgggtcggtactcttgtctatggctaggatgggttggaaactatgtcacgtcttccgtctgtataccgtggtggtatgtggcactgtggcacgtggttacacgtgaggaagaggtgtcttgtgggtaaagatgtacacctctgatcagagtataatctattcgaatagccgcgccctcggttatgggcaagccgagcaatgtacccaagttagtgttttaattcttaaaacttgcttaacaactaaaatgtggaatggttggcctgggttggcttaggacgagctgggacccagggtcgggttgccagttcggtctgaatcatcataggccttgggttaaggcaggttcgtgtgggttcacggccttgattaataatattggatagttctaggatcgtgtttacaaaatggccttgagcaactaaatgtctttaaatgctgtttactgcaaccctaacccctttttggtataattcccttgtactcccttgcatttattctgcatttgtgggtgtgtcttgttgagtacggtggttgtactcagtcttgctcaattttccccaagcccagatgaggagttcctggaagatgaaggctttggtgtctagctcgtgcctgccgtcaagcgcctgtggtcgtcgccctagtcttccgctgtttctcgtttgtctttgtgtgttgggccttcgctgcccgtgtaataattttatatacgcttccgcttgttaaactctgaattgtatcaactttggtgtaccttgcctcctgggacaaggataatgcacgcacgtcaggaacgcccgtcgggttatttccggtcgtgaca

SEQ ID NO: 3570 - DNA, 1796 bp, Oryza sativa
tgtgttcatctgtgttgttgttgttgttgtttcaggaaggatggtgtgatagccagggaacattggaggatgtgagagtgaagcttcacaagcgtcaggaaggggcgatcaagcgtgaacgagctatcgcgtatgcgtattcgcagcagatcgaaggcgctacgaaatgcaatgtatgactgaattcttgcagaaattctgtggcagtagatgtgatctgaatttttgctttgaactgcattctattgcagcagttgtgtactgaatttttgttttgaactgcattctattgcagtagttatgatctgaatctgtgttatttcaactgcagttttggactgaatgtgtaatctttcttgtctttgctcagcagcaaccgaagcctacttcttatggtcggctgaaccagtctggaatgttgcttaagcaccaacatttcgacaagagcaatggcaactggagctggctggagaggtggatggcggcgaggccttgggagaacaggctgatggaggagcacaaccagaccaactccagctcgccggacctcctgtcctccaagaactgcgaggattcattcggcattcttggggacttctccgaaccaaattcagtgaaagtgcgcaagaacaatgtcagcaagagggtctgcgcgaaaccgccggtagtatcacaccaccagcgcatcaaagctcagtcgatctcgtctctgagcactgaattgcacaatgatgagagctcggcatcgtcatcgtcgtgctttgcttcgacaccaatatcgttctccacctttgtcacgacggagaagaccgaggacagcatcagggcaaggccaaactacatgaacatgacggagtcgatcaaggcgaagcgaaaggcgtgtaatgctcaaagaacgacagcagggaaactgatggaggataggaaggcctcaggtgtcgagttgaaggtcgctcaagtttgaatttgcaatgttcttggagctgtaagctgagatgaagccaacttctacctctctagggtgtttgttaggtggattgctccatccacaggtttttcgatgtcttgctgctgcattcttgagttgtgtctgtgtcgccaatctcatgttcaacatcttgttgtcgagtcatcccatttttggggatgtcctcattgtcagtggcagtgtctttgtaagatagctctttgattgggaaaaaaatggtgtggatttgttgcagattgtgaatttcagagaaagggtgtcattacccatctcacatgatcctttagcacttctaccatactgtactactcctatactgtggtctcaagcaagtttccaacttccaaagctgaaaaccaatgtgctattacaatgcagtggttcttaatcattgaccattaggcatggagttttcttgttatttagggtccattctctaaaatgaccaattaggttgtgagaaactatgtttatattttctcttgccgacagacacacctagctgaacatgtaggcttacatgcctactacagcttagggtcaaatgactagagacaaatgattctaaacttgaacacctgatgctaaacttaagtactagtatagacaacagaaatcccagatcacttaaacaatggtcgaaaggcattacatttcagcttagcgattgccaagaccaagaacggggcagcatgagactgcagcagatgctcggtaacaacgtgcagatcgcacgctttgagaactaatctatgtcctgtgtgcacttttaacaggtataaactaatggttgggcatttaatggcct

SEQ ID NO: 3571 - DNA, 774 bp, Oryza sativa
actttctagttttctcaaaaacttttctcaaatcggctatgtgattctcaatttcttttgacttaaccaccacgtcatctatataaacttcaaccaaccagccgatcagatcatggaatatataattcatggccctttgatatgtagccccagcactcttcaagccaaaagtcattacaacccactcaaacaagccgattgcaccaggacatctaaaagctgtcatatgaatatcttcctctgccataaagatttgattgtaaccagcattaccatccataaaactcaatatctcatgtcctgaggcagcattaaccaactgatcggcaaccggcattgggtactcatcctttcgagtagccttgtttaagtctcggaaatcaatgcacactctgactttgccatttttcttgataaccggaactatgttggaaacccactcagcatatcggtatggatgaataaacccagcatcatacaaacgtttaacctctgccttgacaggttcgagcatataggctttgcatctcctcggcggctgctgatatggtctaacccccggtttgacagggagccgacattcaacaatcgatcggctgagtcctggcatctcgtaatactcctaagcgaagcaatctccaaattcttttaacaactctaacatggttctaaattccggagataaattcttactgatgaatgtcggtcttggtctatcgcctggacctatatcaatttcttccaaatcatcaatcgacataaaaccttgtcctt

SEQ ID NO: 3572 - DNA, 980 bp, Oryza sativa
gatcagtcaagacaacttctttgcaaaaacggctgcacaatatgccagtaaagcctgaagcaagtcaccagctcacaatactgtcagattttccaagatcacagagtgaagtaaacatgagaggagaatgccctcaccaaccccagatcctagctcaattattgaatgatccttcacagtctcaggatgttcagacaagtaggtgttcatcagaactgcacctggccatactaactgtccagtaagatcataatcagctgccacaaatcattagaatgtttgtaagtgttggccccatgataaggaaacagcaaaaatctggcgttatgaagtgcaatgcagcattgtgcccagagcaaaaatacacccaaacaagttaatgtactgatgagaggttctagtttgtaaataagattgttcatatttgtccactgcacaaatagaaataaacttgagtatatcatgctcagatctaacttttgtgttccacggaagagctatctccagataaatgatagattgatagttactatgttacacaaagcagcatagcctcctggttatagaagcagacatgaaggacagaatgaaatggggcataagagttacatgacgacatatatgcacaaaatgaaaaccccgccattttgtttgatcctgtgaaacatggaccattcattgtactgacgtactagaatgacaatgtctgagttgcaagtggttcccaaaagggacaaggtaaaagtggtcctaaaactacatgattagtgtaatgaaaacccagtttggtactgcccaagcaacagttatatatgcacagaacgtatcacatttttcagttgaactcatatgtaacaccaaattcagagatgatggagtaatctatagatggtagatgctatgctatgacctttaattcatgatcatcatgttaaaaaggagtggagacagtcatttagtatctagtcacagctgatttt

SEQ ID NO: 3573 - DNA, 733 bp, Oryza sativa
tttaggcttttagaaaatatacaaaaatcctccaagcctcatttgacttttatctttgcacattttaattgttggaggctttctcatgaattttaattattctttgcacaatttcgaggatgaattttagagtcgatttgggacgcgacaaacctaccccccttaaacggaatctcgaccccgagattcggaagaactggcgaagagatcgggatgggctgccttcagctcgtcttcacgctcccaagtagcttcttcttcggcgtggttgctccactggaccttgcaaaaacggattactcggttcctggtcctgcgctccatggtgtccaggattttcactggcctctccacataggtcaagtcttcgcgaatttcaatttgctctgagtcggcctgctcggatggcactcgaagacatttcttgagttgcgacacatggaacacatcatgcacgttgcccaaggaggcgggcagctccagctggtaagcgacttctccgcgccgagcaatgatacggaaaggacccacataccgaggtgcgagcttcccttttgtctgaaacctgtgtacacctcgcaatggcgtgacccgaagatacacaaagtcatccactgcgaattccaggtcgcggcgacggttattgcataacttttctgccgggactgtgccacctttagattttcccgaatgaatctgacataagcttaagtttctctcagcatatcagtcc

SEQ ID NO: 3574 - DNA, 1792 bp, Oryza sativa
tgaccaaaacggcggcggaagatcaacggacggcgacggcgtcgaggtcgaaggggcggagaagatcgggtcgacggcggcgacggtcctccggcagtcttcagcgacggcgaaggagcggacgaggatggcgacgacttggcgaccacgatggcgaccttcccgagcgacggcgacgactggaacggcggcggcgcacggctggagcggcggcgacgacggcggcgctaggttacacggcgctggggcgctaccggcgacgagaggcgaagacgagggtggcggcgggcgggtagaggagacaccggggatccttttaaaggggcaggaggcggcggcaaaggcccacggcaaccggcggcgagatggaaagctcgggctcggagagagagagaccgatccgaatcgacctcgaatcaaacactttccaagcgattttagccgatgattccaaaagagaaaaggtagaggagatccccaagatcattttcccttaattggtttcacccgaaaccggaaaggatcggccgattttgaaaggaaacggcggcccggttcggcttagggtttcgggcggcggcggctggaggttgacgacgaccccgacaggcgggccccacctgtcagcgacggaaacgcacgcgcgcgggcgggcgctgctggactgggcggacttgggccgagggagagagagagagggttttgggccgactttcggcccaaagccaaaagaagacttttaaaacctttttcaatttaaattattcatgaaatgcatttcctttattaaaaatactttcctaacctaaaataattcccaaaaaattctaggattattgaattaaaccaaagatttaatggaattttattttgcccccatttaatatggaatttaataattaaaaataaaatcttctttcctaaacttttaaaatcaattctaataattccaattaaacaacaatttatatatttgggatttttagggtgtgacagtaacatccaacgaaatactcagaattacaacgggggtcacttgaattatcattatcagcctccttcacctcagggtccaccaaggggggtcaccccagcctcagtttgctcccagtttaatcagtttgagccgatacagcagcagacgcaaggggcacctcagcagagacaatgggctgatatgatcgcagatgtaatgagggagcaatttgggcttaagccgaaggatactggaaacttatatcggcatccatatcctgagtggtttgagagggttccattgcctgctcgatacaaggttccaaacttctcaaaattttcagggcaagataatgtttcgacttatgagcatgcgagccgattcttagctcaatgtggtgaagcatcggctgttgacgccctgagagttaggttgtttcctttgtcctcatccggatcggcttttacttggttttcttctttgccatacaattctgtcaatggttgggccgatttggagaaataatttcacagctatttttacagtggaattcatgagatgaaactttctgacttgacagcaattcggcaaaggcatgttgaatctgtgcaggactacattcagagatttagggaaacaaggaataggtgctacagcttggctctaacagattctcagctagccgatttagcttttcagggtttgatagctccgattaaagagaaattctcatcccagtagtttgaaagcttatctcaccatgcacggaaggtaactctgcatgagcaaaggtttgcagaggccaagaagaatttc

SEQ ID NO: 3575 - DNA, 617 bp, Oryza sativa
gagaatcaaacactgatcagccatagctgccgcaacattctgcagcaacccaaccaacaaacccaccctccgctttgactggcggtttcatttagcaaccctgcaagccgcaacgctttttgtcgccttcccaagaatagaagtccggaccattcaaacccagtccagtctccctctctgccacctgcccccacctgtccctgctgccacactgcgccgcgacgccatcggagagcagctcggagctcagagatgcttcttgtacatgtcctctcgctccatctcttccacttccacccaccttgtcttcttcctccacctcctactacttatttgcctcatcaccgagaacgccagtgccaagcttctttgtcttgttgcgtttcttgaatcttcatctcttcttttcttttctggtaatggaggtggcggaggggaggacggtggcggcgacggcggcaggtggtggaggattgggaggaggggcgaggaccgaggcggaggggttggcgtgcccgagtgcgagtccaccaacaccaagttctgctactacaacaactacaacctggcgcaccgcgccacttctgcaaggcgtgccgccgctactggacgcgcgg

SEQ ID NO: 3576 - DNA, 641 bp, Oryza sativa
cactttgtccttcaccaaccatcagtccatcatcagtgacctaacagagaagacctcggcccaccatcatttaaagataaagggatattcagagactagaatgttaaacacaaacttttacagttttactacactggtaattgcttactggggcctactgaaggacaaccaaagactgatacaacagcagcagcaaagaagcatggagattataagcgtgagggctgtaaacatgagtgtttggcattgattcagattttattggtatgggcaaacctctgaatttgatcaatgacaaactaaatagcacatctgagatgtatatcaatataagatacactattatgatgatgaatagatacactacatatatcaatataagatacaacaacagcagaaacgattactgtgtaatgttcctttactttcttcaggatggcctagttcatgtcagctttgttctcagcgtcatcgccctttaagaagcgcgagaaccaccgggccgatgctttgggatgccgggaaagcccatttttgtaatcaacataaacaatgccaaacctcttggtgtatcccatagcccactcgaagttgtccaggaacgaccatgcgaagtacccacgaacatcagcaccatccct

SEQ ID NO: 3577 - DNA, 741 bp, Oryza sativa
tgggaactcaattgcactagacagtgatgatgaggatctcataagaggtagccataaaaggagaaagagagatcggaagagaaagcgacggagatatgattctgacgaggacgatcttgatcagctgcttgaacttggtacctccaataggaggggcattgaatcgcaccatggatgttggtatctttcaactgatggcttttctgcttcatgggacattgtatgctatcttcttttttattaacacttttcattcagtgaagtcactaaattaacaccgtctattttattcggtatacttatgattgtcttgctactactgcaggcagacataccagatcacctttcctctcattatctaaaaacatggctaaagtttgcttgctttagatgatcctcacaacatgagttcaacaacccaccagttttcgggtgaattcatggggtcatggagatgtatgtacaggcttcgctctgttttccaacctcagatgcgcatctttaggccatgaattctgagagtaagttagtcacttcctgtaccccccacttgttaatcctttatttctttagtgaagttccatagtttgataagtacatgtaatataacttggttttgctttttgttttctattggcagtctctccacattcatctttatcattttaataaccgtgaatcaataatgcttcaacattattttgcttttattgccaagttttgatgacacttggggatcct

SEQ ID NO: 3578 - DNA, 1068 bp, Oryza sativa
atggaaaataaaatatggaattttctcagttctaaagaagtaggaattctagaccaaaattaaatctcttcctgtcagtctagcacttacaatataattgcaagatttattgtagcatctaacacaaacagacacagtacaaaagctgatgtttctcacaagctcaccagagaagcagagagcaaaagaaagcactgccccagaattgattggcagctgtgtcactgcaagcgtaccaaaaagaaattatgcttgttggttggcttttgacagctcatccatttccaattccttgactggtgctataaggcttcgagtagtgcctttaaggcataatccaccatcttccatttccttcaggagattctcagcagttctccagtccaaagccttgagacaaagtgactggataagtttgttgtactcatccatatttggctccatcccatcttccttcatctcctttaggcactccaaggccttctcaaactcctccatcttgcagtaaccacgaataagtgtgtgatatgtaaccctgcttagtcttggatgaatcctcttagcatcacgaagtagtgcatgggcttcatccatcatgcctcctttggcgtagccactcatgatcacactgtatgtataaatgtcggggcagatcccttggttctccatcactctcatcaaaccctttgcatcctccatttctccatttttagacaatgccgtgatgacaaagttaaacactgcgctaccaggagctgggcctagatttaccatcctcatcagcactttctttgcatcttccacgttgtttgtattacacaaaccatgtataaccgcagcataggactggccagcatccttaagagattccccctggtactcttccagcagctcaagagctgtattaatggtctcgtcattcctcgccaaagcgctaacaaggaaagttaaggccgaggtcggagcctgcaccttcttttcctttgcagttatgtatactgaatgtgcctcctcacggtcgtcttcccgcaaaagtacatcacaatgtcacagacgttctcgccatcg

SEQ ID NO: 3579 - DNA, 1365 bp, Oryza sativa
  unsure (1)..(1365): unsure at all n locations
gaatttttttttagattttatagtctttttcaatcttcaggctggacaatcaacaagaatgtgtgaaaatattttattcaaagagttctaactcatgttggacggtaaactttagttagaaaatagtgatggactcgtatttcctgccaaaatcactatatagaaaccatatgtcaaaatctgtcaaaactaggaactacatgcttcacattgttatcaacataatgaatgagcaagcaagatgtcaatctcaaactgaatgaatgacacaagcaagcgatcaaacttcatctagcgagtaaagagcccaaggcagctccagttcagaataaatgcaggcaagaccagcagatttgactgcccattgctaaaaaggaataacataaacaaagacaagtgaagaggcaggcagaacacaattatatcaatatccaaacggcagcttctcacataaataagataactgatagctcaaggttgagaatcaaaaaccgaaagaaataggttctttgagcagagtgcagaacataaacaaaaatgcctgttgcaaatgccaagactacagggtaaacttaaatgccatatgaagtttgtttggcagcataaaatgaaactactgtgataaggctactctctcactagtcatcttcttcntcgtcatcatcatcagcacaagcggaggagttgagagcattcaatctttcgacgagactggccttcctctgctcgtaggtcagcttctgaaggttgtatctgcaccatagagatggcaagttagttacatcatacatggcattcacaaatatcctttacgaaaatcatcagccagcttcatatacctcctgtgggtcgccggttccttcttggttgattggcccatggtaggatcagcacggatggcagcatggaccttcttgtacagtgattccatgccatcagcatcaattcccttcttgaggtactcactaaagtgggcttggatttctcaggttcctcctcagccatagactgcaacaagtacataagaagaaatttttatctgatgacaatcaaaataaagcagactgagctaaacagtaacaaataatccaaactttatataatgctttagtcaacgttataaacatcaaggcagctacataactcctaatacaacccatagcacgaacaattgatctaatagtgccagctcaccctcatgtagtcagccacgtgcccaccgtagatgtacttgcggtgaatatcagaatcaagctgcttctcgtccttcttgaacccagcaaacctcttgtcactgtgaggaatgtcaagaccaccatccatagctccctgcagaagaaaagagaagtatatccacatgagcta

SEQ ID NO: 3580 - DNA, 26075 bp, Oryza sativa
atcagggaccatgtgagaggttatcaaggcatcagcaccctgattttgactctaacccaaccataaactaaccaatgctaccactttttaattactagtttgttggcgtgctgtcattagtgagttgatcagagttttgtgctttgtttgcttgctgagagagagattgacaggaaagaaaaagaaatatgtgggcggttgaggaagccaagacggatcgcacatagtcttgcaataaaaattgtgaactccacatggatgcgactggagaaaagagcttggtcggccggccatggagtctttcttctatggctgcctcctctcaatgtgtcctaagctttgctgctgcctgtgtttgttttctttgattagtctctttcttagagtaattagagtcttttatgaaagttgtcatggacgcatgtatcactcggacaggtagaactggttcaggaattgaagacaaagctaggaaatttaattaggaattgtttagttagggaaaaatttaggtttagtggttatatcggatatgcggaaacacatttaaagtattaaacgcagtttaataacaaaataaattacagattccgctctgaaaccgcaagacgaatttattaagcttaattaatttattattagcaaatatttactataacaccacattgtcaaatcatgatacaattagacttaaaagattcgtcttacaatttacacgcaatatgtataattggtttttttctacatttaatactttatgcatgtgtctaaatattcgatgtgatagcatgaaaatttttgttttgggaactaaacagggccttaagacaaagccagggtcgtgtaccttttgttcattattatgaaagtaccttttggaattggttgacccatggattcatttagtgtgaatcttagatcaattgaaaaatacatgtactctctctccaaaaataaatcgactcaaaataaattaatgatgtctatagaataaaattaatggttaaacacaactgtccacaagatcacaactcaaaataaattggccatgccaaactacaatgggcgccatgccttggtagtaacgtagccacatgcgtaaatatgggcaccattgtcagattattttctagagaacaacacagtaatacctccgtttcgaactactcgtcgttttgatttctttttaacgtttaaccatttatcttatttaaaagattataaaattattatttattttatttgtgacttgatttattatcaaaagtgcttcaaatatgactgtactgttttttaaataaaataaatggccaaacgtggtaagtaaaaggttaaaatgacatctaattaggacgtctggagtactaacatgcatatatgacctgagacatgccttagagatcaaggtgtacgtctctgtcagagttcataatgtgcgtggattggggaagggggcaaccataatctcaatcagggcaactaaccacgtcaaagacaccgtccgtacgctatgcccctgcttcctcttctttcagcatgtttttttattaattagggtacaaaatgtggaattagtattgcaaatcgccctccccatgtcttcgagaacaagatctatccacatcattttctcccttaaacacgtttggttaaaaaaattcttaaaaaaaaacaactgttttatcctagaaaaatgttgcttgtgatctgagagggacaacaggcaacagccatgtgtgtgactcccagggacacgtgtcaggatgtagagaaaccatgcccaggtgtcatgttaatgcaactctggcagtctgcatttctgcaacaccaagctagatctctccatttattaaaacaaactctaatgatttctttttgtttttattagcatttgtttaatgatcaggccaatggcagcctcagaaaaaaaggagaaaataattaactgtgaccacaatcaagattagccacataaacaaaatcattgatatggttggcccaagatgtccaagtcaaggattggatggagcagatcaaaagatagtagagaaaaataaaaagaaaaagaaatggtcggaggagcatgatctgcatcaatcaagtgtccttcgtgtgcttcttctctaggaggctctagaaagcagaaactaatcactaatcatttttctcatgtctcttaattaatctagaaaatttgacggtatttttccaagtctttttttctctcgtttccccttttcaatgagatgaaccccgtgcaccgccaattttaactgtcctggtgatgtttctacgtgacacgtcatggctgttaagtgggattacacctttgatttggctgaaattgcatgtgatgccatccaatatgttggaaaaaatgactcttttgccctgtctcaaggacgtacggtagcaggggagagttggcgccgttggcaccgtgaaacaaatcttgtgctgatttccatgtatgaccctgcctattctctcagtagcaatttcatatgggtacttatctaattcttttctcctgctataatcatgctgaataaacatgcaatattttaaattataaaaaatagcaacaatgctatttaaccagttctttttttaactctgaaatagtttaatgagaatgagagagcatgctggaattgtttgataagaaagagggccggacgcagagcgattgatgccataaatttatttcattttgagtatgttagaaatcttagtggtacgggtaatggtttataaatcatacctcaataatatgctttgttgacttactatgagattcatgaaggaaaagcaccccaaattaaacaattgatcttagattgcagtacatgtcatttttaaattaggagttttaaacaaaaaaaaatattgatacgattatccacgtcactttctctagtgctataaattattctgtcttgtccacgaaaaattacagtgaggcatcccatggaacggaggaacttagaacgaattgaactaatccgtaaaaagttcttttgtaaacttttacattctaaatattaaaggagcccacagcatacatagcttcatcaatatagccatagcttatgtgcgagagccataaaatttatagcatctctaatattcacatgcaaaaacccgtcaatactatacgtatgcagtgattttaccaaactcaagatatactttccctcatccacaattgataaacgcatagccagtttttttttaaaaaaaaataaaatccacaaataatcaacgccacacatttgcatgcggtatgcgcagatagtccaggtggattgaatatatgcctctcgcatgtagaacgtttgcacacggagaaaaatgatatgtttgctcagttaaatgcagagtcacacacactcaacgtgtcatgtggtcgtgacgtgaggcctcaggatataacaacacaagcatgtaacgaggcgtgtacgaggggattttctttgcatcttggtcagggtccaaatgcaatacgcttatcagttatgcatagaatgaagttccgggttagtgtcgatgtattcattcagataggatgtgcatatatatatttttagggatatgtccgcacgcgcatacgagtatatatgttactccatccgtctcattttaagtacaactacacccaactttaatcgtccatcttattagaaatttttttatgattagtatttctgttgttatgagatgataaatagaaaacctacaccacggcatcccatggagacgggatcccctcctcctacctcactcctctccccaaaatcatccgaatcctctcctcctacctcactctcctcccccaaatcacacagcactgcagccctccctctccctctcccctctctctaaagaatgccgagtggagacgaagccggccgggaggaaggggtcgtcgtcatcgtctccggcggccgaggaggacgacgacgacggcactgcgtcagcgaggtcggccaaccctcggcggggtcgcccttgagctcgcctcccctcgttgtgccgctctggctcaccgccctcgtcggtcaggtgtgcgccggggagtcgtcgccccagggagggcagaagcgggagcccccctcgtcctcgccctcggtctcagcgtcaccgttgtccccgctgcggcctgctgcttttgcgcctccgggatggacgccgacagcccgcgtcgacctacaacaggtatggccgtcaacctcctccttgagacttctcgcgctctttggctcgggcttcacccctcacctcgccgtgcctcctcgacgccatcttccgccgttgcggccctccctcctccacgtctcctcctctttttgacagtaccttctaataccccacaagtatcaggcttgataccttggtatcaaggtctgatacctaggtaccacccggtatcttgggtaccgagcatcaggtatcggtcgatacctaattggtatcaaaggtaccaggtaccaaccggtacaggtaccaggtactagaggagcacacatggacagagaaaaggaaaagggagagtcacttaaaatattccgctgcaacggtgggctagcagccctcgatgataaaacataaatattactttactcgtgacttatgtttttaatttttttaaaaaaaataaataagacggatggtcaaaattcggcgcgaaaaatcatggttgtacttaaaattggacggagggaatacatatttctatatcttttaaaaaataataaaaaagagagcacacacatcttctctagccctaaatatgccgaagaatattccatgtctcactctagtaagcgcgaaaacaatttcttcctccgcaaaccagaagcacaattaacgaaatggcaaaaccgtcaataaactgaaaccccgggccttgttatgaaccccccacgaaccttctccccgtccacgtccacccctcgccgtcgtcaaagcgcggcgattaacggcggcgcgcgacggcaattccacccgaatccgatgtataaaaccaccccgcggctcccccaaatcaccaagaagaacacccacctcagattagtcccaaagattattcgcgattaagcttgtttttttttgttcctaatcgcagatacaaagaattcgctttgcgtttgccactcgagaaagattttgttttttttttttggttaacggataattaagcgccgcccctcctcgtcgtcgtcgccgccgcatggaggccgtcggcgtggctccggcccccgcgggggtgccggagaagaagctgctcgaagtgaaggagtcccggaaggcggcgccggcggcgccgtcgacgtcgatggcggccaagtgggcgatgaagaagaagctcgtcggcggcgacgccgggtacgtgctcgaggacgtgccccacctcacggactacctgcccgagcttccggtgcgtgcaactgcccccatatgcctcttcttcttcgggtgtctcgcggttagctgagatgatttgagtcgaaaggttaaagttcttttgctttcttggggttctacacagttttatgtgagctttcgagcaaagatttggatttttttcccgctcttttggggatgtttttttggcctgtgtttggttcaggtcatcccaattccagtttgtggattgatttgagaaagtgatttagatttaactcttgatttacttggtccgataatgttttaagcaaatgttccgataaagtttgaagcgaagttaaatcgatctgtaaaaaatggattatgaaatttcaatttctgtgggcgatgcgcctactgattgagctgcagtatcgttttgaccccatttcttgaagcaactgctcacctgctactgttgctgatctgcagacttacccgaatcctctgcaagacaacccggcttattcagtcgtcaagtaagaattctcctcgtctcctgctctaaattaattccatttgatccatgagaattccattattccatagtccaaccacgcttggtacaaaaaggcttacctttcttcacaccacgtgtgctccttcttcttcttgcaggcaatacttcgtcaacactgacgacaccgtcacgcaaaaggtgaggcttcatctttccatgacgaaaagattactgtaattcggttacagggtgatcatagtttgactgagctaacttaattttgtggtgtttgctgcttgcttcagatcgttgttcataagaccagtgctaggggcacccatttccggcgagccgggccgcggcagcgggtgtacttccagtccgatgaggtcaacgcggccattgtcacctgcggtggcctctgccctggacttaacactgttatccgcgagcttgtgtgcggcttgtatgatatgtatggcgtcaccagcgtcgttggcatagaggtgattaacttgttcttattttgtcacggctttgtgtaacttagttctttgttgggatgctaaacatgttttgggagtagttgatatgtacattttaggatatcagaaatgccattactgcaaaaatcatctgagaacacaatactgaaagtgacacaagcattttagttggcacttggtggccaatgacatgatgctaatgctgtttgtgtgtaaatggtgctcctaatcagttgttgtgatcattctgtttttgttttattgacttgattctgatgtgcatgtttagggtggatacaagggtttctattctagaaacaccgtcgcactgacaccgaaatcggtgaatgacatccacaagagaggtgggactgttcttggaacctccagaggaggccatgacaccggcaaaatagttgacagtattaaggatcgcggtattaaccaggtgtatattattggaggtgatggtacccagaaaggtgcttccgtaatttatgaggtaactcacaggctgataatgatgtaaataaatgtttgtgggatgcccaatgctatctataacacaaacttgttgaaaatgatttcaggaagttcggaggcgaggcctcaaatgttctgtggttggtgtcccaaagaccatagataacgacattgcggtactttcttctttccagcacacttgagtttggattttcttcatgctaatcgctaagattgatgttgaattgtttgcacaggtgatcgacaagtcctttggttttgacactgcggtggaggaggctcagagggccatcaatgctgctcatgttgaggctgagagtgcagagaatggcattggtgttgtgaaactaatggggcgcaacagtggtatgtacctccccaatatgattatgatttatgaacttgcccccacatattctaccagaaagtactaaggagctttaaaatttactgctacagggttcatcgcaatgtatgctactctggctagtcgcgatgtggtatgttttaatcattctacttgttcattgcattgatcaatctagggtaaatgctgaattatatggttgatctacttttttacttcaggattgttgcttaatcccagagtctccattctatctagaaggaaaaggtggactccttgaattcatcgagaaacggctcaaggacaatggccatatggtcattgtagtggctgagggtgctgggcaagatctcattgcgaaaagcatgaattttgtggatactcaagatgcttctggaaataagctacttctggatgttggcctttggctctcccagaagatcaaggtcagatgtggtccaaaccttcatttccttttcatagtggggacaacaatgatctttgcttatgcctcattcaattttttttaaaaaatgctgataattctccaactacaataaatttgatcacatcaggtttcttttattgccaccaatgtaaaactaagccatcatcgaactagtactttgtcttcatatttgtcaatatcgtaaagcctggaagaaccaaagaaccatgatgtgccctgatctcattcagaatgctgaattacttccctttcttcatcatgcaggatcatttcaagaagaagcgcaacttccccatcactctcaagtacatcgacccgacatacatgatccgtgccgtcaggtcaaacgcatccgacaacgtctactgcaccctgctagctcacagcgccctccacggcgccatggcggggtacaccggcttcaccgtcgcgccggtcaacggcaggcacgcgtatatcccgttctacgtaagtccagaacactctttttcaatgatcaatctttagtgttcagttcagttcagttcttcacaccagacatcaaccatatcctgataatctggacactgaaactccggcgatttctacagagaatcacggagaagcagaacaaggtggtgatcacggacaggatgtgggcgagggtgctgtgctcgacgaaccagccatgcttcctgagccacgaggacgtcgagcacctcaagcacgacgacgacgagcaccacctgcacaacacgcagctcctcgaaggcgagagctcgccggtgaaggactcctccaagtgcaacgggacagcagcgccagtgtgagaaccaacgagaatatatatatatatatatatatatatatatatatatatatatataagcatgtaattgtagctttctttttgtcctttttttctgaaatgacattgtggggaagctactgtaatagaattaccgtgtaatatagcaaggctggtttcatcctcgaagcagaatggtaggtttggttttgttgggaaaatagtaagggtttcatgtcatcaattcatcatcctactagtaataagggttaattttgtagtatagtggatttggatcgtgaatctcgggcttgaacttaggatgccaattctcatcgaaaatgtacatagagcaaaccttatttcgcaaaacatttgtaccgataacggcatacaagtaacaaaaaaataatttgtatctgtgttgttcgatgttcaaatggcaatgcaaaaataaattacaatggaaaaccataaaatcagtttcaaaattaaaatttttgcagcgacttgtaagctgaaaggtatacaatgggatttacgcacctacccatgcgtcttgtgtagatgacagttatttgaagtagtacggcagttcagtcaagtgttttacagggaaagcatacagggttcctctacattgacaagatcaggttcacaatcccaatagaaaaccgatgaaatccagttaaattttgttaaaataaaataaaattcggttgatttttttaacttggcaaaaaagagagagtgaattgtgctttctacctattctggaaagtccagcaggatggaattgtaaaccctggacaagattcctacagggatgtgttccaagcagtaggaatcttctccagacttaaatccaaaaactaaagatcagatatcttgtagactaatcgagtgatgtccaataagaaatacgattagtacattaagtacagggcgttgcacagaaaacatatcacaaccccatgctgtgaacacacgctaaaacacatacgcgttaaacccacacacacagcttcaaatcttcatcgaggaaatctgaagcttgagcatacacgttgtcacgtaactacacaggcgcagctgggatcggaaacaacaggtagagtagtacggctactgcttttttcttgttttgccataacaacagtgatgaaaaagaatcaggtctctcctcgaattgaggagagtggaagagattgttctagcctctgtacacgccggagggatcagcgttttgaactatccaagggtgctcgaggagcttgtggaggggcagacgatgcgccgaattcttcacgagcatctgcagatcaaaatgctttcttgaggttcacactctggtggatgttctacttgtgtccaagtgacgatttacttgtcacagttttacagttatgtaaatcatcaggacaggagcatgcttcttacctgtgaaattaggtctttcgcagccggggacacgaatggtttcagtgggaacttcaagtcaactttcacaatcctgcatgtccacaagacatttcagagaacagtgcttgcaagaagtttcatggaacttattggtaattacaggtgagaacaaatggaattaattgtactctgtcgagcatggaggatagattgaacataatcacgagtgtttattaaagtagcagaaaaagataaacaattagcagagtatagctcagatatcagaaacgatagtgcagaatacaacctctaatgggcaagagacaatgagattcacaagggcatttgagatatgtctcaggctagttagtaaaaagtcactgcattctcactctgaaactcatcattacctgcgatatgtttcggagtgttcttttgcttcgaaaggtgggactccataaaggaactcatagcacaggatccccaagctccaaatgtcaacatggtagtcatgttcagtcttctccactggacaaattataaaaattttagagtcaaggaaattcatacatttactgatattttcaaggaaagtaaatggaaaggaaagtacccatttcagggggcaggtaatctaatgttccacacattgtccttcttctgttgaaggtgtgcacagaccaaccaaagtctgcaattttcagttcgccctgttcatgaaagaatgcagccatgtaattaccaaagaccatgtttcaacaagtaaacatcagagagctgtagtttcaaaattgagacagtcagacaaagaaacaaaataatgcaattacctgggacccaattaaaagattttcaggtttaatgtctctatggatcacatgctttccgtgaaggtagatgagcgcatgcgccagtgatgcaatgtactaaaagaacaggcaaatctcaattattacttttcgacaaaggtaacagaagaaaagtttatcaagcatgtgtgcagatcatctacttacagtcgctgaacgtctttcagagaaatgcttgcacctctgcaactccttataaagttcaccttttaaggcatactccaagatcaagtacacacgggtctgcagaatccatgtagcagaagatatgatgataaaactagaggagataaacaattacatcatatcagaactgtggtttttttttttctggacctgatcatagaaatacccatacagccgtagaatgttgggatgacgaagatgactctgaatctcaacttcccgacgtagctgatgctccacctgggactgctttagttggctcttgaaaagtactttcaaagccacaatatggttactctgtttcacagaaagaaaatagattaagttcactgaaagtggaataattagaatcaaaacaaacaggaacaagcattctgaagcatacagtacagttttaggttacaaacatttacaattgcaggagatatttaaaaaaagctttaaagatcaacatattaagcatgacccagaattccagttagaaccatatgaaagtgcactacttttttaaaaaaaaatatactacctccgttttttaatagatgacgctgatgactttttctcacatgtttgaccattcgtcttattcaaaaaatttacgcaattataatttattttgttatgagttgttttatcactcataatactttaagtgtgatttatatcttatatatttgcataattttttttaataagacaaatgtgagaaaaagtcaacggcgtcatctattaaaaaacggagggagtatatgatagcgcactacttaatgacataacttaaggctcgagagtatacaaaagatctatacaaaacttacaccatgcaatgcatgacacggtatcatgttttttcttcaagaaaattggatatctagaaattaaaatcaaaattagatagtttgtcttgttcttttagcaaattcattgtagcagacattaagcttcttagctgagatggagaaatagacgaattaaaaggccttcttgcttcctagtatacccaaaaggctccagcacaacagcaccatattattcaacaataacatgcacaatacccaaaaggctcatgtagatctaagatcggatagtgattatatgtcgtgaggtcaagcaattgtaactagtagtaactaagttagtgtactgagctcaagcaactgcaatacataaacctttcactcaagtaatgctcctgaatcaattagtagtaactaatagtaccaagaggaatggaaaatgtgtaacaatgaatataacaatcagctgtggctgaaatgacaacatgtgagaagaatcacttactctcttttctcttgctaagtaaacatggccgaacttgcccctcccgaggggcttcccgatgtcaaaatcagacaacacccaccgcttcacctcctgcgaatgcggcgaagcctagaacaaacgaccagaagagcatgtcatcatctcattccatacaaagcaggtgaatcagaagcagcctaaacatttcaacctcataataatatcctcaaggtcaatttaatttttagccaagcaaagcttcacataggaagccgaaacagccgcgaatccctgacaaaatcgcccaaatggactgaaattttagggccgtcctgtccaccagatccagagggaaaccatcaaatcaccaaatcctaccgtttcagcgcaccataaacccctcgacatgacggatcgaacacacgaaccctagccacatgactacgaggaagaaaaagcaagcagaaacgcgcgtattcgtgacccctgtcgcgtcaacaacctacaggacccagaaaaaaaatgggggaaagctgaatactagaccaaatccccgccgattcgtgcgaaaccgcaagaacacacgaccaccctaaccccatccaacacgccaaatccctccccaaaatcgcaagaatccaacacccgccggattccaccgcacgaagatccgagaaaggggaaggcggagaggggacggggacgcggggagcggacgcataccttctcctcctcgcagcgcgactcggtggcgatcgccatgggggaacaagagagagaggggaggggaggagcggccgcaacggcgacgaggcggagagattcgaatgggggatttgggggatttgggggaggaggccgcttttaagacgtgggtggatcgctcaacggtcgaatttctttcggcttcatggctggcagcgcgtgcggctcacgtgcgagccgacgagccgtttgtggtcacggtatgggcccccaggatgatactgggccgagagattgcgctcatggcatgggccaccaagatgacgtatctagtgggctgagacaaaaggtgggcctttatgggctctcgtttttggagagcttcgtgctcatgcgtgctgaacatgtcgaatttctgaggagagaaaaacatttcaaataaccctctttttttcattactctatgatgcatgagagaagagctaaaaacaattaagatgatatggcttcatgagagaagagcattaactatatttagtggggatgaaatttatagatatataggattcaaggacttttgtttgaaaagttcgtgggctgagattttttgtttgaaatacgattttattcttggggtatatattgggtgttaacccatctaacttcttgaagaaaccatttgtctcggacaaaccctcctgcagcaatagagggttgacatcaggatacaactatacaattaagattcttttagcacagtcaatcccttacgtacgtagcattccaattgtattcacttatcaacatcactcattcgatattttacctactttgacgatacaataattggctcaagccacccttacttaaaaacaaaacacaataaaatgtgagccgtctgaataacaaaatgtgtacactcatgatgcatcctccccgaaaatcagcacacacgcaatgatcgcacataaacaaaacccccaacttgtacgtataaattactcggtgccctaattgtatattgtacagtattatctactgtatctgtaatcaatatgcaggccaaaataaaaagaatattgcatggttatttaatttgcaggcgacaaaacatgcagacatgcattgcacaccactttattgtctcgccacaaaatgtcataaccaagtggattgcgatctaattaacaaatggctgatggcttatctcatcttggagcttggctaattaagtcagacggccaaagttcagagccgacttgtttcatcttcgcttcttctgattgctatggatcggacaagcacagatccttggagattttggagcgtttacatatgcgacttgatgaattaactttcaatttattatcatcttgtagacttgtacatacttgtgacgataaactagagtagattctcttcaaagataaattaagtttcagtgcatacaggaggtagcaattggctgaaaatgacatattcctttgcagttcatccccaccccccattttcattattagctgtgagcgagatgatcgaacacgtcaaaacaaaggtatttgtagacgtttagtacaccctacattgcagatttgcaactttagcataacgctggaactctgaatttttgaacctttaggtagacagtccatttcaagtagtacatattgaagttgcacggttgatatgatttgacccctatcaaatttacttaatctcctccccgtaaaaaaaaatacttaatctccatatgcgaggaacaaattaataagtaatctatcacactagagcttagcttgacgcgtaattacatatatttacataagtcgaagagtgagacctagtcatttgagaagtgacatttcgttttctcgtgctggaatattcagaaattcagcaacgagacagggggcaaagtgataaaacatcgctgtctacaattctaaggcctactctcttggctcttgcttaattaaacactgaagtaaagcagggcgtcttttccttatccgtgtctgtcaatagagcaaaaaagtggctttagtttgggtttatactccacatgacctgtctagctagccacttttttgctgttttgatgtttagggtgttgatgtgttggattggattaacaagttggacacaataagaaacagacagcattcagtcatggtagatattttgtcaagagaatttgttggtgcagcattgtcagtattttcttgtgtgtttagcttgtcaagttttttttttcagatggcagtagtcaattactcctacttcatgagtaatacaaatctagaatgataaaatgcatactacttccgtttcagattataagacgttttgactttggttaaagttaaacttttttaagtttgaccaagtttgtagaaaaaaaatagtaacatttttaacccaaaacaaatttattatgaaaatatattcaattattgatttgataaaaataatttagtattataaatattactatatttgtctataaaattagtcaaacttaaaacagattgattttaatcaaagttaaaacgtcttataacaggttagtacgtaacatatagaagtagctacacgctggcctacgcgcattcgaggagaataaaagatcgaagctgtacgtatacagttttcaaaaaaagctgtacgtataccgaaaaatcaaatatgactggggcaagaccatgtggacaggtcgatatttatatttatgaactttccacgctcctgtagatcgtttttcatccgattctctgtgatcttgcaaacacggtggaaacggtgctgactgactgactctaataagtctaacgattaacttaatttatgtgatctgagaaatctatccgcctatatatcttcccccataatcatatcgcctacaaatacttatgttttatgaatgacagataaatttatcatcttaaggaaggtataataccagattttctaatgctaattttgctgactctaataccttagatatctcttcagatactataatttttagcgtaaaattcttatattttcagatatttttttgaacatatataaaacctctcaataatcatacatacatctcgtatcaagtccatgtaatgtaacgaagataaaaggcggtgaaggtgaaaggcccagacaaggcgacgaacggcacgtacgtacgaacgtacacgtacgtaggggtagagtagtcgccgcgtttcacgaaagaaaccctgcctttatttgccaccaaggtgggtcccacgtacggtcccaagcagccaggtggtggatctgagccgaccatcgcatggtggacggtccagattgatccgacagggactgggttgcagcagagagctgaggccaacattgtggtcggaaacgattctctgacacgtcagaatcgggcatggttgcattgcaattccaattaactactgcaaatctgcgtattgcatggtaacgaaagaaattagtcacgactgatcagtgaataactcaaccagtccggtcattttccatctgattaatccctcttcctccacacgattctgcaatgcagacaaaccttcagaaccaaatactgtgttcagtcaccttttgctgctatatatcctccgttcttaagtgctgtgattagatccaaacttcagtcattttctatcacatcaacctgtcgtacacataacttttcagtcacatcatttccaatttcaatcaaaatctaaactttgcactgaactaaacacagactaggtaagcagaatcaaaggataacaaaagaaaaaaattcaccgcctgatacaaacaaaagtgtgatcaatcaggctaagctaagcatgtgagcttggaattaaatgtcgcctctccatcatcacaagcgtccctaaccatgtacccctatgtgtactccgctgctaccatgaaactacagtacaagtactgtccgattttgttcctcatgtgggccccggctgtctgccctgcccagcattacaatttataaaatcttatttttgtaagcttagcattacaagttttttttgttaattacaggctctgtttgtgaccgtgatttcatattgcccacattttttttaggggaattgatattggccacttgcagagcagcagggcacatcatggacgaaagcgaatctcgaggcggatcatggctcatcatcctcaggatcaccatcagctatcttctgttcttcccggcccatgcaaactctctgtgcaatttcacacgcaaacatgaaaaactacaagacgagaattaacacgaatccatgtgaagcagatttgttttttgagtctaaacgaacatgtagataccacatttgaagcacagcaaaatactagtagtagctttttgttcatagcaagtgatctaactttgcacctgatgaattttctcatgttcaagtacactacacgcttcttgtaattacgcgatgtttgatcgatcgaccaatctcgcaggaacacgcggagatgtggcatgtactgatcctaacactagtgtttgatctttgaaacgcacgagttcactacactagtgatgatgacaagctcggatcgagagggtagtagtagccgccgccgatgaagtggtcgtcctccgccgtggcggcgccggcgaggtcgtcggagctcatgcagaattccgggaacagcccgccgccgccgccgccaccgacgacgacgacgccggtgtccgccgaccagttggaccccgacgacgcggcggaggcggacgtcgagcccccgtccgtggcggcgccgtcggcgaagggatcccggagcgccgtggcggcggtggcggtcggcagcagctgctgcaggaagtcgtcgcaggtgtacgcctcggtcttgacggtcggtacggcgagcggcgggaggagcagcagcgacgacgacggcgacgtgtgcgtggcggcgaggggcggcggcgccgggagcggcagtaagggcgtgcagacggcggcggcggcgaggcggcgcttgagcttggtgttccagtggttcttgacgtcgttgtccgtcctcctctccagctgcgccgcgatggtcgaccacctggaaggaatcaatcagtcagttaccgccatggcaagaagagagagagggagagagagaggtttaattaacttacttgctgccgagcttggagtagagggaggtgatgatggcgtcctcctcgtcggtgaaggcgccatggcggatgtcggggcggaggtagttgagccaccgcagcctgcagctcttgccgcacctcctcaaccctacaaaacaaaaaagaagacaattcaattcaattcatcgtcagaaatcaagaagagtagtggccatatcatgcaggatgatgagaagacatggactgaccggccttgttggggagggagatccagttgccggcggtgccgtggcggttgatgtagtcgcgcagcgcgtcgtcctcctccggcgaccacgggcccctcttcaccgcctccctgtcgcagcacggcgtcctccccatcctccacacacaccaacacaacacctcctcgatctcctctggatgacaagggagggacaagaagacgcaagcaagaagtggaggctacttgtattgtattgtacccgcgccgtgtcctgtcctcttgctgtgtcctcgtctcgtcgtctgcaaggtcttataaaaaaaaaaaaaaaaaaagggggaaatcgcgcgctgggtgggagaaagagagaggaggaacacggtgaaaagtgtggaaaaggaggccgaggtgcagtgaccgagagggttcagcttcagcagcagaggctgcagtgcagagtggcgtttgtttcccgtttcgatctttgattctcgcctgcaggctgcagctgtgcaggcttccgtttttcttgttcagagtactacaaacagtactagtacagacgcaaggacgcgacaaagtactccagtactctattctctcaattggagtactgcgagtactccaatattttcgctgacaggcaatggtactactgaactgctagtgttatgagaatctactagtgctaatgacaggcaatggagtggagtatggttttgtttacatcagtggagtaggagtatctagttctacttctttgtatactactcctatacctgtattggtctgtgaacagtttgtagtaacaagaatgcaagaggtgtagttgcagccggcgtgaagaagaacaccttgcgtttaccccgacaagcatgcaggcgtagttgcagcgtttgcaggcaggcacattttttgccaccaattgatggacgatcaaactggccgacgtggtttcatcatatatcccgtttgctcttttcgcttattatacacacttctatctcaacccatctactcctcctgcatctttgcagtagcagtttacccaaaggcatatactctagtggttgtagtaagctgagtagcaacttaaggtcctgagtttaaatctttatctgaggggctaagttctttatttaaactaggaaggtggcccgcgcgtatacgcagacacttatattattgaaatataaaattattgtttgttcagaaattttgtctcatagatttaggacaaactaaagtttggataatgttattttataataatttaagggttctatttttcttaaggtatcttagaaaaccattcacgaacttttgagtaggagatggattaagtatttacaacttttgaatcatgtttttttttctcgagtaaataagaaactattggtagttaattatcatgcattccatctatatacatatcatgtagtatggccgcaaataaaaaatgcgagtgcaagatactcaaaatctttgattaaatcgtctcatgaatacgcatgatatagtaataaagggagttaagcatatgcatgggaaaaaaggaagaaagagaaaaatgaaaaaagggatgggaggcgtacgaacccgcgcacgtaggtacgcacctatgctgaggtgggaccctgtagtatttagtttattctaagatcaatttaatctaacggtttataatattggacctaccgatttaagtggaaagtaagtaatagatactttgattttttttcttataatttctaatatttgccctaatttattagagcaccacgtggtagcttgagagcattttaaggaattttaaatgactaattagaatattaactgcgcaatatatatgtatgggacatatggtagtatttagcttcgtccatgtttatatacatgtatagagaaattaattttgtggctagcaagccattagatgtctaattaatagaaattaattttgacacatatttacaattgttcagagtaactcttacatattcaatttacgacttcgatgatccgttgatcaccaatttactaatcaccatgacttgcatgaaaaaaaatgtagtaaggtttaggatagatgaaattgatgaattatataatttatgtgatagctatttgagggtataaacgaatgaattgctaaaaagttataatgttgtttaaagaagacaccatttagaaacttagaaagcatgcaaacaaaaatccaaaatatggaatcgggaaaaaaaacagagtgccttaaactccatttatcacccttgtcgtagtaagagttctatggatattcgtcaatattacgctcacatttataacataatgattcctttcacctgtacgaatagatagtacaaaatccaaatacgacataacacaaatacattacaattattatgtaatcaattcttggtttcaacttaaatagagctaattagtgttgagaaaaacataacccatggtacttaattattctctcgctacatcacacctttcattttcttttcatgttattaacaaaattaatcatctccatatatgatttaatatgtggcaaagcggtagcgctacatcggttgtgatcaccttagatgtctcagacactacgctttgtcacacgtgtgaaaggaaaaggtgcagacgtgcattgtgcagcgggcaaaaagagaatttcggacgctttattcattagcaaataatagatctgatgattataataatatgtccgtcagttctagtgtaagtataaattagttaatatatattttaaattgttattttaatgggtacacatggtgtgcatcttattttaaagggggctgctatataacggaatctcattttcgaacgggatgatcccgagtaggtattaggtgtgatacctatcaggtatcagacgattctacaaaacaggatgatcccgagtaggtatcaggtgtgatacctattaggtatcagacgattctatacacgttttaggtgatacctgcgaagtatcatgtgatacttatcaagtatcatgcgattttctaccacgtatcgcgtgatactcacgaggtatcatgtgaaacctgtcaggtatcagatgatttcaaccacgtatcgcgtgatactcgtgaggtatcatgcgatacctgtcatgtattagacgatttctaccatgtatcacgtgatacttgcgaggtatcggatgatacttaccaggtatcaggtgattcctactagatatagctgggcatcccgttagggtaggagcaccccgacacgcgcagtcgccccctgcagccgtcccttgtagacgaggatggcgacggcaagggcagaggacgggcgcggcgacggcggcggtagcgggggataggcgcggcggcggcggcgacggcggcggcgacgggggacggacgccgcggcggcgactgcggcggtgagggacaacgacagcagtggtgggggatgggcgcggcggcggcggcatcgacgggggacgggcgcggcaacagcgggggacgcgaatcgcgtttgtggagaggagctatcccgttgggggacggtatcccgtcccctagcattcccgtattttaaaatagtgcattacttgagaataatagaccaatgtaataaaaagtagatccgatgatttatataatggggccatcagtttaagtgcacgtataaattagttaatatagatattatttatttgataggtacacgatataattgtgtaaaatttattttaaaatagtgcattatttgaaaataatattacaaagtaaaccggtttaagttatatgatggtagattatttgtttgtaaaattataattgtttaaaaatatatccattatatatataaatggaaaaaaaagaagaaagaagaaaaaagaaaaaaaagctcgggggagaggaacgtacgtaccatctacgtacgtatatactccacctgccaatgcgcgggagaaggataggtgggacccatggtatttagtttgttttaagatcaattttacctaacagtgtataatattggacccaccaatttaagtaaaaatcaagggacatatgttttgcttttttcttagaatttataggattttctctattttattagagcgccacgtggcggtttgagagcgtttgtagaaagtttcatggacttttagtatataataggtagatagatagatggatgcatatgtccggttgaatgtacaagccgagtaaaaaatacccttctctaaaaaaataaaaaaaagtttggctcatgatgattagtattataccttgttattcccctttttttaaactattgttcttttacctggagtcctggaccatatcaagcacaaaagtgagtcatccatgcaagtaccgtacctgaaaacagaggcaacttttggcaagtcaccaaatttaaattttaattactctgtgttcccacccctcttttaaccccagatcttttgtaatgatcatgccgtacttcgcacacggtgctttaaaaagttttaaatcgagtactcatgtctttcgagagagatgctaatcagtaacctctagaccatgattactgaatcccatccatgcaagaaggggtttgcagaccatgattagacccataccaacgtgattcgttttggataagtctccctaaacattagtactaatcaccaattcaccgtcgtcgtgaatcgtgtgatcaccaaaagcaaatgtgatttgattttggtcatggcaggcaatgatctgtcgtttgcagagacgaagaaaaagaaaaggaggaacctagtgtgcccacacgaagaagcccgcggccagcaaacggacggcccagatgttgacacgtcggagggagcttcctccctcgaccgtatgatcgccggaggggtacgggtctcgtggtcgggcccgattggtgaaaggagacctccgttttgcgagtaattttttagcttgacatttgggccgtgttcacgtcagctttcgatccatctgcctggtggtgggcccacgaaattgccttgtcatttccgttctacttcatcccatggtcgatatgtattgaggacactgtcattagtctcgcattttttcaaagggagaaaaaaataactttatattagtcgtccatgactcatggtgtgggtatttaattacctggctggtgtgtgtaactcgtgttgaattgagtcctagatcaatggagaacgtcatcatttataatggaggcatttgcaaaattgccaccggttttttcaattttccaagaatgccacttgaataatagctctagtagcatttttgtaattttctagtagcagtcttgcaataacgatttaaagcagtggtaaaattacaattgcccctttataatgcgggtttaagctgcgcagaacataatcctggcaaattgtcaaaaacatggaacacaataatggcaagaaacacaacagttctactctgacacttgtactaaacagtttttcattttaggtactccctccgtttcacaatgtaagtcattctaacattttccacattcatattaatgctaatgaatttagacatatatatctatctagattcattaacatcaatatgaatatgaaaaatgctaaaatgacttacattgtgaaacggaggaagtacaaattaattttttttcagcgggaatattttgagagttcaaaccaatgtagaacaacgccaatgatggtggtgcatgtgcatctttcgtgtaactaaaaataaatataaaggaaatgagttgtattttcaagaataaagtcttctttccatcgagctcaaacagttgtgacattttgggtccctcgtctttccgtcgagtttaaattacatccctaaaccacaaagtcggaaatcttcacacttaacttgtaaaaaccgggttaaattatatcctatgacagtatgggtggctgtcttcgctgacgtggcatccatgtcggtgcccgcacgaggagtaggtggagtacggtggattcggcttggagaggcggcagatgacgtggttgaagagcgactaggcgacaggggtcggcgtgctagcgtgcgtgtggatgaggtgcgcgcgcatcgactgtagcgaccaacggggtggttggttggaggcgtgggatgccgccgtgctaggccgcgcatggggggtggtcgagggaattggaggcaggagagggagggggagacggccagcaagcccgtccaagctcgagctcgcccggcctccgtacgaggggggagggggatggcgtgattgagaagtagtcggacgacaggaggtgacgtgcacgtagacagtggatcatcggagcgcacctttccgacgcttcatggtgccctgtctacaaggaggagttcgagcttggggaccagatgccgtgcaagcacctataccactccggctggcccgtagctcttgcccccgttcacaaccacatgcaagtaccagctgccgtccttcaccgccgtcgagtccaacgccaacaaccaggctcgctgcaacaccacaccgctagctagcaacggcgacacggtaaaatggcccgaacagggagcagacaatcgtgaggtgtggggcctgttcttgtggttgtggccaccgcgagggctcgaagaccacgacgacgggtgcaaacattggcaatggtgactcagcaggctaacccagagagatgggcccggtcaacttgccatgtaagtgaaaataggggattatagtgccatgggactcaatgtgcgcaggtttgtgccccgggccggcacaagacaagccggaactccggaagctggtgagcccaacctgctcctgtttctgggcccagaaagtttgtcatgggcctggcctaacataaactgctttgcgatccaagcccaatacatggatgcaggccgtaacagagtaacgctgcccccgttctgcagttcaagtggggtcagtgtacaaaccagcgaagctggatttcttacattttagccattgtacacatgttttttacaaacaaaactctggaataaaaacttattctaaaaatacacatgttttttacgccttggttaaatttcttgaggtcaacgacactaatgttgatactctcatcttttatggtagctaagtcgacgaaacggctaatacgcgactagtcgcactcaccctcccgcgcgcgactggacacgtgtcgcgcgcggagaggaggcggcaacggcgcgcgtacggtccctttttttggcgtacgatttctttttttttctgttttttttctcttccgtacctttcccggttttcttttttttctttttgttcttctcgtatatttttctgtttttccttttttacacatacaaatacaaactttatatacacgtatataaattttgtatacacatatgtaaacttttatatacgtgtatacaaagtttgtatacgtgtattttttggtttttacacatacgtataccaactttgtatacacatatataaagtttgtatacacatatattttagattttttatatgtatacacacaaactttatatacaaatatatcttttatacattaaaagtgcatatatataaaaattatatatatgtacatatatatagaatatacatacgtgtgtgtatatatagtatgtatagtagtactccgtaggataagagatcagac

SEQ ID NO: 3581 - DNA, 3495 bp, Oryza sativa
ccccccccccctcctaagtcaagagcatatttggaattgaaatatttatattttaaccttctttgtaagaaaatctattttacaaatagatctcatcgctaatccctctgcatctcgtctgctacggtttagggcgacaagggtatgtcactagcatcgagaaatatgtttattcctaaataaatttgtctatataattatctatttgaaaaaaaacgttattaaaagggtcaagacataaaataagaaaagatctggatccaacaagcttctctgtcagggacaccgcaacagcacgttaaacacttcctatcaactacttttgtccctaaaaattaaatatagtactcgctcctcgctctgtttcattataatacctccgattctaaatatattatgccgttgacttttttaaatatatttgattgttcatcttattaaaaaaatttaaataattattaattcttttcctatcatttgatccattattaaatatacttatatatatacatatagttttatatatttcacaaaagttttttaataagatgaatggtcaaacatgtgctaaaaagtcaacggtgtcaaatatttagaaacgaagggagtaagacgttttgacttcggtcaaagtcaaactgttttaagtttgactaagtttgtagacaaatatagtaatatttataatactaaattagtttcatcaaatcaataatttaatatattttcataataaatttgtcttgggtagaaaatgttattatttttttataaacttagtcaaacttaatattgtttgattttaaccaaagtcaaaacgttttataacctgaaactgaaacggaagggagtataagatattgtataacatattactaggaatcagtatatgagatcacatattaatacatagggcctgtttagatactttggcaaaaatttttactctgtcacatcgaatatttggacacatgcatggactattaaatataaacgaaagactaactaattacacagattgtgtgtaaattgcgtgacgaatcttttaaacctaattacgccatgatttgataatgtgatgctacagtaaacatttattagtggcggattaattaagcttaatacatctcacggtttacatacgagttctgtaatttattttgtgtactttaaatatgtgtccgtatatccgatgtgacacgataaaactttacccctatggatctaaacacagcctataatttgtaatttgtgcagcatcagcattcatctctttgtcgtctgcaagtcagcttctcccagtttgcaataaaatcagcgagttccgagatctgagcgacagagcaaccccaaacaatgacacttctggctatcaggattcgcattcgggccatccatggacgacatttcccgcatgcagcagcgtcagcgtggcaattgtccgagctgccatggctccacgtggtgcgcatgtacacactgtgcttgcaaatcaacgaggtggactttggggcatttaatccggcacgttaccgtctgcctccgttgagatctccgacaccgacaccgtgtgactgaccacagattctgcaagccacacagactctcaggctgtgtttacttcacgctaaaattgaaagcttgttgattaaaattaaaacgatatgatagaaaagctagaagtttacgtgtgtgtagaaaagttagaaaagtttttgatgtgatagaaaagttgaaagttaaaaaaaaaagtaagaaactaaacacggtgtcagtgacaccagtgcaggtctgcgtttgtggcagtcgatgtaagctcccagtccgatgcacctcgaccaaaccacacgacgatcacggagacttcgccgtttctgctgaagatatcgaagagatattgctgtcaccgagtatagatgattggcagatgcacttctcttgatccagacgcgcatgcgcgggtcaacacaaggttccatagatgattgggagtgtgcttagggcacccacaatggttatctatatgctctctataagagatccatgtcagcatattttcctacttggaagagattaaatgaagagagagagcaaaactatctactaacctggagatagtctatagagaaaaacgaggtaatggattagagagctataaatacccatgtagacatactattgaggtggtttactattaatctagtctattgctgagatgtacatgttttatagagagcaccttactttaccattgcgggtgctcttagagcaagttaatcgtatagccaactactatatctctaaatgatctataggtaatataatagtcaattcatacaacagttgcttactacactattaatatctagtcccacctatcatatactctctccgtcctataatatagcaacctagtacgggatagacatttcatattacaacgaatctggacaagatggtgtttacattcattgtaaggctgtgtttacttttctgaaattggggagaagtttggggaaagttggtagtttaggaaaaaaattgggagtttatgtgtgtaggaaagttttggatgtgatgaaaagttgggagttggggggaagtttggtgtgaactaaacacatcttaatattaaacgtctcatccgatactagattgctatattataggacggagggagtacacattatgtcttagagtccgtgctgcaactggctacatatctgtatcccactgctcctctctattattttatctctttaaaatatgtttatagctgatttatagtctactattgtacatgctcttacaaagcaccctcttcgttcttaaataaacaaatataatatcaaatatagacatgctcttacaaagcaccctcttcgttctattatttaatttttttttataatttgtatttttattgttagtagatgataaaacaagaatagcactttattcataactttttaaaaaaaattataatttttcaaataaaacgaatgatcaaatgtaatgttgaacatagaaacccatgactatacttaacttttgacgaagagagtatagtattgcttgaggagtatatataaaactatagtatttcaaccttcggttcaatttaattagggaactgccatcatatttagtttattacttcctttaattataagtatttaatgtttagcgcaagatttatccatattgtattcaagcaactttataaaaactattatgtttattacattatggtattattttttgaagaaaatttatgtgtgacaactttttgttcttaaactaagcattttgagaaattatcgatactcaaagctttaagattttgactaaatcattttttctaaacattaaatatgattaaagagagtcaatatagcagatccgctgatattgttaagcccggacgacgaagagcatttgctaggcagatcaataatttttcacacgtatggccaatataatatcataatagca

SEQ ID NO: 3582 - DNA, 581 bp, Oryza sativa
ggctacatgtcaaagaaataaaagatacatggatccttcaaaaaaaagcaacaggtagatttgcaatgtaggagtagtagcaatctccacccacacaacacacatctgaatgtgcatctatgcagtgatctcggatttggcattcttaacattttcttcatctttggttgatgccgctgctgctctgtcctgctctttcttctgcgcccttatcagtacacgtcttgcccggggacgcatctcacgcacttggcgtggtggcatcacaaaaggttcaagagggcgatcatggaatggatgctcatttccagaaaatatcctcagtttgcgatccctgtcctgtgatcagaacagtgcatgcttaataagcaacaacagcattatatgaagctttagcaatttgaagacgagaattgaaggaaaatatagatgttttaccacacaccagagaggaaaagacttgatttctcggacagaatagagttaaatcacataacaaagaaacaccatgaaagatcagtatacaactatcatgtggaacatgaaccaagaaggtatgattggatttacggtatgttgaa

SEQ ID NO: 3583 - DNA, 583 bp, Oryza sativa
gtgagtactatgaccagatggaattggaagggaaaggcaaactgcgggagtttggtgacagggattcgattttgcgtaattactcaactgtgctttatttcattctgaggctccgccagctctgcaatgacatagcactatgcccattagacctgaaatcatggcttcctggcagtggcagctcccttgaaggtatggcattttttcctgtttgtaattctggatttattttgtgatgatataatatggccataatacactcatcaaaattaaactgtgctgtttagattgaaccatcttgttgccaaagagatttcgcacactaagcattgtatgatagtagtatttcttttgatttttcttagaactgttccatcttactgtagagtgtcaaactagcaagttgagtgtaattggtttatctatttgaatcgacaaattgcatcagtacattggtgcttgccagcttaactttacaaacttgctacctatccgtcattttctccaatgggtcaactgctctgttgattatatcaatataacttagtaaaccgcagaaatcgctgcatagccagtgaaatca

SEQ ID NO: 3584 - DNA, 656 bp, Oryza sativa
actgatccctaagctatacacaattatacatgggaagaaattaagaaatataggattgacctgaagtttagattccaggaatgagaggatgacagcaggaatgatacccttcaccccacctccatcaatactcagaattgtgatcatgtttcccttgcttggtggtgggcatgcacaattcttctccatggcagaggcaaacaagtcagctgttgatcacttgcaaatttctctctctggtggtctttctcaacaaaggagagctatttataggtgatgagggaaaagataactcaggatgaaaaaaaagtaaaatgttaactttgaaccacaagcaatgtttgcacgtattttacactcaagcattcagcatctgccaaactgctggcaagcttatccaagcttgttcatgcgttgtatgtatcttcttccaatggtccagtaagatatgaaagtctcatatcttcgaccatctacgtgttttgccacctttaaaacaccacttttatgttctaattttggctctagttgacaccccatatgagtacacacttttatgccctgcaagtcatgttaacaccaaatggaaactgacaatgcaagtaaacattcacacattctgtcacctgctccctcaccctgacctttaatgctct

SEQ ID NO: 3585 - DNA, 612 bp, Oryza sativa
ggctaaattgcgaagcgtgcagcacttttgcttcgctagctgcctctcctcaagtcgctgcgagtgcgagtccacacaacactgtgaactcccccctctcgagcaaaaaaaaagatccaaaattttttcgccctggggttcgaaatcttcgtgccttcctcctcctcgcggcctccaattcgaacgccccagttgctcgcgccgccgcggattccccagatcccacctcctccccagctcgcgcggcccaattcgaagccggttctagggtttcccggcacgaatttagggtttcgggggagcttcggggggtgttgttccttgttccgcctagggtttggaatttggggggcgtggagagatgggataaggagggtgttgggagggtgggagctttgcttggggtgtgtgtgtgtttgggtggtgctgagctgagctagggtttggtggtgaggtgctgaggaagggaggtggggggtggaaaatgttctactcgcagttcatcttggccaagaaggggccctcgggaccatatggatcgcggcgcatttggagcggaagctgcggaagaatcaggtcgcggatacggatatcggcgtctccgtaggtggg

SEQ ID NO: 3586 - DNA, 1147 bp, Oryza sativa
caactagagtatgttctggatactgaacagtgagtcgcagcaagaaaaaggaatataaaacagatatatgtgagcagcagtagaaaaattcagagcatcgagttcttagtgtaattccttaccttggaagaagtcctctagcatctggcatttctttgctataatagaacctgcttttttgggctttttgtcaaaaatcatccgcagcaagcgggcagcgacatcccgtttggaatttttcatccccaagagattgagaaacaggtcccgctggccatatgggtcgagcaaatgaatggatgagaccgtactgcagagccacatccgagcctcatacccacctccagactttataaccgacctgattataggctccaccttgccaagaagagatcgccttgcttttacagcatctgtatcaacactaccaccatctgtggtcccttgaaaaaagagttgaaccatcttcaagagagattttctacctcctgaaattgaaagttgcaaattgcaataacaatgtttcacattctccagtcctcattgaagtaacgcatataggtaacactaaaaccttagattgccaagtaaaattcaacatggatttaacttagccgagatttgatcccaacacctatttatctgttgaaacgtcataggtaattttaatcggaaaccctaaactgaaatgcaaaatttaaaagttcctggctaggaaaatagaaaccgaagcacaacaggtaccaactgagacctctacggcagcggggcaggttagcgtctctcacgattcacgaacacctccaggccgaccaagtcatggagaagaaggcgaggcggagatgggaggcgaggcggaagagcagcaaagaggaaggggcgacaaggaaaggccccctgcccgagaacggcgggaggatgtggcgtgaggaggaaggcggcggcggttgcggcggcggatcgagcaggcgaggagaggaaagcctcacaactcccccgagcaccacgatctctctccagctccaagaggactccgtgattgcgaccaaattctcgaccaatttgatgaacagattaggagcgcgacgcttaccagctgggcgcggcgggggttcccagttcccactagggcacgacgaggaagaga

SEQ ID NO: 3587 - DNA, 692 bp, Oryza sativa
gatcattattccatcagttcttgtagttgaagaacattttattttcctgacagttttacattatacaaaaataggctgtgcaaggtggtgaagtaggcttggttgtcgattgtgaatgggcagagccattttcagagaaaacagaagatcaggttgctgcagaacgaaggcttgactttcagctaggatggtataatttctgctcatattacttgcgtcacagtttcccacattagctacctttggcacagtgttatgctgcaatattgtttctgaaacaagggaaagcttctaccatttttttcttcaaggcaaaaaatgttttttcatggtataatgttatgctttgcacagtattgtcctgcatcttttttttttcatgaaacatggggaaaatgctgaattttctcccacaaggcataaatgctttgtgtatacaccgagagaaattgtaacatgtttttttttcatggtacaatgctcccacatcttttggctcagggaggcttaggatattgcgtgtcatagtcttacataggtgctacttttccttaaaggtacctggacccaatatatttcggtgattacccagaaagtatgcgtcagcgactgggcgatgatcttccaaccttctcggagaaagataaaggatttatcaggaaccccaattgtgtatgttttaagggattcct

SEQ ID NO: 3588 - DNA, 1516 bp, Oryza sativa
  unsure (1)..(1516): unsure at all n locations
cccctttttccgcaacatgcccacgcatcgatggagaaagaaaaccgcgacgcatcgggtgcccatatgaaatgaatgaatattccgccgccgctccagcttccggtgcaagccgcagcttggtgccaattttacggtgaggtgaccgttgctntccacagccccaacctccgcgcggcctcaaccctcacctgcggcgaggatcggtgctctactctagtagtagtactctagagtctagtctagtctactctagttgctgcgttcgctagcattcggaggcgatctgaggaggagaagtggggagcagcgaaggttttgatcttttggaaggagttggattcggctttctgggttctgtctgtcgcttgattccaattcggatttcttgctgttgttgttggggtgttcgcggccgatttgaccccggggaatcgctgcttttttatttttttgaaaagataattctacgcggattagatttggtcaagaagtcgtagtacgaacgcgaggtttgatcttggtttcgatccgaagggtctcggttggctgcgtgggaagggggaggaggaagaaggcgacctgctatctaatcctctaccccctctgctgcgaaaattctctgctgtttgctcaagcatcttgctgcttggagccttggatcgaagagagttttagttcttggagttctgagaattgtgttgcttgagccgaattcgatcccaaaaaggctcttttttgggaggctttgaggaggaagaagaacaacatgggggtgatgtcgcggcgggtgctgcctgccttgcacaacctctgctacttctgcccctcgctgccggcgcgctcgcgtcagcccgtcaagaggtacaagaagatcatcgcgaagatctaccagcttccaccggtatggcgattactgaatcctgtcttggcatttcagccatttctgatgcttagttgtagcctctgcgatttgggtctgtggtcaaatagttctagtttctgcgaattggagtctgtggtcaaatgtgtggagggagtttgttgattgagggtgtgatgttgttgctgtaggatggtgaaccgaatgataggaggattgggaagctctgtgattatgtctcgagaaatccgacgcggatacccaaggtaacacattttgatctcctctctgtttttactagaattgtcgcgcaatctgttagcttgaatagtttagactgaatttccagtatttctgaaagcagtctttataggtaccgagtagttaccacataatggctgatttacactgcattgctttagtgtgatggtgattccttttgccagagtacaaccgatcaactttcgctagcaccgatcactagctggaatgattttaggctgtttaagtaggacttaccgagatgaatgaatttgtggaactcggaactgattttatgtctgcagatcacagagtaccttgaggagaggtgctataaagatctgagacatgagaatttcaccttggccaaag

SEQ ID NO: 3589 - DNA, 2073 bp, Oryza sativa
ggtttgtatcttcgattggatcttgaatttcctggttctttgaaaataattcgaagtgataatggtggtgaatttaaaaatgctttatttgaacaattttgcaacggaagaggtcttgaacatgaattttcttctcgtgttccgcaacaaatggtgttgttgaaagaaagaattctgttttggttgagatggctagaacgatgttggatgagtatcacactcctagaaaattttgggctgaggcggttaacactgcatgctatatttcaaatcgggttttcttgaggtcaaaacttggaaaagcttcttatgagctttcacatttgcgtgattttggttgcaaatgttttgtcttcaaatatggaaatttggataagtttgaggcacgctctactaatggaatgtttcttggttaccccgcacattcacgtggctatcgtgtacttgttttggaaactaacaaaattattgagactcgtgaagtttcttttgatgaggctagtccaggtattagagccaaaattgcaggtacaatgtcacaggttcagagggaggatggtcgtatttttgaagacgagagcgatgacgatgacgacgaggtcggctcggccggtcaaaccgggcgccaggctggtcagaccgccggcacactattggtatttcttaacgacattattagaaatatatttcacagcaatgtcgcataaatactcttggtatattatggttacagagttcatccgcaagcgcacggatataacattttagcattgcacccgagagtattccaagggtatcgtatttattttatcccgtgggaagatcgtgtagagagaacttgactaataatttatatgttacttgtgataatcatattctaaacatgggttaagataaaccaagcgtagaatgacacacaagcatttgctactcattcccataatatatgatgtaagccaagtggaaagaaaagagagagagataatctattcctatacttctagtatacatagtatacatatattctagttaactgatatactagctaataccctctatccgatgccctcctggtacttcgagaagccacccctgactgccgagttccttacgacagcccgtcatgaccatacaaccggggctaaaacggaggaataccctccccaggaaattaacttaggactatatacaggcgcggaggaatacccgtactgagctgtcaccatcagcggcccacctatcatccgcagcatataaccccaaataatgatatcccgtaatctagacaccctgtctaaactaccagatactactctaatatcatcgtcatgacatagagtaattgcatatgcaaacattatacccgcaccaaagcatctcccagataagctagcagcatattcagtataacatgaacataatgtaaagtaggcattcgtatactcgaaaaatatttcaataccataaatgtatatagaagagtattctaataaaagtacaaagcttacaaaagaggaaaggaaagctactagagccatacccgaactcttccgaagacttccggactcctgatttctactatattcctattccaccagctagatactactaaactaaacttgagagagtatgagaaagcttgcttgaggtgtgtgagtgaagtgagaaagtgaagtccttatatagaggtagttatgacggttgtggaaggggaattgtccgaagtgccctccaaccatcattgggatgcaatcctggacgtccacgccgaaccctgcatccaacggcgccatgatgggttcggccgaaccatgggctgggccatcccggcccatcttcggctggcggcctcctctattgcttcactttgtagacttgtgaattttggcccaatttatcgtgtcaattccaaattcctggcccattcatgcataagtctgattctcaacatcattcgattgatttatcgtctgtgttgatgtcgattctcctccactttatggttactccccgcaaaaggttagtataccaaatactagtggaatattattattgtaacatttatatgcattg

SEQ ID NO: 3590 - DNA, 1291 bp, Oryza sativa
ctcaaagctattttgtaaacacgattctagaactatgcaatgttttcagcccagcccaagaaggaaacaggcccgcaggtatctttccagggtataaaagtgcaaattcccctccggaaaccctaatccattcatttttctccttcctccccctttgtggcggctggtagactgagctgcgacgtgcaagcagccggcgccggcgcatgggagcagcatgaccccgtcgtcctctgctttcccaacacgatcttctccctccatcttctcccttagtccccaattcgcattccctttcccttgctgatggtctcgtgcaatcaaatctgcagtggacggtggccgtgtgcggaacaatggcgccggtgctaaaaggtaacaaagccggcagccggatcatggataggggcaacacaactgcctagtccccagatgcacccattaacattggttatgccatgctcaacggtgcaatgcatttgttcttcgctgatgcttggatagttggatgtgccaatattgtattctccttgtgtgttgatcctcgtatgattgcctattcatttttttctgttttatctattggttgttaacaaattgcctcaaattttctaatgatggttcaaattttgcaacaaattcggccaaattttgtccgaaaattccgaaatttccgaatttcgcccatttcggtaaggcccgaaattttctgcaattgaatcccagaaccttggtggaggcggcaatgaaccgcaagaacgtgtaggcgctcccgcaggaggagacggtggagggcgggcccggagtacgcgtgggtgcccgaccatgagaccggcgtgttcgtccccgccgacgagggcgccatctccggcaccgaaaaccacgaccactcggataacctgttctttgatgaatcttgttgtgtttttatcggatggaatttgctgggattgcttcgaattcgttgacgacgccgtcgatctcgatgaggctgcagccggggaccttgtcgatctcgttcctcctcatctgcctcctcaccttcaccgcctcgccgtgccggccattcgacgcgtaagtgttcgacatcagcacgtagtcgccggcgtccgcatcggcgtcggtggtgcgccgccgcatcacccgctcggcgcgctcaactttgccatgcgcgcggcatgcggcgagcagcgagccccagatgagcgcgtcagggtgtattggcattgccgcgacgagctcctctgcctcgtctagtctcccggcgcggctgagcatgtcgacgacgcag

SEQ ID NO: 3591 - DNA, 3105 bp, Oryza sativa
cggagcgttcttcaggtatgtccttctcatcttaggattaaacatgttttatatgctattatggtttttagatactattgtttctattagcatattcatgtttatcaccatgctagaatcattctctattgggcatgtcatgtttatgttaaatttctagattaaaatttgcgtattatgactagatttccatcgggagaatttacatttttttccatcctcccaatatataacataaatattttcatgtgtacgtcattctcccaaattttcatgcccatttgccacccaagcccacatatgtcagcctcatcctccatttggaaaaatgggatgttggaccgtgatggatgaggctgacatgtaggcccaaatggtaaatatgcatgaaaatttgtgagttgtatcagggcatgagtattttggaaggatggtaaatactagtgtaaattctctcgatttggaacatacgtaccgcttgttcttgagacggtttcgaagattctcctcgtgagattcgctaacatcatattctccgaggcacacctgccggactatgtcggcgagaaggtcgccgacgtccgtccacctggacgcgtcgacccatgcgcgctcgcggaactggcggccggaccgactgtacaccgcccgtgcgagggtggtcttccccgatcctcggaacccgacgatggcgatcacccgcagctgctgcggcccgccgccggcaccggcctcatctagcagctggacgagatgctcgataggcttctccatgcccaccgggttcggctccacgtgaccgccgcggggagctgccgccgccagcgccggcgtggcagaggaatggccaccgccgccggcggcggcagcggcctcgacggcgttcctcaggcgtttggtctcatcttccaggcgcgtcttcagcttccggatctcggcggcgaaccggaggcgggtgcggagcgtggccacccaccgcgcggcgcggcggggccagctgggcgcgccggcgccgccgtggtcgtcgcgcggcgcgacgcggtggaggaagcgctcgatggagtcctccatgtcgtgcgtcagctcgcgcatgagctcggtgtacgccctcagcacggcggtcggcctctccgccgccggcgatgacgacgaccgccggagctggtcgtccatgaacgccgcgaggaggaggaggtcgttctgcatggaggcgctctcgtggcttaggtccctgagcatcttgtacctcgtgtcgagcacctccaggagcttccccacgacgcacttggtgaaggcggtcgccgccgattgctccatcgctggaagtgtggaacgtactacaactggtaagctatttcttactagcagtactatatagcatatactactatgaagtttgtattccttcgtttccccagttattgcactgttttcttttttacactaaaaagattccaactttatgaaaaaaaataaggtttttttccattgttcgagagctttatatatacctacccatattgtttgaaaggtaaaaacataaaaccggtttaactaattacattattagaagacaagtctataattaacaatagcgagacatttttaatctaggaggaatagagagctatatatattaatatatctcagaatgttagttacaaggtactcgctccgtcgcaaaatataacaatttttagtaggatgtgacatatactagtagtatgaatctggatagtctgttcagatgcgtcctatccactcaaaaaattactatattttaggacggagagagtatatatatgtacactacaccatgtaagtaaggtagcaggaggtaaaaacaatactgccgacttctatttatgtacacgaacgctgcaaatagatcgttaaaagtttatctcaggttgattgaaacttgtacttactgttatggctaagtaatatagatcgaatattataatacatatagtatacttcatatatatagaaatgaacgatgctctggtgctctctatcgatggtataatactaccaatagtattaagggtaaatcaaaaatttactaataaagtgattagggtaacattggcatttatgttttttcccggctatatcaatatgtggtcatccattacaatccattacactgacatcgatcatattccatcgaaagagacaaaaaagaaggaaaaaaatggttttttcactactaaatgacgattatacccctcctatcacacctggagtttccccttttccgtagattctaattcaccaataaattgactatagaaattactttggataactaggagaaaaccctaattaacaatgtatttaataatcggaaatgttagggagatttttttcgaattctcttgctccaaaatcattaacaggacttaaagcggaatattcagagcaacagaattgatgttgttaatttaaattatcaagatttgaattaataataaattttctccttgcctttggtcgtgaatcatgcctgattcactcctctcttcgtccgtggtttcgttttgcatgacgagccaagtccaatttcgtttccggtaccgtttcctttcctttccttaaacgtcgtcgttgcgtcgccggtactccattctccctctttattgatgtgttttccgccgcaaacatcaattcatctatttaatctattcagttgtttctcatctagcgtcgccgtcgatcacgtgtgttgccgccggaaccgccgccgccgccgtcatcatccctctccgggttccgttctccggtgaggttttcttctcgttttagggttaagctttttcgtgtgtcgccgtgtcgtgtgtagccactgccatgcgcgccgttgccctagtcactgctgagccgcagccgcccaaccgcgccgccgtcgccttgcccctgccacgcgccgagccgctgctgcagccgtcgctgccgcccctgagccgagccgagccgccaccacctagccgtgccgctgccgcggtcccgcgtcgtcgttgtggttttctcgctgcccatacctaccggcctatcgtttgctgtaccgagtcgttgccgctaatagtgcttagttgccgc

SEQ ID NO: 3592 - DNA, 1244 bp, Oryza sativa
ccccatgccatgtagtaaggataaggataacccggcggcggcattgggtaaggcccccatgacatgtcaagtgaatgatgatatggaggtgattgcgaccgtcttgatgagtgaccaaatcgctccctaggaggtaatcttggtcttttccctttattgcgagctctctcaccaccttgcttctcatacttctccaaaagcatatcgaaggtcaccttagtcttcttaggagctttagaagttgagacttcgctcctattctctttccacacaccaaagactggattctttggcaccatcatctttggcctagttcaccaatgatcactcattttcccttagtagattcggcttgctccggccgaatcaacaccttcttatcattgaaattaattgtattcaccagaaaaggatcatgattaagcttcatcttggaaccatcggtgaacttcaatcgtccttcatctatggccgattgaacctatcatcgaaacacattgcaatcattagtagaatgagagtgagaatcatgccatttacaataagcacgatgttggtatttaatacggtcacagataaaatccgcaagcgcacggatataccaatgtagcacttcccctacggagtattccaagggtatcgaatccaagggaacgtgtgtggtcaaatcttcctccagttcatccaaggataccaagcaaaagataggttaggatagagaggatttactagtgagaaggagaaacagtatctagggaaagcttaactttaatcctaatgcaatacttcaggcactggcaacccgctgttcccagatgtcactctactacgtatccagacagggaggacttaagtgatctcgagggctgtcaccacctctacacccacctaaaacgtactgtgggatacacagcaattacgggataacaattacctaaacaccacgtctaagcaattaatatttacttcagtgtttataactcaccaaagcaatcactatattttagttgattatagtgaacaataatcacgtatgctatttaggaattaaccaagagataattctcacaagataaatctaaattactcaagaagaatattatattaaattcagagtaataaatagaataaaagaaataggagaaaattaccgacaactccggaattcttctgactccttttactctactctcttcctattctagtatacaatatagtacaatagagcctcttataatttatct

SEQ ID NO: 3593 - DNA, 2918 bp, Oryza sativa
atctttaaatgctctttactgcaaccctaaccctttatagtataactcctttgtactcccttgcatttactctgcacttgtgggtgtgtcttgttgagtacggtggctgtactcagtcttgctcaatttttcccaaaccccacgaagaggagtttctagatgatgaaggctttggtgtctagctcgtgcctgccgtcaagcgcctgtggtcgtcgccctagtcttccgctgcttctcgtttgtctttgtgtgtgctggaccttcgtcgcctatgtaataaattaactatttacgcttccgcttgttaaactctgaattgtatcaacttttggtgtaccttgcctcctgggacaaggattaatgcacgcacgtcaggaacgcccgttgggttatttccggtcgtgacaggtttaaaatcaagcaccgactcttctaataccagaaataatcccttcttcacattatagcaagatgcttgttgtgacaaatcatttgctctagaattatcatgcctagcaatatatctaatagcaaaattatcaaaattggcaataatatccaagcatgagtcaagatacctatttagtgatccgtcctagcatttgtagactctggcaacttgttgcaccaccaattctgaatcaccaaaaacttccacgtgcttatctccaaccaactccatcacttgtaagccgaataataaagcatcgtattcgggttgattatttgtacaataatacttcaaacggaccgatgcctcataacacatgccattaggtgaaaacaaaactacccctatgccttaaccatctttgcaagaagaaccatcaaaataaatctttcaaggtataacttcaactaagcaaacctcctcctcataagcaatatccacatgatggtctactaaaaaatcacatacaatttggcctctcatagattttaatggttcataagccaaatcatattcaatcaaagcatatgcccacttgccaattctcccacttagaattggcctttgtaacatgtgtttaataacatcggcttgacaagcaactatgcatgcactagataacaaataatgcctcaatttggtacaagcatagtataagcataaataaaatctctttataaagacataccttgtttcggcatccaaaagacggcggctcaaatatgtaatgatatattccttgccatcttcctcttgcgtcaaaacggcaccaatgactttgtctttggaggcaatacataaccgaaaaggctttacggttttaggcgcccgcacaacgggtgaagtagacaaatacttcttcaaccctttaaatgcctcttgttgttttgccccccaagtaaaatcggcttattttttcaagcgaagtatagggacaaaagcatcgattttacccgctaggttagaaataaatcttctcaaataattcgccttacctagcaacttttgaacttccttcttgcgtgtcagtgctttgaaatcacgaatcttctctatcttcttaggatcaatctcgactcatctctcatgcaccatgatcctaagaacctcaccgccgacacaccaaaagcacatttaagtgggttcatcttcaaaccagaccggcgcatcctttcaaaagctaacctcaaatcggctatatgtccctccataccattcgatttgacaacaatatcatcaatatagatttctaagataatacctaacaaatcatggaagatcaaattcattgccctttgatatgttgcaccgacgttcttcgatccaaaagtcatgacaacccactcaagcaaaccaacaaatcctgggcacctaaaagccgtcttgtacatatcctcctccgccataaagatttgattgtagccggcattaccatccaaaaagctaatcaccttatgacccgagacaccattgatcatcatgtcggctataggcataggatattcatctttgggagtagctttatttaaatctctaaagtctttgcaaactctaatcttacaactcccctttttctccaccgggactatgctagaaacccattccgcataacaacgtggcctaataaacccatccttcaacaaccgatcaatctcctctttgactcggtcatatagcaaaggattaaaacgacgaggtggttgtttataaggcctaaaacctggtttgattggaagccgatgctcaacaagctcacggctaagacccgggatctcatgatactcccatgcaaagcaatccacatactccttaagtagctcgattattttaaccttataatcggctctcaaatttttatttataaatgtcggccttggcttaattccatcacctatgtctacttcctccaatggattggccgatgtaaaccctttaccaagcttctccacttcatcaaaatcttcaatagtttcaccaatatcgttctttgtagaccgatattcttgcaccctcttttgcaacaactctaaattagcttctttactcattatacaaattgatatggcctagccgtgctatacaagccggctttacagagatgcaagaatagctagagagatccatccccgacaagcattgaatattcccatgacgccactcaaaagtagcatcggtcattgcaacctcggccgatgtatccgcttgaacaatctcaacatcattgtcgtctcattgaattaaacattgatgcaaggtagaaggaacacaacaattggcatggatccaacaacgacccaaaataacattgtagttacctttcacatcaacaatgaagaaagcggttggtagcgtcttgtttcccacggtaaactccgccgaaaagatacccttcgcctccgttggttcaccattgaagccattgagaatcatgttagtcttcttcaactcatcatcttcacgccccaac

SEQ ID NO: 3594 - DNA, 2637 bp, Oryza sativa
  unsure (1)..(2637): unsure at all n locations
agttgaaccaccttctagacataatattattggaaacaagtgggttttcaaaaataaacaaaacgaggatggattgattgtgataaataaagctagacttgttgctcaaggatttacgcaggtggagggtttggattttgatgaaacttttgctcctgttacttgaattgaggcaattagacttttgctggcttttgctgcttcaaaaggttttaaattgtatcaaatggatgtaaaaagtacttttctaaatggttttatacaggaggaagtttatgtcaagcaaccaccaggttttgaaaatcttgattttcccaaccatgtttttaaattgtctaaagctttgtatggcttgaaacaagcacgtagagcatggtatgataggcttaagaactttttgcttgtgaaagattttacaatgggaaaggttgacaaaacactttttgttcttaagcatggtgataatcaactgttcgtttagatttatgtnatgatatcatctttggttgtcaactcacgctttggttgtggagtttgctgagactatgggtagtgaatttgagatgagcatgatgggtgagtttcattccttttgggattgcaaattaagaaaacacctcaaggtacatttgtgcatcgaacgaagtacacgaaagatcttttgagacggttcaagatggagaattgcaagccaatatcaacaccaactggttctacagctgtgttggatcctaatgaagatggtgaagctgctgatcagaaggagtacagaagtatgattggatctttgtttatacatatgatattttcttgtgtatgctagcaataatatgaaggtttatttgtctctagcatagcttgtatgtattctagtctttttaggaggcttagatattgcttttaaaggagatgatgcatgacacttaaattctatatttgaattaagaaaatatgcaatattgatgctagcatatggtttgatttataaatgctttatatatatatgctttattgaattgttattcctcaaatagctttgtaattgctcattgtgtaagataaaaatatttatgagtgagaaaaaaatgaataacgaatccttggaaacagtcttgacgacaaggacgtattcgatatgagcaaaaataatgggtgccgaatccttggaaacagtcttgacgacaaggacgtacccggaaaaaattgagaaaaaaaatatgagcaaaaaggctaaagtaaaataaaagataaaaattctcttggttgttttgtgctaaagctaatttgagaaatagtgataaatgcaataggtctatatgtttagtgtttatttttcaacctatgtgcttgttaagatgttgcattataaatcttatgaaatcatgaattttgattgttgatttgaacttaattgtaaaatctttgattcatgattatactttaatgcatgcttgctatattatagatgggttcatcttctttttattgcaactcatgacttgatatgctatatgtatgctaagctcttgaacattgacgaacataattcttatgcttgatgaaatcattgtcaaaagggggagaagcaaatgagagtttttgggagaagagaagaatttttgttggagagttgtttgagaagagcatgttttttggttcaaggggaatttctttcttttcaaaagtgagagaagttttctttcggattttgagcacgatgtgtacatttgtacgaagtgtgctttttaccactttttgtttttatttttccaaacaccaaaacatttttgatgggtttgccaatgtgttcatgaataaggagattgtaaaataaaagtgtttttaattgttattttgtgatgaacaattggcattggagattattggttttgatatttggaatttattttcgaagtggttttggagatgattggattttacaggtgatctacaggaactgctgtctgtgatttggtccggtcagaccgggctgtgtgtgccggtcagaccagcggtgatcgagcggtcagaccggccaacccgtggtctgaccggccgactctgtgttagtttcggtttcgggttatttatttggatatccatgattgtttcatatttatggcttctagatggatattatatgtatgtaatactgttgtttgctaacaatgagtcaagttggggatagcttggtcttgaaatatggtttctttgtttgattcatatgtaggtgacttgatgtctcgggagagtattgccggtgatggatcgggagtcggcttggggataagacgatgtccgtgacggtcagatatcatgtgggatacttaggctagagttcaatgcacgtggttggtgaatattcgatatgtcatacaatggaggtattgtgtgcgtatgggatgcggagtcgaatttggaaggagtccaaatttggtatgattggagtttgtaaagtttgtttcttgtacgggaaggtttcctatgtggattaggacttctagtatgagtttggtttgtggctttaggctgcctacctcatgtataaatagtgagggagcgtgaggcttcccggtatcgcttttgagagcattgagttaataggttagttaggggtttcgagtttagtcgagattt

SEQ ID NO: 3595 - DNA, 16581 bp, Oryza sativa
ctgggcacaggagcaagcaataacaggaagcgattgttgggagagcgaggtgtgtggtggtggagaaaggggcagatttgtacttcctgagctttttctctctccatttctttgggatataataaaataatgccacgagtgtactatagctaattaccggttttttttcagtagatacgcgttcttatggtgtcccacaactaattatacttttttggatgtcgtgtagcaaattttgccttttttagtggagaggggataagggccactgataaccgtaaaacatacaccgctacaaatacaaaatacattccttatcaaccacaacgaaaatataaatcttaagagcccctttgaatcaaaggaattacgaaggaattttacaggattgaaatcctataggaattcctatgtagccctttgattcaaaggattgaagttttctaaatccaacaaaattcctatggaatggctcatagtatataggttttggaggaaacttagcaagaggtccaacctcttggaaaaaaaaatcctttgagtctatctctttcatccgattcctgtgtttattatgtggtccaatcaaacgatcattcctatgtttttcctgtgttttacaatcctctattatacgcttacattcctgtcagaatcctatgccttttctattcttccgttttttcattctacgattcaaaggtgccctaagatgatttagggctcctttgaaacaaaggaaaaacggagtatgtgagttcctatggattcattcattgtagcagcctttgatttgtaggaattggtcataggaaaaccgaaggaaatattcattcgtcgctgattcaatgggagaaacacaggagtctgagctcatttttcacttgctttacgtaggatcgaagcaatcaagctcctaatgactttcttcactacagaagaacaagcaatgaatggtaatttgttttagctgcaatatatttattagaaatggaaaatggtcccaagttcttaagcaaatattcctatgtttttcctatactccattcaaacacatattcctatacatttcctatggctttacaatcctcttttttttttttgagaggacaatcctctattttacatgtgaatttctatcctattcctatgtttttcttattcctgtattttttcaatccaatgtttcaaaggggcccttaaagaatttcatcgtagtttattttctaaaattgacttttaaactgctgatatcacaaatataaagtttttattttataaattatttttaattgtttctttattttttctacagcatacctaaacaaccagagccgtagcttccattgtgtcagacgaacatggaacctaggcacaaatgtaatgcaccgggatgtcattttgtaatttctgcagttttcccgggagaatcatactagacaaaaatctacagatgctattatcatgtaggttatgcacgcaactttattactggagtagttagtagtttataaaggttaactccacatgttctcaaacgcggtctacctgcggaccagaattagcttgcatatattgtttttcttcggattaaaaacaatggaacaaatggtagaagtttttgatcttataggatctaaagatagcattgcagaccatagtaacatactaattataattacaatcaggatcctagctagatcatccaattcatcatcagaaatactgctagactgagacaatatttgaataatggataatgactcaagagatacaaagcagatatgcttcagctaatctaaaatctccaccatgtctggttaagtgcgaaatatagaaattagttggaggacttgggttttggtgcttctacttcttccgagagctcaagtgaaacggggcagtgatcacttccataaaatcctgcaaaaatggacgtcaatgaattgtaccatgacattaaacagcatattggcattaccatttactagggggaaacaaggaaatttgttcgattcattgcttgtagagaagatcatggaagttaccatgtaatagcttcaaggtgctggtgtttattactggcaggcatgcataaaatttcagttacaggtcaaatgtttatcactgaaccaagagcaaaagaggattccaaagggagcttctaaacttgcagattttttctattgtctgccatatctcctacagtctatttgcctacaacatggaactcaccaacacaaaattacagaaaaggtctactctacccccagaactagcatcaaagcgcaaggtgcaattactaccactactgcgacaaccagctctgtcctgttcacctgggttcatgtaactaattttcatggggttgaggtacctgtcgtattccatttgcactttaaattccaaaaaaccagtgtagtgtgctcacaagtcacaacatgggtcacaagttccgacaacatgcaatttgtattgtagtaatagtccagcatgtatttgcagttcgatgtctaatacagtaaaacaacattttagctaatcaggctcgacaagttatgttcctcaaaaaaagaaacaaaatgcataatattagttgcaaccagctgaagttaagcaagctgatgggataatataacatatgcgccaatctattttcaggaacaagattttcaaaatgatttggagtaaacaaaatttatgcaccacattaacaatgtacctcaacctttattaccatgtttgagagcatgacaccacactacatggcactgagctgtgacatgctagtaagtcccctccatggttgtctaatgcggcagctcagatggtgccaagtgatgtggcaacataccgtgccttggagttatgatggcagagtataacagctctcactaaatcactagtttcctaggataggagattaggagttacttacgaaatacttaggaagtactaagagatacagtatcagtatgttaagaacgtagagatagtagtgtgagagctgtgttgcctcccactattcagaccctttttgccctatccatggatcaacacttgggtctattcttagaacaaatttcattctggtctatttgaacaaagttttttaaaagggccaaatgtaaaaatgacgcttttatatacttgcgtatcacaatggaaagcatgataagcaatgttttaaccccataccttctagctctattccacgaccatgaatgtcacatgaaactatttggtccttcagtttttctgaaacaaggaaatagtcaattcgcattctcttccctcggtacctgtaggcatttttaaatcagttagtcttcatgggattccagttgtaatgaatcaaaagttagcccattagctaagatattaactagaaaagatttaacgaagatcatatttatcatcttgtgtaaggatcaagtttagattaccagagaaaaaaaaaagagaatcagctgacacaattttaactggaagtaggataacttttagataattttcacagttcaggtcatagtgcaaactaaactttctagaagaacatttatatatctgccaaacatacaggattatctttaagcctgtaagcccatttgaattgataaattgtaaactcaaactgttcagataaagaatatttgttcaagataacctttggtaaaatgcataccaatgaaggaatgtaataagatgacatatcaatgtcagatatggacatgctttgataatgcagcaataaaatctacgaaacaaacgaagactagcataataattgaaatctttcttacttgccaattggatgtccagaccaagaaaagccacaatccatgtccttctctttgtgcagatatctgtaagcatctaccagctttcctctgtaaattcaaataattactccatgaggtattaaaaaatttcaagcctagaagtatgtcttgttgcaatgaactaaggggatcctagatccaagcattgcttccttggtgcatgacatacctgtcatgtgcacaaagatacggaagaagatatttgccattatggccgtatgttatacatgcaactaattccttgatcaagtcacagatagcttcttactgtaagctgctggtgacatgatccactgggggcatcactgcgaacatggcttgaattttccttaacttattttctttcctccatgtcgaaggaaccgtatgccatgtgaggctttatttgcttcatattaagttcacagaatattgttagaaaagggttcacattatgctgcctgaactggttcctagtggttttcagcttaaataaggataggaaaaaagttgtcaactccaaaatcagttgaaaactcattccttaaccaaggtgtggtgagcacgtttgttaaagggagagataatgaatgttaatcatataccccaaataagtcctgtccagtttactttctgaacgtttagggcaacttttacatggttttggagttagaggacaagtttaaatctaaggtaagagctgaagatatttttttttcaaaagattataacttgagggtgacaatcttgcttgattacccagttacacatggcgaaataataagaggttggcatgttcctacccatacccaccagtaatttagtcagtgggccaaatgatacatgatctgtaaactgcaaaggcatattggggatatgatctgtaaacagaacaggcatactggcatagatgacctctacccatgcaggcagtagtaaaaaaagtctcaaggcttatgagcaattcaaacttggatcgctccatgcttgatttgagcatggccagccaaggtttgtacagcataacaagctctgagcttgaatagctcagcgtggcttgataattcgagtagtccacaattgtcaaggcctatagcaggtccctggcccccaaacatcaatgaacttcaaccttcccataatcccatctcataaaaattatcacatgttctgaagtcacagtatgtgcaacattgtgaccccatcggcaggttgagcatacatgtaagtgtgagcccatgaggccataatgcagagctgccaacgctgcaataagcctctctcatagccagatcttaagggatggcttaggtaggatgaggatgtgaataaaactatcactgaagattctctaaagttagctcaaggtgagtgtgagacatattcaacgagagcatgaaccatatctgtgatgactactagctagtagccaatatattatatatttttgactcaaatccataatggttgccagtgcactgtaaactacattacagatttaaatccattttaacaagatgggttggatcagaacatatcatcttttatggtctaaaacgttataaaaatgaaattaattcatgtagtgctaatatgtttttgacatcaagtttcaaaagatagtataagaaaagttgccaatgtagaaatgtatcagctttcacgtactgggacaatatattgccgaagcgccgcctctctgacagggtgaatcctggctgtccacaatcctgcagagtaggatgcaagagatttaattgcatcaaaaggctcaatagtgatccaataggacttctattttgtaacaggcagtatgccagctggtacaatagcacgtgaaaggcacatttaaatatatatcacattctcaagagcctaggcatatcagtattctaatggttgcctaggtaggctaggcagcgacctttttagaacagtgatgattcaagtaaaacatactactataatattgtggcactgatagaggacagaaacggattccttcacatgcattgatgttcttgtaactgaaatttgcatattcccagcccttcccaatattgaattggttgaagtggctccagccccacttgctggcgctggcagacgtgtgctcctctcgtgaggttgagcatgcctggtcgcgcagcgtgttcaggggtttttcttgacttaattgaatgccactggtcatcttaacccgctgctcgagtattcccattctgaccccctgaagtcctagtagaaccaaaacaaccactaataaaagaaagtctgcctctgagttggagaatgaagtgctagaaaagaaaaagaacgatttacaggttttcaataatgggagtgcacccaatgttcttaggaatagtagggatgtgctaataggatataacagctaacgcaggctgacactatcttttttagtcaactaaatgcacagtttacgagatgggacaattacattaaggaacaaccctaacatgcaactagaaatgaaaagcacaaactgtttaaggatcatttcaatgtggtgactacatacagttcctgagttgtaaaaagccatgaaaagtaataaatcactcctagtcacttgtaaatagaagacttgaatcagtagagtaatgttacctctttatttggagggatgtatccattgagtttagcactgctaaaaaaatcaggatggctaacatcgatttcttcatgactgaaatatttcaaatacaagcaaagtattagagctaaggctggtttatggaaggtgtcaagtagtggattattactattcatggtgtagcaaatatgagttccttagcaagtccatataaaatttgacagcttactcactttgagatctaatggaaatttcagtacatgaccagttccaaaaaaattctatatcaacaattacctgaagtccatctcctaaacatggaattttggtaaacctaatgaaaagtaaatccatagttttcacacattgtcggaccagtggattttacgagacattttaactattttatagatgatgtgagctaaatatactagacttcaataaaataattatatttcctgtggttgcattggaatttctaacatgttgcactgaaatcacaacatgtcaggactatcctgtggttgcattggaaaatataaaaatatattccatgccactaagtttgctcttgttcaactaatcttgaaatcatgatagcagacaggagtgcaggactgcagggtaacataattgcaatttgtaaataaaagaagaatataatatgaattattcgtcctgcactgattcaagcttcagaatacaaaaatacatatcacagctcattatatgtattttatggatataatatgctcaaatcagccttgacagaaaagaaaagaaaaactgttatcagttctgttgcctactagcttttttgtcaaaagtgtaaagattttgtcatgtatcggttttctgttacagtatgcctgaatcaaatctaaaaaatagtatgaagatgtagctatatgtccaaggaaaacaagataatcagtaactagtactacctgttataaataatattattaattacctgacattcaagtctccacaccagattaagggtttgtctacctgttgaacaaactccaacattcttttatcccatttccgtcttctttgaaatgaattttcctcttctttccatccattgtttggagcataagtgttcagcaagaggaacgattcgaattctgcaataataacacgcccatctggttcatgcttggaagctgaaaacaatacaaaagtggattcctaagaaagagtagcaatatgcgagaaagtaatgatgaaaccaaatgttaattcaaagttgcagtgcaacaagtttgttgacctggaactttctttttcattaaagttttgatgtgcattttcttccctgaacagtagttgggagcagccatactaaaacaatactacctccttcatttttgacttattttctagtcaaacatttttaagtttaaccaactttataaaaaaatatagcaatattttcaacacaaaacaaacatattatcaaaatatattcaatgtaatatttgatgaaactaatttcatgttgtagatgttgctaaatttttctataaacatggtcaaacataaagaagtttgactaggaaaaaaatcaaagcgacttataatatgaagcggagggagcatataggaacataataatataaattatactgagagtatgtacacaaatatccaacatatcaggaagaacaactcagaagttctagaacaatctagcagctgatgtggttatcaacaaaagaaaaacattctcaagcgtcacaacacttaagctaatcaggaataaaagccaccacggtaagtaaataattcatcatcttgggcaactctatattagtcaagagaaatcgtttccatctatgcttgttggtgaaatcttatgtgccgtatgatttgtagggtagatgaagagagacacactaacgttagaatgagactgatatggtcaccatggtgtgcatattaaagtagatcttgtattgagttattcacaccagagcaaagcacatggacactacaaaacacaccgataacgggagattgcctatgaaaggaaaatatgaagtcatgcatgcaactctgaacatacatgttctatccaagttgaatgacactttctttggttcaaacttcttctttataatcatagctgtgcctgcatatttggagtctgaaagagaccaccagacacgatagtctttaaaaggtggactcgacaaagcacgcagcactacctgcatggcatcgagatgtgatcttagaacaatttcttggagcacaacaaatgcaatatactaaacagtcatgaagggaccaaaaaaaagactgtagcttgccattcttgaaaatatcagtcagtatacatagaaacttggttgcttgcgaagtgtactacattcattacacatatatcaaatcttctagttttacaggggtcaatcttggaaaagatagcatcgcatgaagatacgaatcaagtttagaattcttaatttgatcttgatctgcctagtattatgaaaagcacgacaaatctaatattaacttctgcataaaagtcacagaaaatttcattaatcttttaatgcttgtattacctgcttttcatctcgtgatgagcttgtgtcatctttcagttgaccaggattttttggtgcccctttggaaccagctgctggcatccgcacttcctaacaaagaagtttagatactatcctagtaagacatttatgacatgtatacttaaaatgaagttgtaagtactgataaaaaaatcagacaaaagcaaaatagttgtgaccagctggatacaaaagaataagcaggcaactgaacattataaggacaaagaatgaaacattatgaggtttggaaagacaaaaagacgtcctcatgtcctatgtacttgagcgtcaagcccctgaggtagattccaaaaggatgtgcctaatataaatccaataaaactataggatatattgggatcacaagcataagagaaataagttgcaatgtgactaaagaagaggcagtgtgattaaagaagaggagctgccgaactggttcccatgaaacagtagaatagtatgtgaacctcaattttgttgtggttaacaccttatacagtgggcatagtggtaccaaagaaaagctcaatcattcaatatatcacgagttttcccatatcatgaattgaagatttaacttgaagagaacacttcacataccatatggtctacagtttgtcacagtccttgcctagatggagtacttgtgctagcatcacaagtggctaacaaaaaaaaaaaaaaactgggctatgaacactgacaacgagttcctagcaactccactcgcaagcaatgacacaactatcttcaaattgcatgtgaatacaacgcaatgcaagctctgtgaacatctggaaggacagaaccctgggaggaaaaacctcaatctctattaagatcgcacctcccttgtttaatctcccatgggtgaataacgaaaacgtacgctcccaacgtgctcgacgaaacgcccgtgagcgaccgcaaatctggcatatgccacattgctgcacaatcgcctaaaacccactcccatatccccacatccgcacagcactgcagattaaaccctagagggagcaaaagccggataaaaagaagaggcaaaagatcgcgcccaaaaccgaaaacccccgcccccgcgccgctcacctggacgcagatgacgtcggggtcgacgcgggagacgaactggcagaaggccggccagtcgctcttcatccggaggagcaggctgttggcgttccacgtcacgaacctccgcggttcctcctcgcggggagcgggaggagaatccccctccccgacggcgcaggcggccgcggcgggggcgtcgccgccgagggagtcggagtcggaggcggaggcggcggcggcggcggcgggcctcttcttcgccggggagccatccttgggcacgggctggaagaagcgcttcatcgcaacagctgccggcggcggccgctcctcgcgtcgcgtctttctgcgtgcggggctgcgccggcgtcgtacggggattagcgaaaacgttagtccgcccaggcccgttaggccgcgtagttaaaagctcacgtaatgggccgagtctgtccaacctcgtcaagttcttgggctttctttttttctttttcaaaaggaaataagttcaccggacgtccctcaactttacgtttagtttaactagcatccctaagccgcaataccagaaatcttcgccctccatctttgctaaaccgttcaagtgagttccttaacagtatggatggtgttttggatgatgtggcattcttgtcagttaagataaattaagagcctgtttggtagagctagttgggtctggagtgaagttgtggagttgcctaaactcagctccacatctctagttcattgtccatctccactatatcatctctttcgggatttctggagctgagtaggccagccaaacactttcagaggtacctcccattggagctggagtttggagctaggagttaggagttggagccctaccaaacaggcactttgtgagagagatccacttagttccactcctattttaggtggaggtaaaactgtttggttgagctgaagctggagctgtgctaaacagggcctaaaacacacatgtggggcccacgtgcaagtggattttcacctctcgcccctctcttcaccacctctctcctatcttcctcaggacctcgccgctggggtgatggcccacggccagagagctcatccacgggaggcggcaatggcggtgggaggtcggtgccaagggtgctccaggcggcctggtttgctcgttcttgccatctttcatattgtgattgagcttgtttttacccgatctacttgcatgcttaattaatatagttgatgaccttatatcttgcttagataccttgtttgtcaccttttgattcatatacattttgtttgtttgagctacaagttcatagctagtgttttattccattatccgccgaaccttttggttgagacagaaacttccaatcccctaccggaaattccgatttgaaccggaagttctcatcattctaatatgctataaagttgtgataatttttagaaacgactattcacccccctctaggcgacatcaaggtcctttcacccatgtttatagaaacaaatcctgaccagccaccaacattcttggtcttgaataggtgagtgcacttggtcttcaaactgatggggttggccgatgtagtgatgtctagccctgtgatcatgattatatccaagagcagtcatcggcctatggttgaacaagaaagcgtttaaggtgtctgaccaaaataggctgcagctgataacattggttcatctttcttcttatcggctagagatagagaaaggcattgagatattcctatttcttcccagtgactctgcttgcttgtagctactctgttataccactcaacccatttatcggcttgggatggccatgatctaaaggtcgtagacaaatgggctaggtttggattggtctacctaaaagggattctatttgtttctgagttgatgaatatagtgggatctgtatctccaattgggcccatgaaaaagtgatttgattctttcagacttgggactgctacctagggcgctaaatgctacagattgcaagagagggagattgaattgcaagaagacgcaagaattggaaagagtttgagctgatggggcttacctctggaaactctgcagttggcgggcttgacgagctcggggaggatgccattgaagttgcattgggaatcgccactgagagcgcatgtgcggtcaccggagaacgtgggaatcgccggagagatggggaaagtgattttgcttaggtggtgaaaacggaagtggatggcgtggaaattttaagcggtggttactatttaaaagcgcgcggttaacggccaatggcggataaacacttggggggcatgtgttaatgaccaaatttggtaatgcatggatcgtatttggaggtaaagacgaagcagatttggaggggattgtggtgacggttgaaaacatattacacatcggctggagaccgtatcggctaacactagtcggatagggatagccgatacagccgatatcgacaagatgggttacaaagtcattgtcggatttgattgaagggctacaggagtattgccaggcaaggattatgttcaaagaatggcaattgtatctattaattaggatattttagtagtttccttatagatatctttggtaagagtgtgcctaagtgacttgtttgtctgttagagctataatagaagtttgagtcgtgtccatatggaaattgttggtatttcttaacgacattactataaatataattcacagtaatggcgcagaaatacttttggtatattatggttacagagttcatccgcaagcgtacggataaatcattgtagcatttcacccgagagtattccaagggtatcttatttattttatcccgtgggaagatcatgtagagagaacttgactaataatttatatattacttgtgataatcatagtctacgcaggggttaagataatccaagggtagagtgacacacaagcattaagctactcgttctcatactaaattatctaagctaaatggtaagaaaaagaggaagataatctattcctatacttctagtatacatagtatacatacattctagttatttgatatactagctaataccctctatccgatgccctcctggtacttcgagaagccacccctgactgccgagttccttacgacagcatgtcatgaccatacaagcggggctaaaaacggaggagtaccctccctagggaattaacttaggacaatatacacgcgcggaggaatatccgtactgagctgtcaccattagcagcccacctctcatccgcagcatataaccccaaataatgatatcccttaatctagacaccacatctaaactaccaaatactactctaatatcatcgtcatgacatagagtaactgcatatgcaaatattatacccacaccaaagcatctcccagataagctagcagcatattcagtataacataaacataatgtaaagttggtattcatatactcggaaagtattttaataccacaaatgtataaagaagagtattctaataatagtacaaagcttacaaaagaggaaaggaaagctactagagccatacctgaactcctccgaagacttctggactcctggtttctactctattcctattccactagcttgagaatactaaactaacttgagagaatatgagaaagctcttgcttgaggtgtgtgagtgaagtgaagtgaggaggtccttttataggcaggtaatgacggttgtgacggttggaatggtcggtaataccctccgaccgtcattggggatcaatcccaaccatccagaagaagccctgcatccaacggcggcgagggaggttcggccaaaccccctggttcggccgaaccaggggccggcccaaccagcccaagttttggctggcggcctcctccgttgctccacttcgtagatgtggacccccgtttttataacagggatcaatcgtgtaaacagtaccatttccctggatcaagtagtctggtacacacgagttcatagctgaaataccaaatgcacacacacgagagtctagtgcgaattattacaacataagcccgcaggcattgtcttaaatcatcggaccgggcggtccggaatacatcccaaaagcagaaatagataaggcagcggaaataaggcagcggcacgccattgccacaggcaacgaccgtactaagacctactgagcgccatcgtcttcatcaccctcctggtaataggcatagggatcctccgaagcttcatctcccgcttctgattaagtttatatttgcaagggtgagtaccaaccgtactcagcaagccaccacatcaacaatgcatatgataggggtatttcaaaggatggctagggttcttttgcgcaaagcaaattttgtaattcttttcacaagcctaagacctagcattgactgatcaaattttagtaccagtgtttgtatttgaacaacgacggttctgtccaccatccattgtgatcccaaggatagcttcccgccattgagtcgtcatggttttctgaggacgcccaccttcccccttctcaggaagtggctccaacagcataaaaattcatcatgcaataacccatcccacactagataagaatttagagtctagccaagtgtaatacatgtcccggtgctcaataaccgcgagcacggctattcgaatagatttggtttactcacactgcagtggatgtacactttacccacattctgcgactgcccaacacatgagccttgtctcaacacatgagacgcgtcacggcaaagcttttcgataaccttgcattggcagtacccgctccatgaacttttcatcctcatgtactctaggcgtacacagtttctagcagtgagaggagttctggcgcacccggggagggaaaattcacacacatgtattaagttataattatgttcaactcatcacatggcagtcctaacaatggcgacaccattgtagagcccctgccttacacatcgagaaaccactatgcatggatactgcctccgctcggctatttactccgctaggtctatccccattcgagaagtgtggttgtacggggtcgtttcatgcttaacttcatggctcggtccttaattgaccggggacggtactagcctttcccggataccacccaaattcaccgtctgccccggtctaaaacaagtgtttagttttctttcctattttcacaaatcatgtcatcattatcatggcaatgtggcgctcatgtctccacatgccgcatctcaattaccttcccaaaggtaattgcccaagcatataatatttgacaaatatgagtatgcaatattctagtgtagcatttctaagcaagcatcataatcgactagggactcttacgtaatcatggttacaaggatttaaaggtgaacgataatcaaggcatggcataatcataaataggatgttcatcatcgcatgcaatcttatttgtaaacaaaaattaatttcgcaattgggatcaacgtgatcaaagaatagtgatgacttgccttgctcaaggtcttgcgggtcttggccttcactcggatccgcggcttcctcgggctctacaagtgcgtgcaaagaatcgatttgaattccattagaattcaaataaaatccaataaaaatcgaattgaaaaacgagcgcgagaggcgaatcctatatcaactatattattcgcgaagtgggattattcttcctcctaagatattttgtgattcgaaattacgtcttaagacttcatctaattatttagttctcaattccatctaaattactaccgcgaattgatcatttatagagattattaaaataatctataataatctataggaattcatctaattgtttagttcttaaatacatctatgattatagtattactttgcaaatactagattttagttaaccccataattaaattctaatattttaaatatcctaaatctccccctaatttttcctatttattttcccccctttttcctttctttcttttctcttcgttttttccttttcctttcttttctctcctcttttttctttttcctttcttttctcttctcttttttctttttcctttcttttctctccctcttctctccctcccggctcctttctccctctctctctcggctcccttgcccacccgggcggcggcggcggtggacgcgagggggggggggggcggcggcttaccgacggcggcgcaaggcgacggcgatgcccggcgcggcaacgagggcggcggtgcggcggcacaaaggcggcggcgcgacggcacggggacggcgacgcggtggagaggaaaagagaggaggaagaggggtgtggagtggggaataatggagaggggtgggggattttatagggaataggggaaaggg

SEQ ID NO: 3596 - DNA, 716 bp, Oryza sativa
tggacatgatcggagttgtcgatgtagagaaagaagaacatgacgtagaggatatacctgctcgtgcaggttcttaagtggacgaagttccggagacctgctcgttctcagtacctgtgcacgcaggaacttagaaccggggattgatagaagctgtgtaggaacagagaagaggggggattctaccataggaggagaaccagtggaagctgatcagaagaggggatcttctgtctatcccagaggataagattgaacacctgagaggaacgttacgagattgatagcgcattattctctagtccgttactagagtaacgtgaccattcatacctgtcggttacacctttcctcatagggtctagcccatttaattctaacaatctccacaaaatttcagagctcataggaaacattgtcatttttgcacctatttgttataccagtgtttcggtggagactgttaagttgaattttcacctagaaaagaagctatatttgaccacaaccgaacaatgggcccacgggaattatcaatcctgtactgtcagtctttactcaattacttaactgatactgggctgtcgttagcacctaatttgtttggagcatataagtcgtactaggcttttgcataagtatctagagatcacccaaatctcatggactgtgactagctgtcggagcgtgagctcttcgattaggggtccgtgagg

SEQ ID NO: 3597 - DNA, 3882 bp, Oryza sativa
atttgtgaattgtaatggagattattgttgttcatatatgtgattggtgatggattggatttgggactgcttgaattgggattattgttgttcatctgcttgattcgtgatttgtgaaagcatgcttgaatagggattattgatgtgcatcggctcggcttggagccgacttccttttttttttgaattcggtagagcacaaaggtgtcggttctatgaccggcaccaataacctagtgtcattggtgccggctggcaaaccggcaccaattgccggttgggaaccgacaccaataggggttttttacttgtggttgcttgtttatgcctattcacttgtctggggatgatacggagtgggaatgttgtgctgagccctaagttcttgcaaaaagtttcggaaggtcttatcgatgaaatgagaccctccgtcacttatcaccatccgcggagttccaaaacaagggaagataatctcatggaacatccggcaggcgtgcttggcctctgtggccctgcatggcattccttctacccacttcgacacatagtcaacggccatcaggatatactcgcagtcataggactttgggaaaggtccaatgaagtcgatgccccatacatcaaatagcttgacttgcaggttgtatgtcagtggcatcgtatcccaagcagtgatccctccatgcttctggtaccttgtgcatcttcgaacgaattcctttgtgtcatcacacattgttggccaaaagaatccattctgccagatctttgcgtgtgtcctgaatgctccatagtgacctccatatggggtagcatgacacacttctcaatgatcttcatgccttcatctactggaacgcatctccgtagtagaccgtctgaacagactttgtaaaggtaaggtgcatcccacaagtgcctgcggctcttgtagatcaacctcttcttattctctcccggtggcacatgcccccgaccatggagttgatgatgattgcataccacgggtcagaatctgtgactttcaacagcatgtcatctcacagatagtcatttatcggtagctcctgcatgttagtgatttgcatacgcgacaaatgatctgcaacaaaattctctaccccttttcatccttaatttgtatgtcaaattcttggagtagaagaatccacctaattagccgaggttttgcatctttttagtgagtaggtattttagtgcaacatggttagtacaaactattaccttagctcccactaaatatgacctaaatttatcaatggcaaacactatggctaggagctctttttccgttgtggcataattaagctgagctctagtaaaaattttactagcatatgtgatagcaaggtgctttttatccttagtttgcccaagaacagcgctgacagcaaaatcactagcatcacacatgatttcaatcggcagcaaccaatcagggggttggatgattggtgctgagatgagtgattttaaaggattttagacactcatcatcaaagtcaaacggggcatccttagctagcaaggtagttaggggtctagtgattttagagaaatcttttatgaaacgcctatagaaccccgcaagactcaagaagctatggactcccttgacattggcaggaggtggtaactatcgaattactacgatttttgctctgtccacctgaactccccttacggagatttgatatcctagtactattccttcacgaaccatgaagtgtcactttttccaattaagtaccaagtcgttttcctgacatctttgcaagaccctatctaagttctccagacaatgatcgaaagttttatcatagtaaaatcgtcgatcatgtcaaagaaaatagacaacatgcatctttgaaatgacgctggtgcactacacaacccaaacgacattcttcggtatgcatacattctgtatgggcacgtgaacgtgatcttactttgatcatcgggatggatggggatttggtgataaccagaatacccatcaaggaaacaaaagaaggaatggttcgctagccgctcaagcattacatcaattaaaggcagcgggaagtgatctttcttagtagccttgttgagtttcctatagtcaatacacatcctccatcacgtgacggtttgttgtgggcaactcgttgttcgagttttcaagaccatcatgcctcccttcttaggcactacttggacagggctaactgttggtatttcttacgatcacaaatagaatccgcaagcgcacggatatactgatgtagtacttcccctacggagtattccaagggtaccgaatcgaagggaacatgtgtgattaatttttcctctggttcatccaaggacaccaagcaaatgataggctaagatagagaggatttactggtgagaaatagtgtctagggaaatcttaactttaatcctagcacgatacttcaggcattggcaacccgctattcctagatgtcgctctactacgtacccggacagggacgacataagtgctcttgagggctgtcaccacctctacacctacctcaaatgtactgtgggatacacagcaattactggataaaattacctaaacaccacgtctaagcaattaatatatactttagtgtttataactcaccaaagcaatcactatattttagttgattatagtgaacaataatcccgtgtgataattaggaactaaccaagagataattctcacaaaataagtctaaattactcaggaagataattctattgatattagagtaatgaacagaagaaaagaaacaagagaagattatcgacagctccggaattcttccgacttcttctactctactctcttcgtaattctagtatacaaatagtacaatagagccttttataattcagctcaagcttgtaagcgtgtgaagaagtgaaggagtgaagctcttaaataggcaggtatgacggttgtaactactgcgaaatatctgaagtaccccacaactgctatcaggagaagatctggagtgttccagcacaacaagggattggcttttcaatgatgacaaaaatcatcactataactatatttttatcaaagttgctaccttgtgacgaacttatgattcgttgctatgtcatcactgaaattggcgtcacaaataacatagtgatgattttttttcaccacaaatactaattgtatttgtgaccaaaagtcttgtaactaatgatcataacaatagtgatagttaaatacgagatgtactagtgaccgcaacgacatcacaggtgtactcactccttccaaaactctaaaacctatttcattctttggtttttccaaaagtctaagtcctatttgtagtcattatgtgctaaattaaattgttgataggaacccaagaagccattttaatgcttattggtttggtcacatggtgaaagaattaattgctttttggtcttggtgcaaaaagaaataggactcacatttttggaaggagggagtacaagattgtgatggattatttcctcacgttttgttagtaattagtgagaatcatggtcacagttgtatgattcaataatgataaattttcatcacatattattgatatactgaaaacaatttctcacaagttaatttgttatagtgacgagattatataacgctatgaggaaattttaacttcaacaatacatctattgtgaggaaactgcattttattgtggcaatcttttcaccagataatattagcatattgcattagttttttggcaaaatttgctacaggacacttgaaaaacgtgtaattagctgagagacaccgcaaaaacgagacacggctgatgaacactacaaaa

SEQ ID NO: 3598 - DNA, 2563 bp, Oryza sativa
  unsure (1)..(2563): unsure at all n locations
agaagagaagagctactagagccatacccgaactctcctgaaggcttccggactccgatttctactctattcctattccactagcttaagaatactaaactaacttgaggtgtgtaagtgaagtgagaaggtgagctccttaaataggcaggtaatgacggttatggtggctggaaaggtcggtaataccctccaaccgccatagggaggaaatccacaccgtccatcgccaaccctgcatctagcggctacacggcgggtcggccgaaccaggggacgacccaatccagcccaatttcggctggcggcctcctcttctgttgctcacttcagacttgtgaattttggcaaaattcatcgtgtcatttctgagttcttggcccattcatacataagtccgatcctcgacatcgtccgattgatttatcgtctgatttgatgtcgattctccttcactttataggtattctctgtaaaaggttagtgaaccagatactagtggaatattattattctaacatgtatatgcattgcaagataactagttcttctctattttggtaatattgacggtcaaaacntgatcgctaacgacaatcaacaacaggtccgacccctaagcaaagagggggcagccgccactccaccccaggccggacccttcttggggaagtgccacgtgggtttgggggcggcctcctccctctaaacatgataccgccgggcccatatcacagacgcagtcagacttatataggtgtgttccttctaaaatgttatgtaggccaacatgtctactttatggtaaacattaaggtatgcaccaacttgccatatagatgaggagagaagtacatcaaagaaatgagcctctcctcctagctacccaatagcttatttcaacatcctaattcacgccatctctaaccatatacgataggttactactattgtgtaactcaaaagggtcttaaacccatctcactcgatgcactgcctatcacattttgcgatagtccctcaatgaactgatctgctagatttttagcaatctggacatatggctgcgttcgaatctccaacaaaagttggatgaaaactttgatattcatatcatgcttttcaaaatattaaatggtgtgtttcatgcgaaaacattctatgtggaagttgctctaaaatatcatataaatctattttctaagtttgtaataattaaaacttaattaatcgtacgttaataccacattgttatgcgtaaaacacttcatcttcatttacatgagtttcaaacacatagtctaattctatcactccgaagtattttaggattctcatagacttcaatcttctttttatatgtctgtatgactttatgttgtcctttaaactgttcaccttaataatcgtcatttgattatcacggttcataagtcactggtttttcaaccacggttaatccatcggaggcccatgaagtactcgatctcaatagtggcagtgctacgtcaaattattttgatttaatgactgaccctcaatcgttcgcaagttgttatacgttgcacacgtgtataccgtgagcgcaacttatccattttttttgtttaaccacattttaattttctctctttaattaggtatctaattgttcttgacgacatcagcatggagcagtggaatgccatagaatcgatatttgagaacaatggtagaggcagcagggtaatcgtgacgacggccatcctctcggtcgccaacagttgcacggcctacaagtccggagccaacggcggatgctgcatccgtcgccatggctgcgtctacaagatgcagactctcggagaagcgcacgccaaggagctcgccctcggcggcggcagcgatcagcgaccgccggagctggagcacggctcggcgacgcttatggcgaagtgcgacggcctcccgctcgccctcgtcagcgtcgccaaccacctgcggtgcctgggcaatctcacggggcggcactggccgacctgtgccacctcctcggctccctcctgctcgacgagcgcaacgtcccgaggctcgccgggacggccgccgccgccgacagcttcgcgaggctccgccgggttctgatggacagctacgcgggcctccctgactacgccgccaggacctgcctgctgtacctggccgtcttccccaacgacggccgccgcctcaagaggagcgtgctcgtccggcggtggctggccgaagggtacgcgcgcggcggcgaggacgtgcttggcaacagcaccgacgtggacgtcgccgacggccacttcaggtcgttcgtcgaccagagcatcatcgtcgcccaccctgccgacgacgacgacgacgacgaccaccgcacgaggaggtgcaggactcacggcatcgtgcacgagttcgtcctgcacaagtccatcgccgagagcttcatcttctcctcccgtgctcctccgaggcgcaagagagtccgccacctctccatccaaggcggcggcgggaacaccacgacggcggcgctgagcacgacggacctgtcttg

SEQ ID NO: 3599 - DNA, 6829 bp, Oryza sativa
ggcacatgaggaagctgatcaaggtcaagatatggtgcgagttcggaggagaagaatccgacagtgtctcgacgacggcgacggatcacctcgccgacgctatcaggagctacatcgaggcacccaaggttgaagagaccgacgcacgctcgctgtcaatcgacatggagcaatgctcgaagcagctgatcaggtcatgtcatggagagagtaagctcctgcactccctgaagcctccatgccgcagctacctcacctcgctgaagcttcatggcgacctgttccggctgcacgggctcatctccatgctcaagaacctctacgagctctgcctctcgtcgacgacgacgaccctgaccagggatctcgtatcagccatcggcggattgcctcttcttcttcgcctcaagctggtggcgaatcacatcgagcatttcgccataggagccggggagttcagaagcttgcaacacctgctcctcgtggtgcatcgtcagaatcccatcctgctgccaaagatcgaggagggagcactgcctcagctcgtctctctcgagctgctctgcaagcatctgcgcggcctctccgggatccagatcagacacctccagcgtctcaaggaggtcgcactcgattctcgagtgagcgagggcacgaagcgagagtgggaggcagaggccaggaggcatccgaacaggcccagcatcttgctcctgaagaacagttacagtactgtcctgcctgacgacactgacagattggatgatcagatggacggggagcttgctcgggagaaatctgcacctgatgatgatgctggcaaccaggagcagattgcggaggtggaatcagaaagcagtgcatttcaattggcgaattccactatgaataattcagtcgctggaaaggaatcaacagctgatgatgctgatgaagaaggattgggaagcactaatgcagtgcccatggagcagataaattctactggctccatcaatgagaccgaggtctccaatagagggaaattcacaatgtcatattttgaggactgctgtccctaccatgaggtaataaactataaatttggcacatattatgtgaattcaactgcatttgagatattatttaattaaggttagagtttcaagatttgatcaaactttttacataacacaacttttaaaactaatgacggaaaaaatgttcaaacaactcgttagaattataataccatacaaaatatttctcaaaacacgtgattatgcaagtttataaaatatgatttccctcctaaaagcttgggttaattggatccatgccattataaattcttctgttttgaaatataccattaatatttacctatttgaagtcatgccattataactttataggtatttgaaatatgccactatataccctttcaacacacttaacaaaaactttagaccaaattgcccttatcttctttctttttcttctcccagctttcctgttcatcttcttctccctttcttccccttctgcatctggcagcttgacttcttccttcccatctctctcattttctactggtgaaccttggccaagggcactctccaacttcactctgacgccatcctccgaacccagtgagaaggaaataaacaggcattgagggccggatcggggcagtatcatggctcggcgtgggcgctgtgaagcgcgacgaggcatgggcatagtgctggcgttgcagcggctcgcatgggaagagtggttggtgcagacttaccgtggctgaggagatcagtggacagtgggtgggtaggcatgggctttggtctatccatggcagcagagatgaacatgagagattgggagaagaaaagaaagaagatgagggcaatttggtctaaagtttttgtcaagtgtgttgaaaggtatatagtggtatatttcaaatacttataaagttataatgtcatgacttcaaataggtaaatattaatggtatatttcaaaacatgaaaatttataatggcatgaatccaattcaatttcttatatgaccctcgttctctcttctctgaatgatatatacatgggtctagagcccatatgtgtgtcattgagacaacatggacaaattaagattagtttgagattgacaggagcaaataagaatgatcaatatataatatgtttgatttttaatgatttttgatgtcccacttaaccatatttgtttattataataaatttataaagtataatatatttatgatcagattatggacgtaccttttgagctagaaatatgcatacagtttctatgctatgatcagattatgaaagtaccttttgagctagaaatatgcatacaatttttatgttttcaaatgaagtattttgtattcataggtatagtcaatatttgaaaagcttgactagatatcgttcaaacttcaaaacatcatatatttatgaccataggagttgcatagatcaaataaaaatatttgaacggttctgatattaaaatattttaagctttacatgaaacgtgatcaaaacaacgtggttttgtgtctggagggacacgtggtaatgtaatgtgggctaattgtggtctgttgctacttgcaggactagagacttgtagtacctaaatgctacaaagaatactacagtttcgtgacacaacggaatgctactgtagtacctccgaatatttgacgccattgacttttttaaatatatttgaccattcatcttattcaaaaacttttgtgaaatatgtaaaactatatatatatacataaaaatatatttaacaataaatcaaatgatagaaaaaaattaataattacttatattttttttaataagacgaacggtcagcatatttaaaaaagtcaactacgtcaaatattttgggacggaaggagtattatggtgtgggtttcagactttttagttgtttctcaagatatgcatcattccatactgcggctatatgcatggtttgagttttagctattccttcaagtattctatttaccctggtcatgtgttaataaggctacatatgttactcacgatttgtaaattaaacaggtttagtccttcctcagtataatatccatgcatattccattgttcttcaaattgcatgcgaatacaatgcaatgcatgctctgagaacatctagaaggacaaaatgctctgagaagaagttctccctgactcccccgggtgaataacgaaatcgtacgccccaacctgctcagtgaaatgcgcgtgagcaaccgcagttgtggaatgtcacattgcagcatactcgcctaaagcttactcccccacatctgtacaacacaatactgtagattaaaccctagggggaggcgaagacctcgcccaaaaaacgaaacccaaaccgcgggccgccgctcacttggacacaaatgacactgctggagaaaggctcattactacaggttgacaaccctttttagtcccggttataccactcacacacacagacacaaacacaagttgttcccatgtttctatcgtaaacactaagggagaaataaacttacgtaagatttatattatagaataaatgagatatatatataaatttggacatatacctaccagaaagttcgtcctcacagacagtttttccttgaatttcccgcggacgtttttatggaatcatgcctgcatttccaaactacaactaatgaagcttgatgcacatagtagcaatagaatcaaccataatgacaatgggatggatgacattacctattaatcatttcaatgattgagttgaaagtttccctgggtttctgcatagagtctaggatatagatcatgctctagaatgtgcatattgcgtgaaacaattaacatatcattgtatgaatacgagaaagaaattagtacagaaggcggtaaaaactcactttgtgttgtatgtaaagagtatgaatctctactacttaaaaagttcgtagtggtggtcttgattcctgatacaacaaacatatatgacagacacgcgtaatctcaaccatccgattggccatatccaacggcgtcaatctcctccccatcacgcgattgctcttccctcgatcgatctcctccccacgcccactcctccttcccccacgccgcgtccttcgccctcctccctgcgtcgcctcctcgctctgccgccgcgtcttccctcccactactcgcgccaccaccggcccctcagccccgctgccgctccttcccttccgctcctttccctcccctcaccaccagcgctgccaccgatccccgccgttggaaaccctcccgtcgataggtcgccgccgacgccgatctctcccgccaccgtcgcccaccgtctccctactccgcaggtctccgacgcgccgcagacggatttccacgccgaccggtcaccaccgacgccgtcttctccctacttcaccgcaggtagttccattgcttccgctcccaccttcctcttctctgatttttatgtggtagtggtagctaggtcttttatctacacttcccctgcttttttttgttcttgctgctagatgagcggattgatcagaacgcaccgatccatcatctcgtgatttttcttaacctttccgtgacctgcaccgttgtggcagcaggacctccactgtgcgtccgccgtggcagcagccaattcctctggacgctcttcttctggcccgccgtcccgaccagctcaggcatgtatacaacagcccagacctgctcacggagcccgccgtcgggaaaggccacgtctcggcgtaagacacaggggtgtaggtcgtgcgatggtggcatggcggccggggaccggttcccgaccctatgcggcgtcttcccggatgtcttcaggcttcagcaacaggttatgtgacacgtcactgccgccgcccttacaccgacagtttcctcaccgtcggcgcctacgagcttgtaacggggcgtgtccaatcgtcgtcggcgcggtgggctccttcctgaggctctgctccatcgtgtactgcctcctcattggcttctgcagctacgagatgtgtacagctccggctagctcaacatcgccaggcgccagcaacaacggcggcggtggcatctctacaggaactttcttttgcatgacgtctgaaggtgagcactccaatgaccaatcacatgaagtctgatgcactaaattaaaattacgacatatacatttcattaacagtctgtaacagattcccaggggcactgatctatgaacaaatttacattttcagtttcaggtgaagcacaaagaaagctgctcttcatttggtttaaagatatacatttctcttgtagtgatccaacacaaattcagcagttccctaccttggttaacctgaatgcttcactcttgagagatgtatatgttgctaaaatatgcctgataaaaagaagtcagtaaacttacccccattctcatgcatataccatcattaaaaaatattaccgtagcgttagcacgggcacattactagtgtcttataacgttgttgcgctaggaatctgtaaatgttatccactgtttcccttgcactgttccatgcagtcatctcattaattatataggggtccatatgaacccaaccatgaaatagccatgctttgggcaattttgaatcttcattgaacaacgcaaaaaaagaagacgtgagttatctgcactcggcgaatattcaatgttacatacgacgggctaaggaatgaaataaaattaggcctaaaagattccgggtagaagctaaaagcgactaggttcattatatctaagtcacgatcaacttctaacggatcttggaaaactttaaacaatggccatttacattaaagatgttaccttcgtcgtctcgcagcgtgacggctccatgtgatgaaacatcgacgacggtatatggatccattcatttactttgaagtttcctatgtccgaaaagcttcacccgtgagttgaacaacagcacctcgtcccctgccttgaactccttgtgcttgatccgcttatcatgccatcttttggttatatctttatagatcttggcattattgtggtaggccttgtccctccattccttcagctcagagagctgcatcttcctgtgctatcggctccctttaagtccatgttccaagtccggatagcccagtgcgccctgtgttccaactctaccggaaggtgagaagtcttcccgtagacaagttggttgctaacatgccagggtgtcttataagcagccctatatgcccaaagtgcatcaggtagcttgttcttccatgccttcccatctcattaacagtcttctgcagaatattcttgatctgtttgttcactactacaaaaaccttcataggtaccggccttataggtgccggttcatttaaaaccgacacctataggccctttcccacgtccgcaagatgaaaaaaataaagaaccgacacctttacgaagtataggtgccggttcattagttaaaatcggtaccaatactataggtattggttttttaaatagaaccggcacctataatatattataggtaccggttctgtataaaaccggcacctatacaaatcgagccgacctgggcgagccgagccaatcgatctgacagtgcgtcgtcgctatccttatccttatccacgcagaccacgcgctctcctccagacctccaccgcgccttcccctcgccccctctgttcttttgcgcgccctcccgctctccctctcctccgccgcgccctccccctc

SEQ ID NO: 3600 - DNA, 5052 bp, Oryza sativa
cacatcttgtcagactcccagaagtcagtactagcggcccaagatgaagtgcaatcctggttatctgccgatgtgcctgaaacttatgagtatggcaagccattcttgccaacttatcttatgaacaagctaccatgggaaatgagggtaatgcacgaatggtatatgaaggcatctaggaaaggtctcggtttcataagcgtcgccgtcccggaaggcgctttcatgagtggtcctaatgggatattttttatctctttccaagacctttacgccctctacaagctagataaaatggacgttaatctcgttgcggctttctgtctgtaagtctgaactctttattacatgttgcacgtttcattcgaaacaaataaaccaaatctcatttcttctttattcattgtacagtatgcaattccacgaagctgatagaactggagcaaaggttggatacgtcgatccaacaagaatatgcaaaacacaacacaccgtagagctgagacaggactgcgagcaattggttggcaagaccccggaagaaaaggaagaatatgtgaagacattgcacaagaggaagaagctagaagtagcaacatacttggcaatagcaatgttggcgcacgccgacaaagatgtcttaatggtcccctaccagttcacgtaagctctctcttctttttgtttaattaatttatcttcttcggaattttctgtctccaataagcctatcttatatgtaaagaccactacatattattccttgtatatccgaaagaccaattgattatatcattggaccccgcacactatgacaaggagacatttatggaattcctcactattttgaatttgtaagtgataaacatttcattactataaattgtttaggtcgatcaccagtcttctaactactaataaaacaattgtttccttcaaacagagcacacaagtactaccgcaaaagaggtggaccagtacatattccatcccagaagaagttatccgtcaggactggctggccggtactatcaaatttataccaatacaactaattatcgaacagtacatatatactaaatatatctactgagatcggtccccataattatatcgcagtgctacaaacaaccaccaggaaccaacttgtgtggttattacgtgtgcgagatgctcagagtaaatgggaggtacaaaacaaccagtaaccgagtaggtcatcgaactcttctctacaaagaaacccatctcgcacacacttctcactgagtaccgttttattttcctttctgtgtgcagatccccgaaatcccatatattgcacaacgattcaaccacactactatcttgaacgtggccgctgacctctgtcgattcatccgtcgcgatgtctgcaacgcaagaggtctcttctacgacaaccagagtgaactcgcaatggacgacaaatttaaacctctcagagagtgggagaaagaacatatgcaataacatgtacactacttatacatatgatgaaaaaactgtgccacttgtattatatatttgtatgtaaattacgattgaattaatggttatgtattacatgtttgttactgcggcacttgtcttatcttatatacttactactccgaaatacgataataaatccctcaataatttaatattaattacgaatcaccaaaatgctagaataaatattattttagctattcggaaattgaatttcgcatgcggtctacttaagacgcccgcatgcgaaaatagatcttcgcatgcggtcttcttaggtcgaccgcatgggaaaatatatcttcgcatgcggcttcttatatggaccgcatgcgaagatctattttcgcatgcggccgtcttaagtgaccgcatgcgaagatcgatcttcgcatgcggctgcgacggccgcatgcgcaaatggtgatctttgcagaccatttcgcgcatgcgggccggccaaccgcatgtgaagatcgattccgcccgtatgcaaaaacgctttctgtagtagtgcaagccgagcaggcaaacctcggttgggtcgtagccgccgccgtttagtttctaggcgagtcgactccacgaagacaaaggccgcgcgcgcgagagtcgtcgtacgtcatggacaaacggttttcagtcctcttcatgttcacaatcacgtgacaaattcttccatagtatgggtaaggagtatgtttctttctcaaccacaaggtaactttatagatcaggagagacattttttcactctctcccagttacaatctgttatttttggtacgtactaattaattaattaaccataattatggaacacacaagttcgctccaatccaagctagcttgcccttattttaatttggagatgcactttattatatatagtgacacacgtgcggtcttcatcacctcaaccgtagaattattacaccctgcaaaccacacacacatcgatcgaacaaattaattaggaacagcattattcagtcgtcgtctgatacttatataacagcagcagagagaaacaaattagaggatttatatagagaagttgatgagtgacgtactgttggtagtcgatgaagaccttgccggcgtcggggttggcgatgatggcgaaggcctcctgcgagaggtcgatggtgcccgcgcagccggaggggcagtggtcgacgatcttcacggtgacgctctgcccggtgcacggctgcggcacgccctggttggtcgggcccgtgcacgtcaccacgtactgctgcccgcacgccgccccgccgttccagaacacgtcgctcgccgccgcgatcatcgtcccctggtcctcgaacccgtagcacgccgacgctgcatatatacattgatttaacacacatctctcttatcaattttacttcacgtatggatgatcgacgaatgaaatatgtagaaaatttactgtacgtacgagtgtaagggggcgtgtagaaggtcgcagtgccagagtccgcagcgaccagcgacaccattgcaagcgctaccacggctgcaatgacaaccgaagtgatcaccttagccatcgtcgtcatcgcgatcaattcgatcgatcaggtgtaatctctgggagtctgaaagatatattaattcttgcaggagagatgcagcgaactgaagctgacttgcagggttcagtttgcaccggccgttttatagacaaaggttgcgtaggaaaacacgcaatggcgggccgtgtttccaacgtcgccgctgcatgtacagggcgcaaacctgagatatcttccaatacggacgcacgctagggaactccaaaccaagaagatccacaaaaaacacacattgacacgagaatcgatcataattactcgatatcttctcgcttgttcgtggaccgattgcacgcagtttactgttgcctgtggaatactcctggaagtccgcgaatacgaccggcgaccggtgctatacgcgcgcgcgcggctcacctcgtgttgaagcttgcacatgaacgtccttgtagtgtgtcaccgcacgctagctagttctccgcgaaactaacacggcgcagcctgctcagttgtctgacgcgcgcggcccggcggcgagagaggagacagccaccgaacggtgatatgattaccaactggggccaagtgcccggccgtccgttcgatcgactgtgtgtttggcgccgccgtacgtagaaatcgatcgcgcgcgcggctctccgagtccgaggtccaaaggcagccgcgatgcgagcgtgtgctgcacgacacggccgctcgaggctgctgcacggacgggccgtaggtcttcagcgcgcgcggccggaaggcttcgctgctatgagtaggccacgtcacgtacagagcggtctgaaagcctagcaaagctgcaagggacgacgggacgacgagtggtggtattgaatgggaatatccagtttgattcgttcaaatataagtccaatctggttcaaattctttacatatttttaacctagctccaactattaaaatcggtacaaaataactcccttggtggtatttagggtggttttaattaaggctgtgaactcacctcccgcgtacgtaaaacggagcgacaaatatctatctaataaggactaatatttatccacggggataaatatgtacattcaaggtctttgtaatctatctctcaatcaatacatctcttggcatatcaccaccctcttttccaaggtttttatcactggcggaacttagcacttgacgcagggttgcatcgtttcgatctccagcgaaggggtaagtcctaagttatgttggccctgataattgtataggctatatgacattgttcaagactgcgtctcttcgatctcttcgattgttctgatttggttggtatatttgtctacatgatatttcaattctatgtttaattgcattgtgtttaaagatacatcggtttagctgggactatctcggttaggtccgatcttatgtcttagcagatatatctttacaatcataatgatgttttaaatagattttttatattcatcactttaatatgatttatcgactttactagtttattaggtttatttgttgatgtaaacttatgcatcggtttggtccgacctattagttaggtttactgttgattaatagatctaatctagctagcctggtaactcacgtatattgttttatcggaatgctagcagataagttatctttacatcgatcttccaaccgatgtattctttaaccatcgagcctacgtttaatattttgtttcaatattgtccgattggttcattggacatctacttcatcatattatcatcggtcgattggattgtttattcaagttcttccattatttttatctacatgtcagaatctacatcgaatatatagccgattaaccctattgacatgggctaatatcgctacatcggcttattgacccatggactctttgattattagtttatctatcttgtcaattgcagaatcaaactgactggtacgtgcatacctc

SEQ ID NO: 3601 - DNA, 6544 bp, Oryza sativa
cccgttcaatctagtagagctgtttgtactacttgagttatcgacactgcaatctactgcaatctactcaagcaattgcctaaaattgctcccgttcaatggcatttatttgaattctgactaataatcgttgagttatgtgggttcattggacacatttgaaggaacaagaatggcagttattttcttgatagctgaaaacatgtaaagtttaagatcacataatgtatgttcatgcaactattgcagtagatgaactaatgctatttattactaaaattttattgtaggatccctagatgactctttaatttaattgtttcacttcaattatatgattgcacgctggaatcagacatgctaatttgattgtctttcaacagtgtgatttgcagcttggatttggtgttcagaaaccacagatgtatcctaccttcgaggagcagctgaggatggcctcagctggagctccacagtttgggactatgaacaggcataatcatgtacctgtacccgaaccaacactgatgttaggttatgcgccgcacattggcagctgccctcctgtccagttaggatgggacatgtccatgtcaaagatggttggcgggtgtgtgctccagtcgtccatgtgtgtatggtgcaacactcagttccagcattttggcaccgttgccgatcagcaggctgattcacttggcttcatctgtccggcgtgcaaggagaaaatctctggtcatcttagcatgctcaacaacagttcatcacagctttagcattcagtttcggtcgctcatttgatcttgcagcccgatctggcactgaaagcgattgttctcccgtttatccagaacaactaacttgtccacctctaggttctagataccctgcctcaaaattgcacggttatttatgtaggaattgttatgtatgtatccgtttgactttatgcaatgcatgaactcttcgagaaataacacttttaacactacaaacgtttaacatgttaaacaatggttatcgtaccattggttttcatatccgagcaatttatgaacacgaatgtaagtgtagaaagaactcctttccatttggtgtttgttttcaaacttcagcaagatcaggcctacagttgcaagagaacctgatctgattcccttttctttcattctgcttgatagtgccagatgttttgccaacatgcatcagacaactgagacaaactgttcatgaggcatccattgtgaatcacaaattaattgtggatttccaataaatgcctgatatactagtacaagcattttctgtattacaagtgtttgattagtaagggtctgtttggcactgctccagctcctcctggagttcagccaaacagtttcagctccactaaaactgggagtggagttgggtggagctctattacaaaatgtactagagttgtgaagctggatttaagcagctctataactccactccagacttaactcctggagttatatttaggagacttaactcctgaagttatatttaggagttggagcggtaccaaacagtcactaatactccaaaactagattacttgaatttaaatctaatgtctcagacgtatggtttcttctcaaccacagtggaatcgaggcatcctttattcttcccttaaatccatcttatgctactgatgaccagaaggacacacgttcgcttgccttcaagccatcctgattttgatcttagaccctgcaaatgagcacagcttatcgtgaataaatctgataagaaaaaatcatcctaaaatgaaaatgaggcgtaaaattaagttacagtctataactatgatgatcacgtactcgtggtattcgacgaggatcttgccggcgtcggggttggcgatggcggcgaaggcctcctgcgagaggtcgatggtgccacggcaccccgcggggcagtagtcgacgatcttgacggtgacgctccggccggtgcacggctgcggcaccccctggttcgtcgcgccggtgcaggtcaccgccagccgcttcccgcacgccgcgccgccgttccagaacacgtcgctcgccgccgcggtcatcgtcccctgctcctggaacccgaagcacgccgacgctgcacgcatgcacggccagccaaaatgttataagctcgcacgataattaaagctactgaattacagacaaatgttatacacgcggtttaatcagtagtaaaaaaatatatatctctctgaagaatgaaatgcaactggacagtggacacatgccctcccttctgagaaagaaaaaaaatatatctactatatatctatgcagcattgcgtgttttcgtttacaggttggagaaattttagtttcagaggagtattaaggatcgataagaagctcaacgtgtgtaaggaggcgtgtagaaagtcgcagtccctgaactccctgcgaccagcgagaccatggcaaggctcactacaatcgccacaacaactgagcctatcttaggcgccataacactagcgatcggctactaactaatcacccttgcacaaatgatcagtgttaagcccgtgcagaagatggatttgtgcaagaggtgtagtagtgaatgttacactggttaagccacattatataggcgagagattttactgtgtgcacttggaagttacttccacgatgtaccagcatataccacattctattaaggtgccaccgtacaaaccatctgtcactattactgaagattgctatcgctattgcagtttcttagcatcgagattaactaaccatcattcgtcagtccgcccccatctcattcatccagaggatgatctcacacgagcatgacatgaacgacagaggtgtacatagatagtgtaaacacacttgggacagggcacatcaccagctaagcacatgcaagatttggtaggttgtcctattggttcatactaaaatgcaacaggataggacagagaaaacgtccaagatgctactcctaatatccacactctgctctaggttgatgacagatgttagtaacttggtcgtcgttgtgagttgtactactggatttctcaggatcccagtactgttgtttgcttgacaagtagagtaaaatactaatctcaacattctagtggtacaaggtagcaagcatgcacacaatgtttatcagttctcttctcatcatggagaaattctatgcgttgctctgctctgcatgccccacgattgtgacgttatggccgggctttgcagcgattaaccgtgtagaaattgcaagttgcacgtccttggatattgccggtttggcttctgcggcagaaacgtgcaagagctgacgccgcgggatgctgatcatatcgcgcagccggccggctcggcgaaagttaagttcacattgttttgtgccaatgcggcaatgctgacaggaaagatcccacttggacacttggttattaactttgtcctaactagtgatcatcaaagcgtgcatgggctcatacaactagattatagtttatttacaagtagagttgcattttaatttaataggcaaacattgcttctatttcttatacaactattttttaactagctagcaaaatacctgtgtgttgcaacgagctctaattatattagatgagctaattaaactaaatcatcactctcaagttttgattaacgatgataggataaaacagtgtgttgtacagtgtacatgaagcaaatagagtttctcacttgaatacattattggtcaacaatgataggcccataagatagatggtggcctctacttgtcagatagacgggggtagcagaatcacggatagagtatatagtaaatcgaaggtcttcgcggaagccaacgctgtgcgacccgccctcgcgcacagcgcattgctccgcgtgagcgtgaccccgcgcgatatggttcgagtcgcctacgcgtacgcgatccagagttcccctcgcccgcccggcgcaagtcgcaccgcgcgtacgcgatcccagccgtatacccctgggcggggcctgcggagtttacgcacgcgtgcatgggcgcatctggcatccgcgcacatacggctgcacgtacgcgcggatcaggccagcgcgcgccgcgctatcgcacgtttgcacggggctataggcctccacgcgccctccgtacgtgcgcagagcgcgtcgacaagtacgtactcgtgtttacgccgaggcgccaacactactacaaaaatcgtttttctgtacgagggggtcggtaggttccatgcgggccgcttgtggcggcgcctgcaaaaaccgcccccccgggggcgggttgattagccgcatgcgaagatccattatcgcatacggctgcttaagacacccgcatgcaataataggtctatcttcgcatgcggctggcttaagggaccgcatgcgatgatcggccatatatgctcctccaggcccgagcttgaccatttgaaaacgaagctttctctctcctaaagcaagcaccaattaggggggaggttttcaactcgaaatttttacttgaactctatacgaaaggtgaagaactctctatcatgcttcatttggctccatttttgttatatttcgttggtggaaagtggagtttttttaatattttgacaaggtttgttctaactattttttgcaaaatctagcttcaaaatatatgttttgatgggcaaattttgcatgtaatcaattgtacatactagttacatgtattgttgtatttttttttgggagacaaatgcatttaaacttttgtatgaaatacctgcggtctatttttttatctgtaacttttttgcctttatataattagatggatcggtcgtcatggatgtatgagatgcggagaacgcagccgatatttattaaggaagcatctaaatttattgatcaggctaaggagcatgctttgagggagaatatgacaaagatcttttgtccgtgccgtcattgcaagaatcagaaattgttggtagatcctggtgaaatattgggtcacataatggagtacggattcaccgccaactacaaggtttggacctatcacggggaattcgccaatccggaagatgacgatgaagagttaagtttcgagatgaatgaggcagagaattttataatcgaagacatgtcgcgtgaaagaatggttgtcgatgtttccaccgatagtgatgatttcgatggtggttttgatttagaggatatgctacgccatgttgaaccagaggtgctagcgggcaggtcacgaggattggagaattggcaggcattagagaaggcatcgaaggatcttctttacgatgaaacgaagggatgtgataaggatttcacagtcttgcgttcagtgcttgaacttctgagattgaaggctaaacatggatggtcggacacaagttttaatgatctgatgagtttgttgcgtgtgttgcttcctaagcctaactttgtatcatcgaacacgtatcaagcgaagaaactcatatgtcctttatctcttggtgtagaaaagattcatgcttgtaagaatcactgcatattataccgtaaagaatatgcggaattggaatgttgcccaacgtgtggcacaagtcggtataaaacggggaatgggcccgtagattcagagtgtaccgatccagattctgataagggtaagcgcgggaagattccttcaatggtgatgtggtacctaccaattaaggaccgcctgaagcgtctgtactcaaacccgactgatgctgagttgatgatatggcatcaagagagccgaaaaatagatggtatgattcgacatcccgtcgacgctcgccagtggaagacatttgatgcaaaacacccagaatttgctaaggatcctaggaatgtaaggtttgcgttgagcactgatggaatgaacccgtttggtgacttaagcagctcgcacagcacatggccagtccttctcacaatgtataatcttccaacatggatatgtcaaaaacgaaagtacattctactcactatcctcatacaaggtccaaaccaacctggaatcgacatagatgttttccttgagcctttgatggaggacatggaggagctttggaaagaggggttacgactatgggatgagtttaagcgggagcacttcaatctacgtgcgatcatattcgttaccatcaatgacctacctgcaaacttttcattatctgggcagattaaagggaagactggatgtctgatatgtctggagaaaacttcatacaaatacctgacgtcgtctttgaagacagtgtacatgcgacatcgacggttcctaccacaaagacataggtaccataagatggctagattgttcgataatacagtggagaatgacactgccccagtagcaagaggtggtacatacgtgtatgagataacaaagaagattaaggttgtatatggaaagggaaagaagaagacagtaaagaggaagaaagctgatggtgacaacggtactacgtcgcctttca

SEQ ID NO: 3602 - DNA, 4395 bp, Oryza sativa
ctgcacccccattccagagtagtcctcacgtgtcatgatctaataacaatctgaactgtggcttgtgctatctgtttacctgaaactgttaatataacaactgttttggtgaatgggtaataccactatttttgcatgtccacattaccagttcacaaattgaatcaatttatttgccaaaagtacctttttttttttgtgcgtaaagatcacctgtctgttaaaacttcaacgcatgctgctatcgatgtttttaagctgttatgtttaatttgtgttactccagatacaagcttttggggctgagggaatgacagaggaaatgctgaagtacttgaatgtagctgaaaatgtcttatggaacatggatccttatcagaaaagtgacctctattgcattgccttgcatgctctggtcaaggccaaagatgtatgtacctaccatcttttactgcttagttcgttgtgtccaaacgattaatgtttttttatatattatttttgatgcttgaattttgaatctgataggtccattccttgtttgcggacccacaaagcaataaaaaccttcatgaccatcagatcatacggacttccagcaaatgttgcaatttataatattatgatagagtgctgtaaattgttgccttgtgtcaaatcagctagcgctgtgctatcattgatgctccgagatggcttttatcctacaattttgactttcacatctcttgtgaaggttagtccagttagcgatgcaactgtgacttttgattcttttcttttagttgactttgattttttgggtccacttacttgagtttcatatctattatttgccatgacaggttgtattggcaagagaggattttgagggggcgctggatctgttggatgcatgcataatagaaggaattcagcctgacattgagattttcaatacagtactcttagaggcatttgaaaaggtttggctatgataatacacctttttcctgaatgatgctgatgtctaactcatttctgaacattctgcagggtcagattcatgtcgttgaatatatagttgagtgtattcaccgagctaaaatccgacctgatcaatcaacgctttggtacacattttgtgcctacgtggatcaggaactgtacaatactgcaattgaagcattgcaagtcctcagtgtgagaatgatatctgaggaggccgatgttcttaaggaaaaaggagtaattgtagaagatctaatcctcagcgaagagccagatgctgaattaaagatcatgaagacatttgaagcaactgaacatcttgcgacagccttactgaacttgaggtggtgtgcaacaatgggttccacaatatcctggtcacccgaggatagcctctgggcaaggaggttggcatcttcttatgacggtaacagaagaccacatatatttaccagtattgtgcctaaacagtttgtggtttgaccagttcttcccaaaggatctgtatatacatattgagtgtcttgtgactctctcctgagggctgaggcatcagttcacatccattgatggactggtctcatgcaattctcccagctccacctgctgctggcaatagcggtgttcagagcatcagcagcacaaattctgtaccaatttcattgatggtgacgaaaagatcgaaccgcacagcagcaatagttttttcctaagattttggagacaataatgagaggtttttacaagagcaagagttgagagtgctgttccttgtagcaagacctgctgcttatgagcctctgacgtgaattctttctgatacatgttgtaacaaaaccttagtctgacacactgataaaaatgttgtagtttatccctcttggagaggcccctaaaaatgagagctgcaccaagcatttttcatcggccattttgtcaagtataccatcaaatataatcatattttctttaggttgtcttttgacatcatatttttcttctaatttctgtaggctgttgtaagttgtaacatgttaattactccattagcatggataatcagataattgcttgttactggcagtcggtcctcgattatttaacatcaatcctggctcactatcatatactcagatagccccacgtatcatattcaaaagtgtcaatataatcaaatttagccaataaaaggtttagattgtcaaattttacttatgtgaaatttctcttatgatttgtttgtctgatactctgtctgatcggtttgtcatctggtgcccaccgcttggcctccgtgagatggcacgagcgctcgtccaggtggtcggctcgccgcctcctcgcccgcgctcgccgcgccgcgtgtcgcgccaccgcctccctctcttctcacccccccccccccctccttcctctctctccgctgcctacgatataggcatcggcgagggcgaccagggggatcggaggaggaggaggcccgatggcgttgggggcggtgttccacggcgcgcagctgatgctggatctggcggtggccgggctgtcgctggtggtcgcgctcggccttttcgccgttgtcaccgccgtgctttgctccgccgccttcctccaccactccaagcccgtcgcgtcctagccacccgctgctcatcaccgccgccacaacccccctcggtgcgtatcattttgggtgataaatttgctctagcgtcgtgttcccctgacgcggacacgcattagtttaattattttgggtggaattggggggcaacaattcgctcgagcgccatgttcccctaacgtagaggcgggtactggtgcaatggaatgatctatggatgttgaactggattccctggcattttattctgtcgcgccacattagaatcttcaccgtagcatttaccagatgccagtatccttgcccttacttgtgatttactgcttggtaggtggtccgtccagtgaaacatcctggattggtattccctgaagattgtgcctacctgttgtctctttggtttgaagaatatgtgttgtcagattacgcatggtggcaaaggctatttctttaggggccttttgagctgttccgtgctgttaggtgggcatatttttgttgctcagggaaaaaaataagcaacagacgagaagtggagttgataatcagaaatctgattctcctgttagatggataatctaccgctcattaaaacgacaaaagctaggaatttcacatttggcaactttgtgtttatttaggcaactttgctatatgaaggcgtcgtgttcaaccatatgataaaggccactctattagagtattagtaaaaggggcacgaactagcaatctagcatttgccatgatattcaacattacagatttgttgtaagccctgcaaaactgtttttagttcccatacttgtctgagataattcagcaacctttttgattcaccttgtttattctcgtttgatcaagctctgccatgtagtaaatagtaatcaactaccattcccttgaaatgttgccaattcttccttttcattttcaggaatgagattgttgttggaggcatgccttctcatgcaccatatgcatagcagaaggcgcaccatttgatgccagagcttccttcagacacttaatgtagatgcaagtgtagtgaatcacacgtatcaggtgatagttcgatgcacttgtagttgtatgaatgttatgtttacttgtactattctgccgatattagctgtttgtattgtaaatttcccatttagtcaaccttggcaacttttagggttttacatctcatataccttatgtacattgttttattcttatatggaagtatggaaggttcagctccttgaggcaatagatttcatctaaaaaggtaaaaatggcacattagctgagttagagtgctttttcttatatatgatcttcacgagcattagttcagcaaaagaaaacataaacatgacctaaatacatcatgctccgctgcaactatttgtcatagtagattttggattagattagttatgatggtcaaattatccacagaaacaaaacaaatcaggttactatgttctcttttctgagtataaccgctacaaatactggaaaaactgaatccattagattgaactatccttttgtgttggtgacttgaacaattcataccttgagaaagtttatctggacaaaatgtggctttctgtatagtagttttcattcttacagataaaagacaggagcatacaattttgaaagagataatgaaagtatgtcattgaataataaccagagggcctcaaatttgctttacttatgaggtggttaacaaatggacaaaaacttggaagacaattgcgaggagccgaggaccctcacaaggc

SEQ ID NO: 3603 - DNA, 9370 bp, Oryza sativa
aagtgtttcaaggggactgcggaaaaggatggcagtgcctttaaatgggaaagatggcctatccttccaactgtattcataactttctcaaccatttctgtactctctcttgtcaccaaagccaagaagagaccatttgcttccaatacagtgttacaggtatttccatctgtagtccatgtggccttagcttctcacacctcatggtgggggactagcagaggctggagagagatagagagaaagaaagggagatagatacacacacctgcttcgttaggcaatgatttgttaggattagaaggttacaattaggctggcattgctcaaaaggcttcttgtcgccgctctgtcaatctgcctgtcatacaaaatgcttagcttgtttatgacacatttccctcggattgcaggaccaggagaacatgtcttttgtttgctttagtacgtgtgtgcagatgatgatcaactaaactcaacgccgctggattcctatgctgtatttttatttctccctgtggttccaatacaataataaccctgcagttcaagcgacgatattatattttgctgcagttgcattataaaggtgagtctcattcctgagatgttgcggttcatggagtagattaaaccggttgactctgctctttgttttgccattgcatatagcagattcttagcttgattatgtggcattcctttcctccaagtcggaggaacgaacaagcctgacttgtttctgaagatttcagtaagggctttgagacaggtgagaggccagagcttgcggtccttgtaagaaagttcttctatctagttgtttcctgtagtaccccgttttctgttgctgatgtgaattctaaacctgcttacgcggcaacatgcatcttaggtttcctttagaaaacaggaatcttaaaacaaagtaacaggaaacaaacattttaaattgataatcatacaagattagaatatcctaacatcttaaatcctatggaactacgcgctggataaatataggaatcagaagagagataggtacccatggttttcctttttctaaaaggttgaagctcatattaaaattcctccaagattcttaagttttgagccaatctaaaggaatttcataggattcttacatagctgttcctttgatctaaagaagtatgtagaaaaattttaattcctccaagaatccttggttccaaaggaatccttgaaagtgaggatcatttacccccaattgcttaaaataatttacaggctacatacacaacttgtgacaaaaaaaatccctattcccatacgaattctagatcattgtattttctttgagattcgtgcgcattgtaaccttatcctttcctcctcttcctcttatctccctgtacgcacacgagcaaggtctccaacatgccgccttcatacacagtgcgctgcctcctagccttgtcgattagctagaaggcaccaatgaggccctcctggctggtctccttcccatctcctcctctcctctttctcaagctagaggcggcgaggtgcttccgccatctccagtgattcctactcagtcactctactttgctccttccatcgacaccggtcaaccgggaacaaaaatgaaattgaaaaatggaattgtagctgaacatgctgacctattgatcaaatcgtgttctagaagtatctgcaaaaacacccatcagtcttgaacccgttcctctcaaaaccctagaaaaaaaatagttttctcttctataactcgtacattatctctttcactatcttttatacaaacccacaatcccataatctattacgtagtacaaactaaattaccggttcactcccattacgtccaaacaccacaaacccaattgcgtacagtggcggcgctaggggtatgcctgggtattccttggaatacccaagatttcagtagacaaaataaatacatattatagtacacatgtatattctattttttaattggaacagaagcccacaaacgagctagtagcagcgagcaggccaacctggccaaggcccaaacggccagaattcctactgtcggcatccattcacaagtcacgactcgcgtagtcgcgttcttgtagttcttaaaaaaaaagtcacgactgctcccgtcccaactcccaagcggcggcgccagcacatgtcgatctactgctgcggcctcagccgggctgccggctgcagcggtgggcggcggcacatctcgatctacttctgcggcggcggcggcccgcggccggcctgtgaggtggtgtccagcaggctgcagcgcatcgtcgtcacaatttcagcaggcagctaggtaaagatttctctaatttatttgtcttgctactgctgtgctgcgtgctactttgtttagtaattttctaacattctattctttgtgaattgtaatctagatgaggaagggtactaacagcatatttgcattatgggagaaagctgcaaaggcaaaaaaaaaaaaaaaaaaaaaaaacagcttccacatctacaccaaatcctcctcctgttgagattgagaacaatctgcaggtagcacttgtgcaagcacaagatgatggtgaagcacaggcacagtccgctgttgaagcaaatgatgaagcacatgcacattataacttatgatccattataatccattatattgcatacttgctttgaattttttatatgttggcatacccagccacaggatcctggctccgccactgattgcgtagaacatccccattccacgtcgtccatcatcttatgtgcctaagttagagcatgaccatccaatgacatatctcgactgactctaaccttggaaatctattgtagtttcggtccctcgtcattcaccatgatcaactcctcctagcttcacctgcacatcaaatacaaaggaaacatattttgaaaacaatttttttaacttgatccacattaaaccaaacaaaaatatcttttctcaactatttatacatatatcacatatatatttatcaattactgacaagtgtttgctcaacattcaaccaattatcattttatcccttataatttggtattttcgttggtccaaagtattccccagtagtaaaaccgtctaccactgtcttttttctcttttttcgcaatcgtttttggctacttgaaaatttaaggtgtggaaagctaattatacaaaaggctcttcatctatatacataattcctgcttgttgtttctccatggcaaaatatagggcacaactatactttttttttggatgtttcataatacaagatgcgcattaactagcacccccctcctaaattcattgtttctaaaattcccaagatctctaattctattgattacatactttgaatttattagggcgacccaaataaagaggtgacagtaatttttccttgatctttatgttaggagtattttggaatagagggagtactttattttgcctagattgctcatcttaaagatcttaaaagcaacataagcaagtaatttttggttcttaacaatatggcactctggtgctcctagcaacatggcagatttggaaacagataaaccagagagtgtttcagcacgtagaactctcaactttatcactttctgcgaagataaaggaggcggccgagacctggactgccaaaacgaatagacttgcttagatcatcccttagttttatttctcttatagctttgtacattttttctcatgctatatttaatgaaatgagcacacccttacaccgattcgttaaaaaaaaacaatacaacacggcataaaaaaaaatacaacactgcatggtatgcaccggacaactcgaccgaagaagcagtggagtgtttgttgttgggcaggaactcaaacaacttccctgcggacattttttccacccagactgcaccaaacttccctgcggacattttccacccgaactgcatcaggaagcgtctgttgctgaagaaagaaacagtgcccgaagtgtaacggtgaagtttagtagaccgcctattaaaacaattataatttttactcttttatgtatttctttttaataatgttgtgtgggaatattaataacatttgagccaactggcatatttatttttcctgtcagaattttttttctatgaaatatcatgttggaacatgagtttgtgggaagacatatatgttgttctgcctcttatattagggcaacctcaatgttgggttgctgaatgagcaataggggtgggcccatgtgcagatagctttagctatatctatctctacaatggttatggccttggatgagaaacaagccgggtcccactgggtcccatcaaagaagaaacataccaccaattcgcaaccatttgctgataggctccattagatatcattttttaatctcttaagttcaactgtaagcttagagctgtttttaagcatttaatgccttatgtccatgtccacaatgtatatagctgaaaaaaagtcttaaggctcactcttatggtcacattgtggatgcccttaagggcagctaactttcttagcattatttaggctgtcttcaaagaaatcttcctttgcagtacttaggtctttttcagaggtaatttgagccctgttagaccaagtttcatgggatgtatatctgcacttttggttcatattttagcggggtgtcggggtgacatctttttggatatcaagcaccatgtttatagtataatgaattttgatgctgataatgctatggtgtaagcaacatgggccaatctaggggagatatttaactagggaaaattgcaaccatgccattataattttgcaaaatttgagatataccatcctgacccacatgtcattgactcatgtgagttctacatgtcattgagataccgatggtatatctcaaactttgaaaaattataatggcatggttccaaattacccatttaactattagcaaaattgattatatagcatcaaaagttcacgtatataaccaattttgccttaactatttgccgcaagaagtgatcataagtgaagaactgatcagcgttacgcgactgaaaccaaagctgaacccagtaaattcagataaattctgcaagaaaaacgtcactagtaggcagtagcaatgctctcactggaatccatcttggtcatgcacgcgtagcgccgcagcttctcgttgaacagcacgagggggtccttctccctgagatcgccgtcgccgccgtacgcgtccctgaggaacacggcccagttcatctccgtgccggcgaggtagaaggcgcggctctgcttccgcagcgacgcgtgcatgtgccgcgtgaggccgagctcctccttgaactcgaagatgtggtggatcagcgcgcgcttctccagcgtcaggctgaggaactcgtgcaccacgccgacgcggtacttctccgcctccggcgtccacggcctcagcagcgcgccgctggtgtacggcgagaccagcgggaacgtggtcgccgcgtccaggcggtcggcgtcctccgcgtccagcggcatcgaccggctgtgcgggacggcgaagcggaacgtgcgccggacccggcgctcgtccaccacgaagtcgcgctccagcgcgctcacggcgagggccgggtcccaccgcgccagctcgaggacgtcgcggccgtcggggtcgacggcgacgcggaagtcgccggggaactcgcggacgcggtcccggaagtcgtccggtaggccgagcaccgcgcggcagtggtggagcttcgcgagcgggatgcggcggtggtcggcgagcatcaggagcttccggacggcccgcaccctcgtcgggaggagctggtcgtgcaggcggcgctcctcctccaggagcgagcacatgagcggcgtgagcgcgaggtgcgggacggagtccaccctggggaggtggaagagcagcgggtggcgcgcggcggcgcgggacacgctgcggccgcgggggaacccgagctcgcggtacagcttcccggcctccgcgagggggatccggtgcggcggcgggagggaggccaggaacgacctcgcgcgggcgaggaaccggaaggcggcttcgcggtcgaggacggcgtcgagctccggcacgcggcgcgcggcctccggctcgatcggcgcgacgcgcgggctgctcagcttcttccggagcttcctccgccgcttgcagggcagcagcggcaggagcgaggccgccgcggccgccgccgccgcagaagaagaaggagacggagatggaacggctcggagtagcgctctcgtggcggagaagaggcggcgcgccatcggcggcggcggcgccgtggtggaacgaacctgaggcgagttcagtctatttcgatcaaccccacgcacgaatattaaagcgacagtaaccgttggatctgaaagcctagtagcgttcggcgttagcgtagagcacaccacatcacactcccctcccctctctctctctcgtctcctccctctgaatccatctgtaaatctgttcctctcccacgcgccccgcccccaaatcccccgcgcgccgcgcgccgccgccgacgccgccgtccgccgccatggggacggaggtggccccgatggtggacatgcgggcgctgtcccagtcggatctcgtggcgctggcggcggggtcgccctactccgccgacccccgccgcggccgcgacgccgacgtcctcccgccaccgaagatcgatcgcgccgtcttcaatgagagcgccggctcccgtaagcagaccttctcccgccaccgcgtcgccaccaacctctcccacagcctgaccccggccaccgcttccgccgccgccgcccccgcccccgcccccgccgacgaggactccgagaaccgcctcatcgcgttccacctccagcgcctcttcgcgggcgaggacccctcattcgcatccccgccccagattgcaccgcaaccccagccgcaaaccctaatcacgcccgcgattgccgctgccgtgacccccgcgccctccctgccgacgccgcctccctcgaacgccgacatggaggtgatgaatccgaatggggtggcggtcgatctggcgaggctcgcggagctggtggatccctacgaagaggagatgcggaggcggacggcgggattaggggcagaatccgagctattaggtttcatgaatgggcttgagggtcagtgggggagccgaaggcggcggaggaaattcgtggatgcctctatgtttggtgaccacctgccccgtgggtggaagctgctacttggcctcaagcggaaggagcgtgttgcttggatcaattgccggcgttatgtcaggtttgttcatgttgtgtatagcttgtttcggtagtggtgaacatcagttgttaagtgtcttttgtatgcattgatgatttgggttttgtgtttgaagtgtgaaatgcaatgtgcttgtcacaatcgtttttgctgtctatgatctccttttaaagcttagtttgtaaagtgagcctcatgatagcaacattaagctgatcttagaaacataggaaccacaacaatgggtatttgaatgtgtcgtaatccaactatttgagtttttctttttcttccttgtttttggctttgttttcttccttccctggcgtaggccggtctggccgattgcattgtgtaacaaacactctattcctctaatatattgacgtgcaatccttttgcgcattcgcaaaaaaaaaagatggtgggcacagcatctggacagtgttgcaagatactttgtatccagatttaccttgtctgtggtagtaactagtacgtgcatagacagtgagcatatatttcttctaatcaatagttagttgatcatgtttccttccccacacccatccacccacctacgctgttatatccagttgtcatttctacggttcagtaactaaaacataatcaagtgctcgccttaatatggctgcctctattaaccgtcatgcctgaaacatgtatgatgattcataagtttaactttgtttaaagtaaggattcaacggcattgatctgtttgatagttcgagcattctcgtcatgctcatttgttggacattctttctttgcaaagatatattcttactcatcatgctctacataataggtatatttgctctctagaaaaaaaaacgtactatacatatttcgttattaatcattacattttcagacatgttgatttctagtcactgaatgaagaggctaccttgtattagtaaatgtctgttaggacagtgcaacttcttaatattgtcttcatagtatttattttgaacttggtgccatgttcttcataatatgtgaatatctgctggacttggaagttggatctcatttattggaagattgtgtgtttcatatttttgctcactaccattatttgctctagctaattgtccatgatgtacttgccagccccagcggacatcagtttgctacttgcaaagaagtttctacctatcttatgtctcttcttggatatgtggaggcaaagccaactgccattcagagcagcgatgcagaagtgcttgaattaaacgctgttaatgtaagtccttttagtgcaccttatatgcacaactacctttcatggtttgactaactaaaatgttcaattagtctgtaggccattgccagcctaattcaactgaggaaaagcagagtgcgcctccagttacatctgtgcctttctccagtcaccatggtgatcctcagaggcaacttgataagaatgaaactcaggtggaagcaaatggaaaagagtgccaaaagtgcaatttgacttttcaggaccagagtgcctatgtgcaacatcagttgtcctttcaccaaaggaaggctaaaaggcgcaaggttaataagtctggtgaagtgggagccaacaaaaatgtaacaattgtgactcaagaatgtcacataacttctgaagataaactgggcaatattgaccatagtttagccaccacaaaatctcaaggtcaaacaccagaaaaaatgcctgacgagaccatttcaggagagttaggtggtcgaccatccatggcaccagagccagttggttttcaagagacgaatggcttaactgaacagggaaaagaatcttctgctggtgaacttctctctggacattgtgatcctcttcacaatatggctggtgtacctgagaaggaaaaaggatttggtggagaacctgtccctgggaatcacgaggaccccattgaccatttcagggacccccaaaacccatgatggagcatgtcataatgctg

SEQ ID NO: 3604 - DNA, 717 bp, Oryza sativa
attaccgatcatgtgtaatcaagtattaaatcagcacaaatttgatactttgtaatgtgtaacatgatacgttagttgctaattgccatcaatgctatgctacctcaagagattaagattctttgttttattgttcaggtattggtttgcttaaagtgggtggaaggattgtttactcaacatgttcaatgaatcctgttgaaaatgaagcagttgtcgcggaggtattttttgttgcttgatttaactttacttcctttgcccctctctaatattaatgtagtaatgtttgattgatcaaattatttttgttgcctttttctttgtcatacacttatacttgatgagaccctaaaatgttttcagtgtgtcaaatctaccatgggagtaacttttgttgagattagaccatctaggaatgttcatttttcaagtgtagcacttgttttcatgtcctgtgtaccttgttgtgacattgaccatatttttcataactaaatagattctacggagatgtggggattctgttgaacttcttgatgtttctaatgagctacctgaattagtcaggcgtcctggacttagcacctggaaggtcagtgtacatttctctgaatcatgcatatttccttgtatattttgtacactttgcaattttgcataattagctgcgactgtgatcttctgtggccttagagccaaaaaagaaaaaaaaaa

SEQ ID NO: 3605 - DNA, 674 bp, Oryza sativa
aagattggtggctaaaggttttaaacagagatatggtaggtgaggatgaggacacgtttagtcctgttgttaaaatagctactgtccgtcttattttatctcttgcagtttcaaaaggatggagtatacgctagttagatgttaagaacgcgtttcttcacggtgttctggaagaggaagtatatatgaagcaacctcctggatatgagaacaaaaatttatctgattatgtgtgcaagttggataaagcattatacgggttaaaacaggcgcctagagcatggtattctcgactttatcagaaattgctacaattggggtttgttgcatcaaaagcagacacttcattatttttcttcagaagaggagacgtcacaatatattttctagtatatgttgatgatatcatagtagtcagttcctcagataaggcagtgtcaactttacttcaagatcttcgtagtgattttgctcttaaagatctcggaaagctgcactattttttggggatagaagtgacttcgatttcagaaggtctgatcttgtcacagaagaaatatgcaaatgaattgttaaaccgtgcaggtttgaaagagtgtaaacctgtcaatacaccgctctctatatcagaaaagttctcagcatcttcagggaaattgttgagtgataaagat

SEQ ID NO: 3606 - DNA, 1477 bp, Oryza sativa
caccgttggcacattgctggacatcccgagtaaaacgaaggatggattgaagtcacgtaacgaccttgtagatttgtccatacggcatgaccttcacccagtagtgctgccaaatgggaagaccgagattcctcctgcttgttactcgttgacacttgaagagaaaaaagccttctgtaaatgtttacaaggggttagagtgcctactggtttcgcatcgaacatcaggaagctagtatcaatgaaggatttgtccatttcgggatacaatgcgtatgactgtcataggttgctaacggtgttcctaccaattgctataagggcagtcaaaccagtccatacaaaggtggttataacaaagttgtgctactttttcaatcgaatttcacagaaggtatttgatcctttggaattaggtccgcttcagacatttgccgtcgagactgtatgccagcttgagatgtatttcgcaccatcatttttagatatgatggagcatttgatcgttcacatcgtccctcagattattgaacttggtccattatacttacatcagatgtgggcctatgagcgttacatgtcgatcctcaaaggctatgtacgcaatcgcgctcacccggaaggatcaatgatagagggatacacaactgaagaggcagtcgagtgttgtatggactacataaaggatgctaatgccattggcattcctgttcatcgacatgaaggtagattgtctggaaggggtactgttggtaggaagcagttcttcgataatgattacaaaaaggtgtccgcggcacacaacagcgttcttcaacagctcgctatcgttgagccattcattgagcgacacctagaagaaatcaaagcctgcttcccagggcggtccaatgattggatatcaagagagcacaagcgtcgctttcctctgtggttgaaagatctaaacctgccagttggtgattctgtggaggaacttactttacaaagactggcatgtgggccttcaagtattgtcaattcatggcaaggttacgacatcaatggatttaccttgagtacgactacgaaggacatgaaaagcaccgcacaaaatagtgggatccgtgtcgaagcgattgacacgagtggagaaaagaggtcgtattatgggaccattcaagaaatatgggaactggactatggcctaaacatccagatccctgtgctccgttgtgaatgggttaaagacacaataggggtttccgttgatgactacgggctaacgatagtcgatcacagtaaaacaggccacaaggatgatccatgggttttagcagagcgtatggctcaagtgttttatgtgaaggacccttcagatgaaagaaaaactattgtcatatccggaaagcaacagatcgtcggcatcgacaacatcgaagaccccaatgattacaacaagttggacgatgtaccattggttactgatctttctatg

SEQ ID NO: 3607 - DNA, 8500 bp, Oryza sativa
  unsure (1)..(8500): unsure at all n locations
ctgcaccccctttcagttttagctttttttttatgggttaacctggcaatgttaatttggtcctgttggctttctgtcatcaagctggagtccccagcaaaaacattgtatcagaaacctgttatgctttaagtaaagctgggtgtaggccttttgtccaaaaaaaatctgttaggtgccagcccaccaccacccactgcatttttttgttacggataaacttgatttcttcagcattatataataaaccttccatatgttgttcttttcatatttgtccttctaaaatcacagttttacatgccaaggtctaagatagccaaattgtcatgttatgtagtgtgtaagttcattttacaatttgcatgtgtaaacaatgtcaaaggttcattgtgcaataagtcattttcatagcatggtatcagcgttattgcgaacactctatttagagcatgtagacaaccggtcaagtgtgcatgattatacagataaaatttgaaccttctaagcataaaggtattagtaaatttttgacagataaatcacaagtatggattacctcctttgaatacccgcctttgctgagagctcgagtgacagatctgtagactctttgactcatatgtacagcattctcttccatgagttccaaagcctccgtaacaaactatagataatcaaaaagctccaaaagagatatctaatcaaaatgactatactgttactccatgcaaagaataaaacatgcactcagcagaagatttaccaaaggatcaggtgctgttgcacaatattccagtatatgagaaaaatcttctgaagtcaatgccctgttagtctgttgaagatttgaaagcaacaaggatgcttgctgccgatcacctctgcaaagagcaccaacaatatctgcttgaatggatctagtagccaaactggtcatccatttaaattcatcatattctgcaaccattacatcattgttacctatgcatatgcataaaattcacttctataacaatctaatatgagcattaatcaaaccagagcatctcatggtataattcagcaaggcagtgagacaggacttacagaagttactaacacagataaattaaaaagggaacctcaggctccaaactatatgaatttaccccaaaaaaaaataaaaggaaaacgcttagttccccatttgatcatcacgtttcttgcaatataccgttcatatacaatttgcaagcatagaactgggtaactagattagaaacaacagttatggccttccataaggaaaacatgacagtacaacgaaaaggtgtaaagcccagcaccgtttgaacaagttgaggcctctccggagtgaactccactaaccacattggcttgcgcctgcaaaacgtgcaacttcagcatccagaatacacaccaacgcacagaaaatacataaggacgcaaggaagaaactcttcgttacaatctgcgggggcttgaatgccgcggaggaattggtgcaccggcgagcggctctcgatctgcagtacaggagagaaatgtgaaatcacggcgacacctgaccccgcgcaaaatcattccacggacgatactcttacagtattcgatgcatcgagggagatgtcgtccgtagagctcctgggcggggtcccttcgcggcgggcgaggcgcgtcgcgcgagcagccgggcagcggggctggctggctggctggccgccggcgacgttgaggcgccgaaggccgtcgacgcgaggggggcgacaggtgagggggcaccccgacgaacccgcgcacggggaggcggcggcggcggcggcggcgtggctggtgatgtcgtcggggagttcgtgttggctcgattagagtgcaaagggaaacaggaaagtctaccagttaagtgggctgtgccttgtgggccgtttctgttgatttgggccgcgccgctaagcgtgaaatggaaaatataggtttaggcccatcgggtgctaaacagctattagtaaacctgtaggataggctgcgcatcttgatattttatacccttcagtaattcagtgtaactagccatttagtcgtgccttgcacgactttatgtgcccgtaatgctctcaatcatacttaattttgaatatatttttttacaaaatcatacaacttgataaactattagttaaatctatagattcagctcaagctatatttaaactaaaggttcaaatattatgttcaggatcaacctttcaccgtataccgtcaaaagatgagaatgtttactcagcgatatgatgcataaggcataaaatagtcaaacctaacacaatacacagtgacaaattaaatggcaatctagtccatgatttgaaaccaacacaaattgctcaaagatcatttgacctctgagtatctcaagaagataacataataaacatcccaaaataaaaatacacaattttgttatgaagtgtagtaaaaaattcagagtcatcacaattagtatagtttgtctgtttgtgcattggtgccaaccaaaaacccttcagtccaaagccaagaggatctctcaactcttctttgtaggcgcgagaaagtagatatgcatgagacaactcattgcaggaaattcactgcaacgaaaacaaggactagaaataaatagaagtttcttgaagggtctctaggaggttttatcaattgaaggatccagtggttcacattgcatggcaagaaaatcggacggctaatatttttttatcacattgttgtaagtatttttttatcttttttatatcgaattctttatgtagaaactatgttgcttcttccttaatgcacatataaattaattcttcacctttttatgtcaaaaatttgttccatttaaatctacaatgtgagacaccattattcttttactcaaatataagtataaagttactaaggtgtagtaggtgaaaaaaacatatatacaatttatacttacgtgccacttctttcttaataaatgtgtagtataatggattttccacttaatatttaagcaactacaatagtgacaaataatgaaacccacggattaagataacacgtcacgagatatacacccataatctttagacttttgggcatatntaaaatagcttttttactcaaaaaaaaattaattcgtctgctaggggacaataattttcgtagaaaacttgcttcaaaattcaaattactcgcaaaatccactgccaccaactcaacatgtgcgcccaaaataaaaaccaggctgcagttagccaagcaggcaggcaccctcttgcactctccaccgatccaccaacaccacgagcaaatttctcttccaacgtgggcctccccacgcaccgccgcaaaggcgcgccgatgtcctcctccccgtggcctcccaccacgggcgccgcctccgccgccgccgccgccgcttcccccgcgcctccggaaggagcggctggcggtgccgcgactcccgccgctgcgcccgccacgacgtcggagcagcgcccggtcaaggtcgccccctcccaccccaccccgtcccgtggtctccgcatctgtgtccgactgtccctttgctctttctgctctcggttatacgcggtcacactgagctcgtgttagcctcgcgcaggaagggggagacgccgcggccgcgggggctgctgctgccgtgcagcagcaggaggaggaggaggtggaggcgaagccccagttgctgcgtgaagacgactcgtaattcgcgatctccctctgttactatgctccttgttttactgcaatgcgtgctctgtgtttgcgtaattgcttgtatgaacgctgcctcactcacggttaggcttttttttttttttgccggtaatattacacagagtacgaactctgtaaacgcgctgatgtgtagtcgctatcttttatactactgttgtgggtgtggcacaatgctgacaggagtagaacgatgaggtgaggccatttagcctgttactagtatcatgatgttctttgtgtacatgatgactatgtcagcagcaccttgtcagttttgtcagcagcaccttatcagttttgtggtttattacattgtgcacaggaaagcatatcacttcatttgtgacagtgtgagataccttcacagtgttaggatatgctatgtagtcctatatttgcaaataaccaacaagcagagaaacatttttttccctccgaaaaattgtgccaaaactcatgtatatcacttatttttccttccaaatgtgctgtttctcaccaacatatggagaattctgaaatcaactgcgcataactttttgtcctgtagtatagcaaaagcttagattccgtgcctatgcacccggttttgtttgattttatctttggcatctgcaatttcacttgttctgtcttgtatatttcaaaattaaggtgtcacaatcaccttctctaatagaacccacccttgaggagttgatttgcatgatgttactatgtaaattgcaccatgaactgtttggctgccaataaaggttaacacattttttttttcgaatagagagatcaaagaaggctcaacaaatctagtgcttttaaaatagattgggaaaacagagttctgtaaaaaaaaacggagttgcaaaatatattcttctatgaaaaattgaaggactagcatgcatctttgcttgcagatatcatctgttcatcactgcatacgttaaagtttctgctacaattattgttgattacttatcatgtaccactttactactgttttccagaatagtatgtgagaaaatgaaaaataggaatataacttcagaaattgatgaaggatttaactgtttttgttatatttcctactgtaatgtaatatgttaattccataggtagtaagcatctcaatctgagctcagcacctatattaatataaattcctttctgtgtggtaaaatagtttaactctttgttcgaatttcaaaccctttgatggtttttaggtaacaaagcgaatacataagatctttgaaaaagaccaagttggtacatacttcctccgtttcacaatgtaagactttctagcattgtgcatattcatttagatgttaatgaatctagacatatgtatgtgtttaaattcattaacatctatatgtatatggacaatgctagaaagtcgtacattgtgaaacggagggagtatatactttgaagaagactaaaatttctccccacactacctcaaggcatgctctatatagaatttggaacaccttggccctcattggctcatacttgatatagaaattactctgtcatggtatttaccttctgcttgttgttgccatgagaaataaaaaaaaatggcagttaaattcgtgcattgcattgtcatgtgcagagaaacagaaatccaagtgcacgaacagaagataaacaaatatcaagctatacttgcagcccgtttgaaggccaaatacttctctaataaggattttgatggaggtatttgtgaaatcatcatctatgtgcagtatagatattacctagtatatttgtgcacactttttttttcacacgtttaatcacatacaggcatgccattttttcagtctcatgctatagagatctgctattgatacagtgcatcatttttctttcaaaaaacccatggatgaaatgagaaaacgtgacaaacttaagttaactgttaaacatagttattccattggaggccagaagaaaatccctctttaagttaattatcatcatttatacaaaaaggaggatggaacatttgggaatacataataaactgataaacatagatgcattactttcatgctatttgttttggattaagtttatcctgaataaaaaaaaaagttgaactgaagcatggcatgttacccaattggtcgacatcttaaccctaaaagtctataattatgggaccatgtctctttgcatttattaacagtaagtgtgtacgtcatcttagtatggatctgttaagcttccattttcattgaattttccatttacttactacttccactatcaaagtcctccaaaaggaaagaatgagaaaaatgtgaccttatggaatgtcaccttgggactaacaaggcccagatagactcctagtacctggactaacaagtcaggcatagattgaacacgctctcctagaactcctcatgcaaaattagtgctcagcgaataactagtaaagcaaatttacgagttgaaatgcaaaacacaataaaatgcccaaattggaaattcacctggaggaatgccgtgcctcggcatgttcatttctttgcctggctgcttgcaaaggattgactaccaaataagtcaatcgtcaacttagctgcatgtgggctatgcaatcatgtccttggagatgctgatcatacttccactgcccttcttactatgcttacgtcgaacccaacccccccccccccaccaccaccacaaccgtatgtcctgtttgaaatacgaaatgttcttccattattgtatatactttataacttgacataatcacatcactaggcctcccttctgttctcacatgtaaacgggtttctttcaagtattttgaatttttttgatggaataagccttgtggtctttggtccttgtggtccttctcttgcttttaggttgtttttcccccttttaggacagcatcctttcagttttgcttttagcatctttcggttttgcttttagcatccctaggacagcatctagcatctcctttatgctttattcagtttggatgctctctaggacagcattgcgttcaaattttagactagtgtgggcagcaattagctagcagccatccagccagctatggctatatatatgtatccaacctccctcgggaaggtatggcttttgtgttttgtgaatgaagaaaaccagaaaattgccccatctcgagtgccatcctcttctcaatgagagtaaccattgaaattctaacatctggtatcagagccacactttcctgtaggctaaacatctcttgttccaccccttcccaagctcggttgagctctcagccagcagcagcagcagcaccggttgctcctccttcccctttcccttccccttctccacgcagcagccccccggaggtgagccatgtccgacgctcggtctcggcgttcggtcgcctcgagcactcggcgtcagcaggacgccgagctcgccgcagcagaagagcgcaggcgagcaacggctcagaccgctgcagcagcagcgagggcggccagactggcggcagcggagttggcagcagccagggcggaggcgaaggcggaggcggcggaagatgcggcacgtgcggcggaggtagaggttgagaccttgcgcagcagcatcaacggctccattgccggcgacatcaccgccgacagggagcttgaggagctggcaagaggaagggcacgggagcgagcagagcggtgggcagcagcccacctccacggcggcggcggcggcccaagggaccgcgcgcccgccgacgggaacccagacgagcgcaggcgtgccggcggcagcccggagctcgcacgtggccctcgcaggcagcacggctctctctcccctgaccggcgccatggtcaccacggtgtccagacggtggtcagggactttggtcccggcggtgggtggcctaccctcaccaaaaccaactacatcgagtgggccgcggtgatgagggtgaggctccaggtgcggcacatgtgggaggcagtccggtacggtgacgtcgactacgacgaggatcggcgggcactggatgccctcatcgctgcagtcccgcccgagatgcagttctcgctttcccagaagcggactgccaaggaggcctgggacaccatcgctgcggcacgcatcggcagcgaccgcgcccgcaagtccacactgcaggcactccgcaaggagtgggagaacctggccttcaagccaggtgaggatgttgatgactttgctctccgtctcaacactctcttgcagaaaatggtgcagtacggtgacgacacctacgacgaggagagagctgtcgagaagctcttccgctgcgtccctgagaagtacagacagatcgctcgctcgatcgaatctttgctggacctctccacgatgtcgatcgaggaggcgttaggtcgcctcaaggtcgtcgatggtgatgagccacagcctctctcggggcccatcaccatcggcgggaagctccatctcactagggagcagtgggaggcctctcagggtgacgggaggaagggggagtcatcttccccgacaggcggccgtaagccgcgcaaggcgcggggaggtgtccagctacggtgggcgcgaagacgtgccgagggtggcgcccgcagaggcgcccagggcgttgccaccggcaaccacaagccggcacgagacgacgcctgccgcaact

SEQ ID NO: 3608 - DNA, 605 bp, Oryza sativa
tgcaccccgatatttttcaaagatgaagctacaataagaagtatagtatctttctatggtatcaaggatacatttccgcttgagggtcaccttgtgactaggaatcctgatgctggccatgttaaaagaatatactacgtgtcaaaatcagtgcaagaagttttggagctcaatgtaaaagttggtgagcggcttaagattacctcacttggcctaaagatatttgtaagtgtctcctttaatttatgttttcttttatcaattttagcttttatcagtggggcaaatggcacgacactaagctgtgattcttgcaatatctttcaggaaagacagtcatcaaaggatggctcaccatgcacatttaggttgtcttcagagggtttaccactgctgctttcatacatcaccaaacagattctctacgcttctgcaattgacttccagcaccttttacaatacagaactattaaatttcctgattttgtggatgcaaaatttcgggaaaaagcttcagctttggtggctggttgctgtgttgtaagactttgggaaggtaacatcacatcccacttataagctttatagagaaacaccacaacttg

SEQ ID NO: 3609 - DNA, 589 bp, Oryza sativa
ttatcatattttgaacatttctttcttcttgatggtggttgaaatccagtatggcaatattactttttagttgatttgtttcatgtaacgttcctatttgagtttagtgtgtaggacagatagcgtttttcaaaaaaaaaaaaaaatctcagtcatgttaattgacctttgcttgtctactttattagctttaaaattctccatcataagtttggcatttctatcagaggaattattccgtaaacatttatgagcttgcatgctagcaactatttttttttattgtgctttaattagtggaaaaggtaatggcaagcaggaaatatgcaattaatatttgaatattgaaagcacttagaccaaaaacttctcacattgtttggagaactctgatgtttatgtcaaataacaaatttctcaccagatgcaaaggattggattgcaaccatcaaagtttacatatgatggttttatcaaggctgtcatggttgggaaaggagttgcatatgccatcaaagtggtatgctacttatagcctgctgtcaattatgatgtatccagttctctcaaaggatatagcggtaaactg

SEQ ID NO: 3610 - DNA, 751 bp, Oryza sativa
ctcagggtgcagatggtgcttggaggcgtattctacacggcacgtcgccgttactcacaagtatggcacagtgaaagtccgtaacgttgccaacttagcagcaacatcactaatatcctgggtatgcgtttgagaggttagaactcaatacgaactgactagatttgcaaatgttataggagtaaatcatttccccttacctcattaattgtttgtgatcgctttacatccatacaactactaatcttgcaaatggcattggagtaatcattttcaccataactcactaattgtttatcaattattcatatcaactaccccttaaatggcatacccatataactctacttgtgttgctatgttagatgaggtgacaaaaaatgtggaaactgcattggaggttgtggagcacgccgcggaggtgacagataagttagctgctaatgtggccaatgctctaccagagaatggtaccctgcataaatgggccgaggaggttgagtacattgctgagatagcggataaggatgcacagaaggttgaaatcatcataaagaaggtatgtatgtcaattgttgagtatatatatcatcatgtcaaggatatatatattattaatgagaatgttatgtccacggtacatgattagcatgctttctgtttacatgtagtagaagttacagctagaaacatcatatgcaattacatgtttctgaccatttcagactattgaattggcgttcgactaaag

SEQ ID NO: 3611 - DNA, 569 bp, Oryza sativa
acctgtttttcttgtatgtaatttgctatgcatatatgctgcatttttttttgttatttctatgcttcattaaaactgtacaaccttaaagaaatcttctctatgacttccagggcttgcctgcttctggtgttctttatgggtatcgtgttggtggccctcaaggatgggaccaaggccatagatttgatagcagcactgttcttctggacccttatgcaaaattagtttctggtcgaaagtactttggggttgctgaagagaagtcaagccagcattttggaacatatgattttgatagctctccttttgattggggtgatgactacaggcttccgaatttgcctgaggtactattatcatttggtaggattgacaagatgttccaaacatgaagttctcaattttttgtttctttaatctaggcagatctagtcatatatgaaatgaacgtccgtgctttcaccgcggatgagtcaagtggccttgattcgacttctcgtggaagctatcttggtctcattgataaagtaagtaccattttttgtttgtttatgaacacaactatt

SEQ ID NO: 3612 - DNA, 694 bp, Oryza sativa
ttcctgcaccccagattagggagttgaagtttgtgtttggcgcccccaaacattgggcatgataagccgaggaagctgtatagtggccgctgcttgtgaatttccaaacaatctgatccggctcctcgctgtctaagtgcacattccgtaccgcctcccataggcggactagctgatcgaggaggttgattgtgatagatgaacccgcatcgagggtcaggtcatgcacccaggagtcgtcttctttcccttgccgtagggatttcttcctatttttggagatctcatagaccaacggcattaggtcttttggtcttcggccgttaatccatgcggagtcccagaagcgcgtcgtattcccatcgcccacagttatctttgttgaggcggcgaagaggtccctatccacaccatcacaaggcgtttccaaacccacccaaggcttgcttggatctctccattcgttccacaaccatcgcaatctcagagctcttgtaaatttgtccaagcttaggacaccaaggcccccttggctggtcggcaagcatgtctttgcccagttgaccttgcatttccccccggtgatatcccccgtaccagcccaaaggaagcgacgtctctgcttgtcaagctgctccagggattccttcatcaccttcaaggcagtgaggagataaattggctgtgctgaaag

SEQ ID NO: 3613 - DNA, 528 bp, Oryza sativa
cttttaaaaatgctcaaatttgagaggaacagtactgaaataatattcctgatttggccaaaacgttggctttgtgatgctaacttgtttatctccactaaaaggaagaagtgctgaatggtaatcttggctagttcattgcctcacttctaggatgctttcacctctgtttgtttgagtgcctgactcaatatttttgtccatctattatatagtagtcatggaaggaataatcttcacctgtttttcttgtatgtaatttgctatgcatatatgctgcatttttttttgttatttctatgcttcattaaaactgtacaaccttaaagaaatcttctctatgacttccagggcttgcctgcttctggtgttctttatgggtatcgtgttggtggccctcaaggatgggaccaaggccatagatttgatagcagcactgttcttctggacccttatgcaaaattagtttctggtcgaaagtactttggggttgctgaagagaagtcaagccagcattttggaacatat

SEQ ID NO: 3614 - DNA, 509 bp, Oryza sativa
tttgaatgagcctgatctaaattcgattgacatggaggtagacaatgacaatgtagaatgcaagtacgggaatgcaggcgattctactagtcctgaaaatggcaaacatattgaagatcagattattgattgcagaatgactgctttgaaagatcatgagatcaataccgatgtcaggataagagatgtcaacctcaattcatgtttagatgcaatgtctcctcctgtttctggtgcaaattatgaaacatctaatgccatagatgacaataatagatcatccatcattgcccaatgctttggtgctaattctgccgatgacaatgcttgtaaggaggaaaattttgtaaacaaccagagcagtgtatccaaggctgaaagcttcaaccagaacaatgacatgatatatcaacctaatttgaccatggatcctatctctcctgctcaaattaatgtggattgttttacttcttgttcaatgacatctgaaattaagaacaatagcaaca

SEQ ID NO: 3615 - DNA, 10777 bp, Oryza sativa
accccaatgcctgcgaaaatagttgattttcgcaggtgcgcgctaggtccgcctgcgaaaatagcttcgagcgctaaaaaaaaattgggcagccacccccgtttccggcggtagcttcccgttctcaatccagttcccaccccttccccatccaatccattcaattcatccagttcatccaaaaaaacaccgaatcaattcatcaacagttcatccaaaatcacctaatcaattctaaaagaaagcaaataaaaacattcaacaaatcacggccgctgcccagccttcgtccgccgctgctgcacgtccgcgccgcgccgtcgtccgccaccgccgcacagccgcggcccaccgttgtccgcgctgctgccgcacggccatggcccaccgtcgtcaatgcggatctgggagggaggggcggccgggagccgccgccgccgcagcagcacggccgcggcccgccgtcgtccgcgccggcgccgcacgggcacggcccgccgtcatcaatgcggatctgggaaggaggggcgcccgggagccgtcgccgccgcagcagcacggccgcggcccgccgtcgttcgcgccgccgccgcatggccacggcccaccgtggtcactccagatctgggagagatgggcggccgggagtcgccgccgccgcctcaaccaccctcgccgctgtggccatgccaccgcctcgaccctcctcgcagccaccgcccgccgccgtgctccccccgcccccctccggccagatccgccggccaccgctctccccctgctccctcctgccagatctgggaggaggggccgggagcgtgccgccgccgccctccgccgctgccgccctccgccgccaccgcccgtcgccagccgccgccgccgggaggggaggggagaggagaggtgaggtggggataggaggagaggtgaatgagagaggtgaggggataagcttgccggctgtgagtggtgaaggtgtggagacttagaaaaaatcttctcctatcccaagtctattttcgcaggcgccgcttaagtggtccgcctggacatcaaatttcacctcgatttatatttttgtaggaggtcatttgactctatgggtcatgtccgcctgcgaaaataggactcccacgttggaaaaaatgctttttctagttgtgtttttctcaatgtatttggtgacattgcttgcgaaccttgagaagagcaatggcattatagactccccgaaatgagtagcaaacaacctctccataactgctcttatggacttggcgacgttcaccccagactcaacagggtctagcacagtatgtccttcgaattcgtcatcttgtggatcccagcttgactcgagtattttgatgtggttgatggagaaaagcttttgttgcatgatggctgttctaacttcattgaccgatggtccatacaatggaatgttaaaggagtcaagcatctccttctccacgaggccctgttgtggaaaagtaagttactttctggttttatatcaaagtcttacatgtttctactcattaacttttttatcagttaaactttttaatgtttggctaaacttttagaacataacaacatttttaacaccaaacaaacatactattgaaatatattcaacgttagtcttaatgaaacaaaaatactgttataatatttttatattattatataaatttagcaaaacctataaaagtattaaaaaatcaaaatgacttgtaatatgaaaactagagagtagataaaatctaaaaactttgaaacaatgatgttgtttcaaacctcaatgacaagtgattgtaatgcttgtgaaattaattcataaagaatatttttatcttcatcaaatatgttgtcattcttccgtccaagaaaagttagcaccatcttaccaccagatatgagttcctccgaacgcaactcaagaaagttcaagaattccttttcaaattgctcctggtatagctttatcacttcttcaggtgtagtcaccgcaatgtaaacgtttccttcattttggggttccttttcacacctctccttaaacatctgcaagcagaatcattgtgatcacaagaaatcactggctttacaaatagaaaaagttataaggctgacttatatatagagacaacaactcaaaacatcaatttactcgattttcattatcacatttctcaaacttctaaatgatgtgtgtcatgtgcaaatattttctatataaaatcattaaaaacataaaaaaaactatttttaaacttgtaatggttaatacttaattaatcatgtgttataatgattagttctgttttatgagcagtaacccgctccagcttaaatgtggtttcgaactcaacctaagtctactttgcatcctctaactacgttatggttggcatttcaaatcttccaatcatcaaagaaaaaaaaaatgttagagagcggctttattatatgcatgcctgcgagtccatccatgaaagtgccaggatctggcaaatgacctgcactgacggatccactctcgatcgtcttccccctacacttcatcgggagcttcccagcggaacatacggagtgcgtggtcgtgttattctggctctttaattttgtatgatttggctcccagatctaattttgtgttctttaattggattttccatgacacgctatcacgatcggtgcatcctcgctttcataaatgtgtcatggaaaatccattaaaataacacaaaattaaattatacgttaagcatggggatagcggatagctagcatctttcttcaaatttttgaaaggaaatgtgtaaaatgtattaaaaatatacattataccatggactagtttagtcatccttatgggctacaacatagtgcaatgacaaaattatcatgttcagtcaaaaaagagaaaaaaaaatactcatatttgtcaaaggcgaagcgtgttgagggcactgtcctagaaaacctatccacggtctctgtaccaccaacgttgatcaacagagatactattgaagcttggctgcttagcagggccgcaacaaccctcatagataagtggcacaaactcagggctaaggtaaacaaagcccaaggctttaaccgcaccgggggccaactccagcaccttgcaatcatccccccccttcccccaacacacacgcacacaccgtcactaacgctttggttcttgcaccgaccacgccttgtcctagacaacattgcccatagccacggcgatcggatctcggagccttctcctctcccttcacctccatgacctcttcgggtgctttgtcctctgccaccctcatcctatcgttggcctcattgtcgctctcaccatcctcttcctcatcctctaatgagggtcctcgtcagagtcctttgggagggacccgttctactagtgatcgaggtagttgtccacttcatcgtcaggtatttcatatagcattggtgggagcgatgacgacaaggtgtccccaccattcttcacctctctctcgctggtggtgatatactgcagctgctgcagtgagtccactatgaccggagagagatagacaggaggtggggaggcgaggtgaccggagtgagtgggagacgaggtgagaggcgagaaaacacccattgccccctacttattggaacaaagataaggcatgggaggtgaggaggcgtgccgtggtaacggagcacatgaccagcgatcagctgattggtcttcaaaggaggaagcgaacgatgttctcgtgtatggtagtggatgtagttgaagacttaaagtagttgcacgaagaatatgaatggacacaaacaggtgtgcttttcaaagtgcgctgccaggaaaatgtcattgacatgggcggccgtttgtcctgcattgcatgtgtacataaacctacttttgtaggcggtgacttacgatagccgcctacgaaaatcgtgttactatgacaccctcaaaagtagaattggtttttacgggtagctatattcagtggcagctcgtggtattatatttacacgggcggctcttgactccctttattcggtaatctaagcatgcattttgcagttttgtccgtctacaaaattaagggtgagtggtatatgaaaatcatttttctactagtggttaagctttatttagcatgcaatcaggaatcaacttatcaatataatggtaataaaatagttaaattagagcatgaataggagtatatcaaaagttgatcacatatcaattaatttgtacaagcatgtaatcatagggtcaaaatgaattataatccagtgcttagttccgcacactaccacaattagaccatcaacaacatgaatgagaagtaccacttgtatcaatatataatatgcaaagactcctaataatagcaacggcaatggtatagcactttgcacaaataagaaaaataagtaaatattcagtaaaaaaaaagaaaaatgagtaaatagggtacctcacaagtcaaaggcaaagcgcgcgttgagggcactttcctagaaaacctatccacggtgaatgtagtctatataccaatgattcaccaatgttgattagggggtgtttagattcaggggtgtaaagttttggcgtgttacatcgagtattatataaggtgtcgcatgggatgttcgggcactaataaaaaaacctaattacagaatctatcagtaaaccacgagacaaatttattaagcttaattaatccatcattagtaaatgtttactgtagcaccacattgtgaaatcatggagcaattaggcttaaaagattcgtctcgcaaattagtcgcaatctgttcaattagttatttttttagcctatatttaatacttcaaggaggtgttcaaatgttcgatataacagggtgtaaaatttttgtgtggaaactaaatagggcctaacaaatatatattgaagccgcatcaataacccacatagataagtggcacaaacactgggtcaaggtggacaaagataaaaaaccaggtggtattatacttagggttcacttattttgtttgtttttgatatttgaggggtgtaaaattttcgatttcatagttgaggggtatttcttgaacctaatagttgatgagaggagtactatattactcctcacaattaatgcaacatatatatggagttatctctactatacattatgtaatgccgggtgcaaaacagatgtgattcctttatacttgaaaaagaaatattgtgtttatctaaaatataaaatgtgcatatttttatacataaaacccaagacttgtagcttttgactaataattatactaacaaaatatatgtttagttgcacacgagttgtattatccaatatttgtattggaatatacttccgtagtatgttgatttcataattaataataaaatatatttcatttcaaaggtcaattgtagaacccaagctagaggagaggaatgatttgattcacaaactagttgagtaacattaaatctaccattaaagatcaaagtctttacgtggttccatcatataaattgaatgctaacaaaaaaaaaacttggccgagaggaattggagggcaacaagcaatgctatttttaattaaaaaaatccaaattattccctgaattttttagtccaccaaattaccccctgaacaacaatagttcatggtaactcggacattttccctttttaagtatgcatgaaactattgatcatattttctttgactgtcagtctgccacgttgcttgtaatttcaaagttagttttggaaattggctatagggagtgcctaggtccataaaaaagttggctggttgagtacattatgttggtcattttgacattgccataatgataaggttttcaacaattaaaagttgtctagtataatgttgattatcttcacatgtaccacagttgactccactctttctccttgatggtatcacagcaagaatatgatactatgcgcagtgacactatacttgaggaatcgttagccaattcttttatttcacttttagatgacgtagtaccaaccaaatgtcgtgcttaaatgtatgtgattttggatttttttttcagttgaaacttttctagagggagttaaggggtttctcccatcaccttatgtctctattttaggtatcagaactcaatggttgtgtctaatggctgtggccggaaatgtaaacaattttcattatctaaaataatgaataaacataatgagaaaaagatcaatgtacaatagtgaagattgtatgggagttaatacgcttatactatgggatgaagagttagcaagatctaatttctcatggtttacaagctttaagtcaaaacattctagtggattggtgatctattagatccaagagttgtacatacagaaacggagtaacgcactatgttgtatcattaatgctctcagcatggatattcagtacaaatctttaagggttattaaccagtttgcacactttcacgtcaaaattacataactgaattaagcactcgatgagataatcgtgttgatgtaattaccggggaaagccaatgtagggaatacgatgaatggaagaggtgaacactcttgtcagggagcacccttgtatagtaggatcttggcaatccaacaacatagtactgcggcagtgtatctgcttcttggtcttgatctttggtgaccaaattatcaagttgttctaatgatttaaataggtaattaaagtcattaccaggcagatcattcaggaagaactgaaggtcaactgggtggtgacctatgcttgcacaatatttgctgatcacttttatcacctcagagatgaagactagtgtattcggtcctgaagggcaacccatgtcggcaacaagtatcgtcttagggaggagtgcagtatatacttcttgtattgcttcctcaatcattggcttagttgcaagcaaagcttttgcctagtaacatccatgtgcacattgaataaagttaattggattggaattataacagctggattttgtatatcctttgacgtattttataatgtacaaaacatcaaactttgtaaaggaataagtaataattaattaaactacaagtacatttaccgtattaaatttatatcaatcgattcatctttcaaagttcattaaagataattacttaaaagctatttcaaatacattgaatgataaatcgacagtcaacagttgaactatttcaccgaagcataaactttttgactcattttacaccttgaactattaaaaaggttcactttcactccccttatatatcagtcatactttacactgaaaatttggtaaaatatagatgcattcacaatttacatctcaatattattttgaaattttctcactgtttatgtaggttggaagcccttaagactgttttgaacatcaaaattttaaaggtcaagcaaacagcgatgaacaagtttgattttttttcaactttgataatggtgccatctatggctctaacaaatttaggcttaaaataaaacttgtgaaaagaataggaaaaaatagaaatattattagggagtaaagtgaatcactttcaatatagtttaggcgtaaaataagcaaagaaaaatagttaatggggttaagtgattcatttatttagttccagggagtaaaatagactgtatttcaagtttaaatatgccctatgaaatcaaagaagatagtatttacacaagctagaatgtcgaacaaaacagagtaaatttatgttcgaacaaaacagagcaattttttaaagaaattttatatgaaaagttcttttaaaaacacaccatttaatagtttaaaaaacttcttaacaaaacataggtaagttataatttagagtaaaagaagaccaagaaaaaaaagactaagaccttattaggcatacttgtttgatgcgcttaaacaggaagtcagtttccatgcacatggatatgcatacacaaacggaagcactcacgagattatattccccagaaagtacaaatagtgatatataatcccatgcattaaggaaaagattaactcgtgtgtacgaaaattttttagaaaataaggaagcatagtgtgtacgaacctgtatcttcgagttcttcgcatagctgttttctccgtcccctccagtcatgcctaagtaagtttccattgaaaaagtggatacttatcctccagggatttacctaatttcttattggaaggagcagtatatgcaatgggaaacttgacatacaaggagaaaccactgtatattaattggacgtgactccacagctagtttgtctaaaccagctaccacttcatctatgagagatattatccacatataatttaaatacaattttctcttaaactactaatcatatctatgatccgattgcaccgttgtgtttgtagcaattaaatctttataacaagatctcacatgattatattttgatgaaaaattataaattacttttataatatatctaaattacttttagatttcactaaattacttcttacacatgtaaaagtaaattcaatgaagcctaaaagtaatttacatatattatagaagtaacttataacaaaaagaaaataactttaatgaatgtcttttttaattggatgtgactacacagttagtggtagctagtttgtactccatctagtatctcctttcaacttgaaaaatacaatagtatcttcttttctcattctacatgaaaaacaaaaatgaaaggaaaaaaacaatcgatgattaaacagatttatagataattacttttgaaccatgcaaaagttacttccaattaacattgaagttacttttaaaaattgttaaacttatgtgtgttgatcagtgctgattaaatttaatttctagataaagtcatatttttatccctacttttagactctgttaaatttacttttatatgtctaagaagtaatttagccaactctaaaagtaacttatatatatgataaaagtaacttacatatataataaaagtaatttacaaatataaatattttttcatcgtaatctaatcatgtaagatcttgttgtgaagatttaattgtaacgaacacagtggtgtaatcggattatagatcggataagtaatttgagagaaaactttgttagaagaggaaaatgacgtacatgtatagtaaaaaaaaagcatgcatgtagtaccatgtagtagctggacttctccacgtttatccgtgtttagacgtcgctagttaaggcaaaatcaagaggcctctccaaacagatttttcaatattaatttatagtgccaaatggtggttgtttcttgggagaacacatcaacacaaccaccatatggaacagccatgtcactgttatttttctgaggaagacaaccaccatttgactttataattctcagttttatttttttcctcaaaattcatgatttattttttgttttcacatttttgcatgttaaacctaaataaactggaccaattgaaaaataaatgtattccaagcaaaatccaatatttcaaaaataataaagcaatttcctatggactagtttttgctttatatgttgctcacaaaaatagtgtatgttgtacatacagtatatattaattaatatctatttttaagattttataaatttatgtcactagtacagatccttctatctgtgacgggctctaacatgcatggaaatagcgggccgtcacaagaaagtcatctcaatcgggctaaaaaagtgcccgattgagatatggtcgcacagacatattagatggacataaaacttaagcccgtcacggatgacacctatcagtgacgggccgtagtttaggcctgattgagataacattccatatctcaaacgggcttgaagttagggcccgtcacagatgaccatcatccgtgacgggcaccaactttaggcccgattgagataacattccatatctcaaacgggccttaagttggggcccgtcacagatgaccatcatccgtgacgtgcaccaacttaaggcccgtcatagatgactcatcagtgacgggctatatactaatcccagtttgacatgacttaatcacttaatctctatcggacattaattaaagcccgtcaccgatgattattttttcatttttcatataaaatgtttatatttgtaagttgaactatagcaaaataattaacttgcagtataataattcattttacgagtcaaaataattttacgggtagtaaataatatcaaatggaaaagtcatcaacaacaaagttgtataactcatcaagatctataacttttattttggtcatttttctatataacattttttgaacagtttgaatttgaatttgaaaatatgacaacttcaaacaacattttcaaatactaaatgatttcaactgaaaaagttatcaacaataaagttgaataactcatcaagatctataacttttattttggtcatttttctatataacatttttttgaaccgtttgaatttgaatttaaaaatatgataacttcaaacaatattttcaaatactaaatgatttcaactgaaaaagttatcaacaacaaagttgaataactcattaagatctataacttttattttggtcatttcttcatctgataaaatgatagtaacattgttcataaattttacatat

SEQ ID NO: 3616 - DNA, 2720 bp, Oryza sativa
tgggctattacacctccaacaaattaatacatgttcattgggtatcctacaccaaaggcaagaaacttttagtgtcctgtaacaaatttttcctaaatttttagccctacatgtgatttcttttttttaaaaaaaaagaacataactatacccctaaattaaatgggttgattggatccataccattatagattctcaggtttagaaatatgtcattacaatttctccatttgtaaattacaattttatagcactttgggatatgtcattgcttaccagcgcattcataaaaagttttcaaccattttacccttgtcttcttcctccttcccctccttccttcccctccccctctctctctctctctctctctctctctctctctctctcatgtctggggaagcctgggcctccactagagctcctcctctagcctttaccctgccatcaggcgctccttcattgctcgcccgctcctcgaagaggacgagcagaggacataacatgaggaggatgactagacaataacggtcgcagaatggagtgcgaacgttggttacacgaggataacaggtaggtgcttgtggcacgagaagaacgtgcagatgcccgcggtgcgaggacgacaagcaggacggcacatatgacgcgagaaggatgttggcggatgttggcaacacgacgaggacgatcgaacaatgttggcgactaggatgttggcggacgccgatggcgtgagggcgacacccgaacacggtgccactactagagctaggatctagaggtggagctccggatgctagagcttgagcaggtgagagagctccagccggatggcctcgacggatccgcacaggaaggctcgggattagctgctccggtggctcgtgaaggagctcaggcatagcagcatggtggcctactctggtgggcgggcgcccgcttgtcttcctcggagcgtgtacccatcctccttagagtgtgctcgtgatggtgctcaggttgtctgctctttctccacagtaggcaagcgggtgaaggagctagtgaggcagggtataagttgaaggactaggagctccagtggaggctcggtcttcattagacatgcgagagggagggggaaggaagaaagggaggaagaatacgagggcaaagtggtggaaattttttatgaatgctctgaaggagtaagtagtgatatatctaaaattataatggtacggttacaaatggacatattgtaatgatacatttctaaattagagaatttataatggcatctgtcctgatattggttgcatattgagttttaaagtcatgtatgcatgatatttaaaatattatagataataattgctagtgaatgatgatgtggcacacttgcatgtgatttaaaatactctagataaaaattactagtgagtgataatgtgacacacttacatgttgagcttcagaagttagtgaacatcataggatgctgagtgggactaatgaaaatccactactatggtatatgtagcagtgatttggtttgtcttactgggtttgtgttccctgatacaagctggctaggtgctcgatgaaatgtcgccatggagatcggtcactagctgaggacatcggcgtgcagcatagcagcaggaaccacaatttaccacctcaggatgcaggatttggaagatgctcggatcgatgtgaaggttcctttcgctacacacctgtaaatatcaaattgtgctgtcgaatttagtgcgattagacggttattgccaccattagctggttgaacaatggtactatatggttaaattttttttttggggggggaggggaatcaactaaatctaaagttctccggtctaagcggatacatatagatatgaatatgaacatcaatcaaatacgctgtattctgctataatgtgtattttcatcaatattaaccatttagagcttgtttgtatcaaagtttctttctgtgtgtggatgagtggggcagggaggggatgcataatttgcgtaatattcgtaaatcaaaatcctacaggagtcagtggtgtttatttgttgtttggattgaagaaaagaattaaacacgcatcgaaactccatagccatcctgagtgatagccttctctatttagattcctcaaaaaacaaaaacatgatttccctttagactcttgaaaagacaaaatcatctcaagtgccatgtgtcttctctaatctcttcggttcaatgacaagactatgaccgagtacttcacgttctccttcgcaaggtgcctctccacaatctgcgcaaacctctgaaagagtttgtcaagtatatattcgccaaaatggcttgccagcaagggctcagacactgctctgatgcacttggcgacgttcatcccacggtgagggctaatgtgcatgccatcatgttccaagtcatcgtagggatcccaattggactcaaacagctcgatatggtcaatacaaaagagcttgttccgtgtgattactgtcttcacttcatcaatggagggcccatatattggtaaattgaatgactccagctttcccttctccactatcccctgatatacgaagtcacaaagcaaaaaaattcctcatcatcagccaacagccatctatagtgtagcagcagggcattcattctacgtgaaaaaagtactgagctttagacctcagtaaaaagagattgt

SEQ ID NO: 3617 - DNA, 2332 bp, Oryza sativa
  unsure (1)..(2332): unsure at all n locations
cggacgtaaacacatcgattttattcatacgttcgacatgcctgtttatgtgcgcaatcccatcgtgtgcataaaccatccacatacaccgtgaacacctagcatacagtggtttgcaagttgcgttaaagccttgtaggcacgggcaggggtgaaccttgtaggcacctagcgatctctgcgtacgcgtagggcgtgcacgactcgcgaaatagcatatcagccatcacgtacgcgtaaactgtgttgtaggcggtactctctatgtacgtttttacgtaggcataatgcacacacctcgggctgttgtatgggcgagacgtgcgtgaagccttacgcgtacgcgtgtggtgatcgcgagttgcctacatatagttcatgcatgtccatggatcgtggacgtaaactcattcttcgtgcgcgtacactaaactttcaaacgtagcatggatatgtttacacctgagatccacacgtgggcgtgtaccatgtagagcacctcgcgatgcccacgtacgcgtaaaccgcgcacggcttacatcgaatcgacgcgtcaacccttagttgtaccgtacgtatgtgcgcgactgagccgtcctcgcagcctctttccctgcctcctgggcctgacttgcacgctgggcctaatgggctgatgggtgccggctggctggactgggggaggggcacggggatgatcgatacatccaacatccaaagtacttaacactagaaatataactagtagttcaactatataaactactacaatgtacttgcattttttctgcttcttcctcggtggcaagtctccagatgaactgtcgtcctcgtcctcgtcttcgtcgtcgtcatcgtcatcatcatatgatgcgagcagaggatcctttacgtcagcgttccagtctccgagacgtttacaaaaatcattccgcagtagacaaatcgatacgttaacatccgaaagacccaatgatccatatgagtaggctcaatatgttacgactatatggttcttacggtgaataggtgagaaatcacttcatttagtattctttttataaacaataaaacaatttcccatgcatttgcacgggtttctttcctatggagtagttacatacatatacatacgcgcgcggggatcacgagttgcctacatatggttcacgcctgcacgtggatcgtggacgtaaactcatcattcgtatgcgtaaattaacctttcgagcgtagcatgtatgtgtttacacccaagatccacacatgggcgtgtaccatgtagggcacctgatggatgtgttttcgagccttaggcacatatgtcgcgtctcgcgtgcaacaaccctgcagcgtaggatggatgtgttttcccgacgtaggagtaattggtggtgcataacccattcacctgtatgcgtacaccttttgaccgtaaatgggggattttttacatgaacctttagagcgtaaatggtgtacgcgtaacccattcgcgtctgcactagctcgcacccttgctcaacaaaaagaaaaagggcacgaagagatcctcgcaagactcacctctccgaaccccaaccccaattaattgtcccccaattaactgccctcgcctcgcgacgcctcgtgcctagcacggaataaacgcgttgattagtgaaaggagattactactataaagaaggaagcccccctctcgactctctcgctcactcccctctctctctctctctctctctctctctctctcgttctcataacttctctcttcgtccgaatcccagcgannngatggaatgggcggggcgacaatnnccgcttccttcttcttgcgtctggcaaggagaaggggaagtggaagcgacctgggggttccggcgacaaccccctaaaccctaaacccatgtgctcacttggatggacacattaaacatatcctacctccatcctaacatacagctatttctagatagctacatattttgggagtgagtgagtattccttttcatttatgaaaaaaagtataatacactcttatatatagtaatatagaaacttaatcatatcgaaattcagctacatcacatctcatttaaatcaatcatattatcaatcacctctcattcaatatcttcatgtactttgtacaattcaatatattaataggctggtcctagacatcacagtggctcgatcaacactgctttcaaacagtgtgaccaagtcattagcatgattaagactatagctaaaatttgggctattacacctccaacaaattaatacatgttcattgggtatcctacaccaaaggcaagaaacttttag

SEQ ID NO: 3618 - DNA, 571 bp, Oryza sativa
cggcgttcgtcggcgagatccacatcctggtgacgacgccggccgtgctgacttcgcgtaccgggcgctggcgaaaacgagcgaggcagcgtacgacgccatgttcggcgtgaacgcgcgcggcaccttcctgtgctgccgcgaggccgcgaaccggctggcgcgcgacggcccgggggcgcatcgtgacgttctcgtcgtcgggcgtcgggtcgctccggccggggtacgcggcgtacgcggcgagcaagccggcggtgaaggtgatgaccaagatcctggcgcgcgagctgcgcggcacggggatcacggcgaacgcagtggcgcccgggtccacgggcacgccgatgatgtacaccggcaagacagaggaggacatggcgcggtacatcgccgaggcgccgctgggccgcctcggcatgcccgacgacatcgcgccgctcgtcggcttcctcgccagcgacgccggcggctggatcaacgcccaggtcatccgctgcaacggcggcactatctagctaccctggcctgcgcgccaaaataaatgatttctccgttctaaaatataaca

SEQ ID NO: 3619 - DNA, 559 bp, Oryza sativa
caatgagggcagccccccgctcctcctacacttgcttggcgatctccgccagcaccttcttacaggtctcaagctccgagacgtgccggcggtgagccttacggcccacctccaccatggcctccaccgagcgtcgcccctcttcgacatgcgcccacgcggcgtcgagctccgcccgctctgcctgcaggacctccacctgggcacttaacccatccaacaccgtggtgtttgcggcggccaaggcctgcagaaggggctctgcgttcagtggggcgatagaaggcgtggggaagagccgccttggagaggatgccacgcggctcgggccgctgatggaagtgccggactcggggatgtcccccggacccggttggtcctgagcgtcgcccgagggagtgggcccaagcgacgcgcccgcagcctcgttgccagctgccccagaagttgtcgcctgagcgtcgcccgagggagtgggcccaagcgacgcgcccgcggcctcgtcgcgagctgcctcggaagtcgccatcgcctcgtcctggcgaaatccgacttcctc

SEQ ID NO: 3620 - DNA, 570 bp, Oryza sativa
ctcttgcgcccccgcgccgccgccgccgccgccggagaggaccgcgtcgaaccccttggtggcccagcgccgcgcgagcgtcgtcgccgacgacgaccgcgacatgaagtccgggggcacgatggcgaactccgagagcacgggatctatggcgcggtagtcggagccctggagccccacggcgtaggtggcgtccggcgtgctcacgcggaggtgggtggacaccgcggcggacagagccaccggcgacggcgaggcggcgttcctcgccgtgaactccgtcgccagcgcctccgggtgcagcgtcacgacgcacctcgcctcgacgccgctcgcctccggcggcgcggcggaggccagctcgacctcgatggagcccgtggggctccccctgacgtcgcggagcgaccatgcgccgctcggcgaccacggcggcatcccgtcaccgcctccgccggcggcgccgccgcagcggaggtccagcgacacgccgccgcggatgacggcgcggccgccgaggccctcggcgacggtggtgtggatcacctcggtgggggcgccgtgccacat

SEQ ID NO: 3621 - DNA, 537 bp, Oryza sativa
tgtggtacaatccaattttgctagctaccctgtggctcatttttttaagccacaacttaagacaagtgtggcacaaaaatatggtgaatggtggcaaacttagtatagcatctaaacagcctagagcgccatgaacgccgagttgacggcccacttcttcaccgcgccgcagtcgccgtacaggatcaccagcctcggcacgctctgcagccccaccagcgtcgccgccgctagcggccacgcgttgtcccccttctccacccactccggcgccgcctccgccgccattcgcggccacgaccgaggtgaggcgagggaaatggatttggaaatggcgcgaagtagaggcggagagcgagttatatatatatatatatatatatatatatatatatatatatatatatatatatatatatatatatatatatatagagagagagagagagagagagagagtgtgtgtgtgtatatatatatatatatatatatatatatatatatatatatatatatatatatatatatatatatata

SEQ ID NO: 3622 - DNA, 607 bp, Oryza sativa
  unsure (1)..(607): unsure at all n locations
ccgacgtgtagtcgctgctgccgccaccgtcgccgtcgtccccctccgtccccgcctccgcctccatctccgcctcctccgcccgccgcctcgtcgcccttgcctccgccatcgccgggggatgccctagatctgagcgccgcgggatgcggtgggccgcgcggattagggttttggggcggcgccgcgcggattttggtggtggcggaggtggagagggtggtggtggcnctcgccttccgccgctgctgcttccctcaccgcggctcgaggggggtcagttttattatggcaaaatttatcggtggggacgcaactaatttaattaccatcttaataaattttaccaaacgacttttaaatttggggtcgatttttatttttatttttttgggtgagaggacaggctaactaaatatcctccgtgaatctacacgctttgagggtacattatagtaatcatagtaataaaaagcaaggttaatagtatagctaactactaactctaaatcatgtataatcaatttagtagccaatttatatataaatagttacctataaacatatgctacattattaatggaagggcccacctggcatacaatca

SEQ ID NO: 3623 - DNA, 697 bp, Oryza sativa
cacaaaagaagagggaattccgtgcgctccatcagggcaacaggactgtgacagagtacctccatgagttcaatcgcctcgcgcgatatgcaccagaggatgtccgcaccgacgccgagaagcaggagaagttcatggcgggtctggatgatgagctgaccaaccaactgatatctggggactacgccgactttgagaggctggttgacaaggcaatccgccaggaggatcagcgcaacaaaatggacaggaaaagaaaggcggcgcagttccggtccaaccaaggcagtcagcaccgaccgcgcttcactcccggacagcagggtggacctaccaccatgatcgtccgccagcaccgcccgttcaactccagcaacttccaccagggcactagtggcagtcagaaccaccagggaggccagcccaaccgcggtgcagctccacgcccaccaatggcaccggcacagtcagcccagcccgcgcaagccaagaaggagacgggagcaaaaccagggtcctgcttcaactgtggcgagcttggccacttcgctgacaaatgcccgaagcccaggcgtgccgggccaaggtttatccaggctcgtgtcaaccacgcgtctgcggaggaggcacaagcagcaccagaggtcgtactgggtacgttccctgttaactcaatccctgcaacagtactttttga

SEQ ID NO: 3624 - DNA, 809 bp, Oryza sativa
aaaaaaaactgaagagttaattgcagatattgatgaatgcttactgccaaactactgcaatgggacatgtcaaaatcttcctggaaattttacatgcactagttgcccccgcagaaaggagtttaatccaattacaagacagtgtgttgcatcagctaagcaacacaatcttattataggtaagtcatagctgacagattagtcaatcttattgcattaagataatgcaaagtggcttcacggcacaaaaataatgaatggctgtaggtattacaactggtattactgtggcattggtttcataattattgcattaggtgcaattattctagccaataagtggaagaaaagcatccaaaagagaattagaagagcatactccaagaaaaatcagggcctactcttggaacagctaatctcagatgaaagcgccacaaattaaacaaggatattttccttggaggaactagaagaggcaaccaacacctttgatgctactcgtgttcttggtcgtgaaggacatggcacagtttataaagggattctatctgaccagagtgtggtggccattaaaaaatcaaaaattgtggaacaaactgagatagatcagtttatcaatgaggttgctattttatctcaaattatccatcgcaatgtggtgaagctttttggttgctgtctcgaatctgaggtgcccttactggtatatgagttcataccaaatggtacattgcatgatcgtcttcatactgatgttagtgttaaatcctcattatcatgggatgatcgaattaggattgcttcagaag

SEQ ID NO: 3625 - DNA, 580 bp, Oryza sativa
ccatgtgtcccaattaaagaagtgtttaagggtacctgaagaacaggctaattcggaacacattgatatccaagaggacctaacatatgtggagaagccggttcgcatacttgacactagcgaaaggagaaccagaaacaaggtcaccaggttttgccgtgttcagtggagtcatcattcagaagaggaagcaacctgggaaagggaagatgagttgaaggccgcccatccgtacctcttcaccagctccaccgaatctcggggccgagattccgtttaaggggggtaggtttgtcacaccccgaagttttcctcccaagtcaaaattgtaatttataattgaccctaagaaaatgctggtgaaatcaggagaaaaccctaagaaagtaatgcaaataataatcggatctgacatgtggaatttttcttgaattctacatgtcgaaattcattaacaggatttttagtggaattttcagagctctagaaataattttaaccaattaaaaatcactaaagtgcaattgttaattccagggaaaatcctttttccttttctttttctttttcctctcttttt

SEQ ID NO: 3626 - DNA, 1271 bp, Oryza sativa
ccacccaagagggagattgaattccggattgacttggcaccgggaaccgctccaatttacaagagaccatacaggatggcggccaacgaattagcagaggtcaagaagcaagttgatgagcagctgcagaaagggtacatacgaccaagcacttcaccttggggcgctccggtcatttttgtggagaaaaaggataagacgaagaggatgtgcgtcgattatcgcgcacttaacgaggtcacaatcaagaataaatatcccttaccgcgaatcgacgatttatttgatcaactgaaaggagctaaagtgttctctaagatagacctgcgatcaggctaccaccagctgagaatccgggaagaggatattccgaagacggccttcaccactcggtacgggctatatgagtgcacggttatgtctttcggacttaccaacgcacccgcattcttcatgaatctgatgaacaaagtgttcatgaaatttctggacaagtttgttgtggtattcatcgacgacattcttatctattcaaagtccgaggaagaacatgaacaacatctccgtctggtactcgagaagttgaaggagcaccagctatacgccaagttcagcaagtgtgacttctggttgacggaagtcaaatttctgggccatgtcattacagcccagggtgtagcagttgatccatcgaacgtggagtcagttacaaaatggaccccaccaaagaccgtgtcgcagattcggagttttctaggactggcaggttattaccgccgattcatcgaaaacttctccagaatcgcccgacccatgactcagttgcttaagaaggatgagaagtttaaatggacagctgagtgcgataagagctttgaggagctcaaaaagaaattagtatccgcaccagtattgattctgcccgacccgacgaaagacttccaagtctattgtaatgcatcccgtcacggacttggatgtgtcctaatgcaagagggcagagtggttgcgtatgcctcgcggcagttgcgtccacacgaaggaaattatccaactcatgacttggaattggcagcagtggttcatgctttgaagatctggaggcattatctgattggaaaccgctgcgaagtatatacggaccataagagtctgaaatacatcttcacccaaccggatctaaaccttcgacaacgaagatggttggaactaatcaaagactatgacatgagtattcactaccacccgggtaaagccaatgtggtggcaga

SEQ ID NO: 3627 - DNA, 688 bp, Oryza sativa
tcgtaaaattgaagtacatagaagccaaagccatgtcatattccattgctgttatctgggttgtactattggcaacaagaggtttgggagttttggtggcggtgttgcaggtaagctcgaagccgtcccgaaagcagcctcccccaatcccgaaggggtaggagatgccatcgacttccccgcagctagaggggcagtgagcgagggagtcattagaagggacaatcaagagccctccaccaactccatagactgaagccaatactcgtggcgtagctgccgagcacaccagcacaaaagaagtggcacaaactgccagaaagctcgagctcatctttgcgccagccggcttgcccttcctggtgtacgtaggccggtgcctgttaactaccgatcaatttatattcagaggcagccatctctttgtgctcacgctttcgtggactttataagtatagatgccagattaataccagccactccccaagcgctatgtataaaacatatatggaggaattgattggcttatactcgatcggcagaaaacaattttatcgcaataatttgccattgatcgacgaagtccaggggcactagtcgcatcagatatcccggtcgttgctggagccaacgactcgtccaactgccggtcgctgctcgcttctacgtccgattttctcctcgcgtc

SEQ ID NO: 3628 - DNA, 516 bp, Oryza sativa
ccactactctctttgtgggatgcattcttagcgttcttggcgatcgtctggtcgaggtgtatatgcatatgaccgacgctaaggagttgtgggatgcactgaatactaaattcggtgctactgatgctagcaatgatctgtatatcatggagcagtttcatgactacaaaatggctgacaaccgttctgtagtcgaacaggctcaagagatacaaaccatggctaaggaactcgaactccttaagtgtgtcttacccgacaaatttgtggccgggtgcattattgcaaaactacctccatcttggaggagtttcggtactgcactcaaacacaagagacaggaatactccgttgaggggttgattgcgtctcttgatgttgaggagaaagcctcggaaaaagatgccgcgtctaagggcgatggtgggcagtccagtgccaatgttgtgcacaaggcccagaacaagagcaaggggaaatacaaagctcagcagaccaccaacttcaagaagcaga

SEQ ID NO: 3629 - DNA, 538 bp, Oryza sativa
catccactgggtgccgagcaccatgtcgtaacctgcaagtggaatgacaaagagatcgacggtgaagagcgagccgtcgatggagagcacggcctgtcggatgacgccaggacatgcgaccttctcgccattggccacagtcgccgtcatgcgtgggcgtggctggaccggcagacccgtgcggcacgctgcctcctcggcaatgaagctgtgggtggagccgctgtcgaggagagcggtgagggtggtggcgccgacggtcacctgtacctgcatggtgtcggcgaccggtacgccggcgatcgcgtggagggagaacaccggggactccaagtcctgcggttcctcagccgcgtcggtgtcgtcgtcgtcatccatagcgcagtccaagaggaacaagtgcttgcagattttgttatggccacggctgtacttctcgtcacagttaatgttgagattatgggtatataatgatttaatttattccataaataaatcatgacattacagatgaaaactagcatgaacgcctcattag

SEQ ID NO: 3630 - DNA, 22140 bp, Oryza sativa
  unsure (1)..(22140): unsure at all n locations
tcctaatcatttcctgcgctttccctgccattctactcaggaaagcgaccacaattcagcgctggaacatatattacactcggtataactcacagcttttctcgttaaacaactgtataaaaactagagtataagagcaaattttgtaatactaatatatagccagacgagaagcgtatgcgagtgtacgacctgtgccacgcaatgccttgtcggtctgatggtggcgaaaacgacgtgaaacacaacaggagaaattgagatgagatgagatgataccggtgttgtgaagatcctccaggattattccagcgatgtagagtacctgaatgacagccaagggtgaaagtaaagggtaagtaagtttctggggataaacagcaggggggcaacttgtattggttattgatgcaagaattgacttggaacagaatgataacctttcattagggttagtagctttagctcggatttgagtagtagaccatcctgcagtgatcaaacgaatcagaataaagtagcaataaactgacctccacgtaccgtatatctatgctggatccagtcagcctggagtgtaaaataatgaaaagtgacaaagaaaacaaagctcttgaccactgagaaagtcaccggaaaaatgctcgaggagcagtcagatggagaactactgcataatcaggcatacatcaaggaacaagccgtagaaatgcaacagcatcaacaacagtcacagcacagaacacaagtttaccaaccgacaggactacatcataactgcagagaccaggcaggccatgtactacgaaatcgactactctaaaagaaagcaagaaaagagtgtaccatgacatcggcagattgccacaaattaagcaaagggaaccaagtttgcattaaggtttagtactcaatcaaagttaacaaccgaccacaaatacagtgttccaatgactgaagcagtacgaggaaaccattacacagatggattgctgatatatgaaaagcttgactaaaacctacacggtaactaggactcatcacacaaaagtccagtttaaactaaggatgctcctgtcctaatcttcactctttggaggacttgttgatcagggacttgtggatgtgaggaatgacacctccaccagcgatggtacccttgatgagagtgtcgagctcctcatctccacggatggcaagctgcagatggcgaggggtgatacgcttgaccttcagatccttgctagcgttcccagccagttccagaacctcagctgttaagtactccagaatagcagcagagtaaactgcggcagtagcaccaacacgtccatttgcctgagtcctttgcttcaactggcgatggatacggccaacagggaactgaaaatatgaacaggaaaaattatcagagtccaaattccacaattcaatatagtgaactctataccaacactaatagtagaaccattaatatcacattgacaaccaaagttgttttctttatatcacagaaacataaaatatagcaacgccatacaagcagtagcacataaagttgatttcataaatctgaaaaatactagtatatcatggaccaattgactcgctgacatgctcacggtggactgaaggatgtgacaccagatagcacgtacaaagaagtcagcctcaattcacagaccatgaaatatattgtacatatgttaacaaatgatgtcaacagacataattaacacatgatgacaaacaagccgctgtttcacataatctgacaagtgacaacaatataacaaagcaacataacgttctagatgctggaaatagtttgcacgaaaaaaaataatgtgtataaatcaggtgcatgtttatcttatctatcaagaggtaataagtcaggtgcttgattgtcattgtatccccatcccctcaggaaaaaagaatcaacaagaaaaactactttgaaaggcacacacatgcaacataccgcagtggcagacccagaggaaaaactaaaaagcaaaatcaaacccagtatcctctgccagtggtgtgtagcccgacatagatttgcccctgcctaccagagtcctatcatggttggcttccatggtagctgaaaccaccacagttggtgccactggcatactaccaccttcctagatgcacaaattacacatctactccctctgtcctagaaaaaaaacaattcctaactttaaatctgaacaattgtttatccaaatgcaaagctaggaattgtttttttctgggatagagggagtaaatgtgtaaattgcactaatcttgtttgctacctcaacagccacctcaaattgtccacactatggccacatgcatctagtttccattttccaaccatccatcacgaccagaatagcaaaaaaataaaatgtatcatcacataaactaaaatctccaaacgtatattgttctctcatttaactaaaatctccaaacgtatattgttctctcctctttattaaaaaagaaagagaatcccccagcttcaattcttattgaaacaaagtatcagtacactctagatcgtttaggcaatacaaacaaacgatgtcctgcaatcatcctcttctgtaatgttagcatgttagcatcacgaattctaaagcatatctccacagcaaaatcagccaatcttcattgtgctaacaccgcctgaccaaacaaactaaatcgtataaaccaatcaacataacacaaccagatagaccaaatgcttccatagatctaccaaaacctcctccgaacacgacgagtttccaaacatctaaaacccaacctcgctagcgtgcaaaaccttctacaaaatactaacaacacgcgccatacctacacaaatctaatcaatgcatgtatatcaaaactaaactaaacacacatactggcagaagaagcaacctctcgatacaaacgtgtctaaacctgacctatccatcgctcccccacgaagcgaacaaagcgaaagcagaggaagacgagagatcacctggagaccagcgcgggacgagcgggagacgggggccttcttccccttgtccttctccgccgacttggcggccgtcgtcttcgcggcgagcaagcccttacctccttttcccgccatcgctctctctccctctccctctccctctcctgtctcctccccttccgctccgctcgaacgcccgcgcgaccccggcggcggaaaccctgcaaaacgggggccgaatccggcgaggcgagcgccgggtcagagcagatcggggcgcgaatcgtgcggatctcgccgcccggcggcgaaatccgcgcgggaagcggaggaatttgggggcggattcgggattcggataaggcggaaacccttacctttcgcgagctcgcggagcctcggcttcctcctctcctaccccctgacgcgacgcggacgaaagcgagattttttttttcctcttctcttcctttctttactcccacgaaagggctagctaggatgatataggaaaaagtgcgctttttcacttaacccctcagataataatgatattattattacatataatctggggcgttggggagagagagactctgtgtatagggagtttttgtgggatttgtgaatagggtagggtggtatgtgggaaactaccagccgtgcgccacttggcgaaatatttcgaaatggcgtgccggtttccatatatgccctcnnnnnnnnnnnnnnnnnnnnngatgggtgggagaaatcagcagctgagacgggagacggaggggcatctcggtgagggtatttttgggaaggtggagcggtggcgggatgccgggatgtcgtgcgttttggggtgcagttaccaaactgcccttgccagaggggtcgttgacctgtaacttgaaggactccagtcgagttgtgccggtgtgactggtgtggtggtgcaaatggccaaatgctttttggatggcacgccgccacgcttttcttttgtcttttatattttcaccttgtagtacaaattcgtacaaaattactctattcgtatgatcaaattgttatcttaggctgtgtttagattcatgggtgtaaagttttgacgtgtcacatcaaatatacggatacatattttaagtattaaacgtagactaataacaaaacaaattacataatatgtctgtaaccccgcatgtaacaaaaacaaattacataatccgcatgtaaactgcaagacaaatttataagcctaattaatccgtcattagcaaatgtttactgtagcaccacattgtcagatctggagcaattagacttaaaagattcgtctcgcaatttacacgcaatatgtcttattagttatttttttcgtttatatttaatactccatacatatgttcaaacattcgatgtgataggatgaaaaaatttgcagaaaatctaaacagggccttacacatgttcttttatgattaagatgtagatttgcctcagttttcgttagcttagttttcaaaatgctaaacgatatattttgtgcgaaaactttctgtataaaaattattttaaaatatcagataaaactatttttctcaagtttggaataactgaaacttaattaatcgtatctaactagtaatatgcccgtgctaaacgctacggtacaattctatttctctttaataacttttaaaatcttgatttttctattcgtcacataagacacacgccgaccgctaccctttgatcacatagcatgatggcgtgaatataaacccaaataacagtttaataagaagtagatataaaattaatagttttaccatgtataacaagataacaagtggttgtcatctcgctaacatcttctttcatgacccgaatactaaaaagatatctgtactgaaatttattgatggcaaaagtatatgttcagaaagacgtgttaacgtatagtcatgttatcagcctggtgtaaactgaagcatgtatcatggtatggtatggagaacataattacacgatattccaactgaatggtgatgtcgtgttgtacaaagtaagtggacattggtgagtaacattcggatcatcaatttactatcttctagattatgttttcgaattaattttaatcatgagaacctacctttgctcaccagtcgagaacgtctttatacacgatattttattgccaggtcccataaccaacactacaatctataagcaaaactaattccgacacactgcgggagagatgagaaattgaggaattttatggactgatgcatttgttgctattaattattatacttgcccatgattttttcattaaagtatgtgtctgtttttcattagtatcataaggtcattacatcacaacttttatattacgtgtcgactgtaccatgtaacgaatagtgttcccatagaccctttgtctaataagatgtacactcccctgaatatgttagctatagcatgtgacaatccaattattgtggactgtgtaagtttattttggtcatagattcagaaaataaaatgagtttgaatgaatattgtttacttaaattgctcctaagttggttcaactgtctccaaaaagatgtgaggcaatgactccagttagttagttctgtatacagagtgtatttgccaccctttgaggggcaatacttttatgaagcttaaaaaatgaatttcaatacatctgccctggcttgaaagtaaacatgattttattttcaagattgcattttagtttacagtagatgtacactgtagctaggtctgtcatttttatttgtaaaactcaataggtgtaaccgctggtccgctgctattttaatgcagatttcaaaaccatgtataccacaattggtactgttaagcagttctgcatcaacactggttattattatacaataccactatgttaattagtgtggaatcacttacccatgtcctcttaataatttatcctctgattgcactaataaaattagggtgctatatggcataagttatgcacgcaatacttcttatcaagatattctaaagtaaaacgtctcaaatacagctacaaacattgacaagcgggcatattacatccacacaacagtgtattgtttcaggtccctagaaatatacctaatgctatgagagctattcattcctaatttagatggtgaaactttcttgaaaacaagaattaatcattccatatgtgcttaccttttactttggagcaattaggcacaggcaaggtgattctttctgttccctcaaggcattctgtttataccccttggaattggttgggcttgaatccaaaaatccagagcataaaacaatatataaataaactcccaatgaaatgttgcaaaactcccgatcacaatagattcattggtctactttataatatcttcctccttgccctctaccacatgcaaatgtagtaggaccagcctagttgaaacaaaaatgaaattaggaactacatgaacaatctatttaaatccatggctatgaaagtaccgtaggttaggctcgtataaaagggttaactcaaatacatcactcttcagttatttgccatatgggtggcatgctaacgctacatacaccacaatttagtaaagcagtgttcttttaaaatttgacagcatctttttagagtaaatgtgacacacatgcagaaatagatcatgtgtgaaacagagatgtatacaattgagtaaccggagtatctctagagtaactttgatagcttgaataactggagtgaagtagtcaacagcagagcagatttttcctgattcatgcaaaactgttaacgtcggatacaaggaagtggacataaactattttcataagataagacgcatagattattttcagtttattggcctgatctcttgcagttaagtgccatatatattttagtatttgacatgtggaactatagccacgaatccgcttactgacagatcaaatcctcctagcataattgactataataaagaacacattggatttgaatccaaggaaacatatcacacatgcacgccatcaatcacgggtgcatgtactccaaatatacaagggtctaaatatacatttcactgatatagtacacaataaattttatttgtaaatatacatgtgtcaatcaattggacaatatcaaagacatttatttctttggagcatgtatattgtacctgattggagccggcctatgtaacctgacgaatgagtttgaaccggcaacggcgcttccaatggaaggggaggttggccacgatgaggctgcgtccctgactggacggcgatgaggctttgctcgataccgcgacaggaatcagggaatgcggcagcggctgagaggccggatgagagtgatggcacctatagaaccatcttctcaatagagtaacataacaatgtatagtagtcaataaaatcagtttaggcaatacatcagtgcttgcacataaccaatgcagcacattttacatattcaggtgtcattatttgaaaagcaatattatgacgtaactcattgaatccactgccacacggataatagacccaccctggatatttctttaaacaaatagacaaaagcattatggaattttcagaaagtacatagtttagctcatgtaaattttatgtggctggaattagctcaaggaaagaacgaatcccatcatcatgacatcataccatctcattgtcatgttacattttcaagggaaaaaattatcactgcacaaagcagaacttggatataacctaaaagtaccagaagccactctgaaagttggattaattccattgttgcagcagttgaacgatataatacttgaaggttgtatatgcacgctactaattaaagcgcttcatctgaattacagacataaacatcctgatcataagagaaattaaatcatttgcattatataaaaagttgcagatgctaatcaaattgtttaaaacatgacgtcatcattgataatttagtgggatatgtgcacacacatcagaaacatggcactgtcaatccgcaagtaaatgaattgccattgcttattaaattttggaccaatcgaggaaaaatcaagaagaggaaagagcaaatgaaataagagaaaaggatctccatgtaccaggcagagagggccgatgacactgatcaggtagaccgccggtgaatcgggtagatgatggacgcaacctagcggcagtgaatcagcgacggagctacggccgagtcggcgctttgtgtggcagcggcggcgacagtgtgagtcaatttggaggcaggaatcgaatgagaaacacatgcagataataactttttgtgtcataaacgcacataataatttaatttcaattatctcactgatgtattctatagtgggagggaggaaaattaaacagcaagtacatattcatttgtattcactattttatctctatttcagtaactttgaacagatgcataatagccattgataatttaatattaggatgattcatagtagaacggagccgctccctaatgatgaagctcgccacgttgatccaatgaaaaaaaataaaaaaaatagaactaaacaatcaggcctgaaatgttcagactgttcatgcttatgctctaccaactgctatacaattaaagaagaagatccaagaaaacatatgcgtaaaatttgagtttccacctcacagcaagtttcttctctgacaaataaaattatctaaactcatatcacagtaataaaaagaccacaaccaatatcaaatcttaaatactgaaggacctaaaactaacttatatctggattggatcgtaactgctgaaggcaatactattcaacacaacggtagaaaatgtacattatcgttaaaatgcctgctcatgatagtgtaacctataaagagatggggatttcagtgcattcgcgtttgggaggggaggaaccggaatatagatttggattttgctgtgaataaagatgtactaattatttgacgaggcattaccatcgatccatccaatctgcaaggtgctctctaccattgtgacgttctcgctcccgctgtcctgcacacacacgcaaataacaaagaaaaaaaatcagagaagggggattggagtcaaggaatggagataaaaaaaaaaagaaaggaccaggaagtctgggcttctccgttaaaattcaaagagttagggataggaatttaggagatcggggatggagaccttcaagtgtacgatgcaggcaaggaggcggtctacgtggtgggacgggcgtagaggagacggccgacagcgacggggatggcggatgtagggttggcgcgatggtgtcttggcggcacggacctcggtgactcatgtgcagggtatggcgacggggacggagatcccgaccagcgtaggagaacgtgcggagcggatgaggactgcggcgacggcggcgtcggcgtggatcgtgggtggctgggtgtggctgctgttgagggggagcggctgaggaagaggcgttggaccatcggcggtggcagaagggctgaggcgcgatgggagagaggggagcgatcctgcaaagagatgggagtgaggggaaatcgcgaaatcacggatgaggagatcacgcgaggggggaggtgggagcgacgggatggggaggagatcgcgattggcgtgaggcagcgtagtggttggcgtggcggcgtccggtttttgggggcagcggcatggtggcggcggcggcgtccgtgtgcgagagagaagtgagagggttgcgcgcaggttgggggcggcgaatcagagtggggcccacgcaatcacgcgattgatggaggtgggaggcgggggatcgatctagaccgttcgattttacacacagatgatctggaccgttccatgaggaatgaaagaacgagtgaatgagtgaaaccatttgttacaactataggatagataactttctcgttttacatgtctataattaatctttattttcatcaaattcaaatggggcgtatgtccaaaataatccatgtgtgaagcgctagaactactggtggaaacacaagatacatgagaaacttacggtgattagctgacgagaatctaatatattgacgtgcaatccttttgcgtgttcgcgaaaaaaaaatagccgacgagaatataggaaagatacattttctaacctttcactttcaatttattttctaaattctgtaacttgtataaaagtatagaatatttgaaaagttgcagtttcctgaaactcctcgagcaagggctatgtgtacatacactgagtggacccatcgtattcataccaagctcgtacaattatacgggtagcagttaatcgcagccccgtcctcatcaatataggtgaacagaacttctattgttttgcattggcatggcaatacttccaggggctcccggcgcacatgtttcaggctttcagcagtaaagcagtttctcctaaccttggaagttggcacctttgaagtactgtcaatttctagaactcttggttttgtccaatcagggccctgagagaatcctcctctacaaatataaagcaattatagcgtttgaaatttgtccagctacccctcgttcaatttcctcacctactccccatcccaaacaatcaggtgatggttgagggattcaaccggaggcatgaaaatatttttatcccaaccataatttatcttaaaactttcaggagtgcttgtatttgtcgaggatggagggagtggtatgcaaagaatgaaaattcagcaggacatccgttttttcaactgcacggatgcatttcccaagaggcgatgccagcatgatgatacctgcaacagacagaggaacatgttggaacataaatcagctaccccacccaagcaacagcatactgtgaagtaattccaccctcaaaatgcagcttacatgcactgttaataatctggcattgatgtttgtggtgcctactgtacatgtgtgagctcagcaaggctggggatgagtgtgcactagttgtcatggcacaagaatgtgcacagttggtgcagtggacctgtggttaaaaatggataatccgaaacaaggattgtgtgtaaatgcttgaatcggggaaaccattgactatggggtgcagccgtgcaggcactcctttcatatgccatatggtgaagcgtggtgaacgagaagggatggcatggctcaaggaggaaatgaggtaacaattaaatattgttattcataatattagcgaatggtgaaactatacttacagatggtgagagcagaaatgcatttaatatgctcaggtggtgatgaaaaataggggaaattggtgaccattgacaattctgcttaaatataataaaatagcagcaggaaaaaaaatcatctatgagagctggaataaatttgcttgtatggaattcttgttctgaaaaaaaaatactggaacaaataaacactacctgaaacctgatggacagttaccagcacattatccattgctgcactgggactagtaatcttgctgattgtagcttgataagaatgtggtattgttgccggccattgtcacccaatcacccccaatcttgtcaacgttcatgaaactgcacctgccaaaagatgcatttacacgttacataagttgcaaggtttgtttgtagtaaaaacatcattagtttattttactatgcaagaagagaaaattcctgaatcttctagttcggtatcttcaattttgcactgctgaggaagattcccacttaagacaaccccctcaggcatctacaagattttgtttccagttccgaaccttcgggcatttagaaaattccgtttgcagtttctcaaaataaggtttacgagtatactttctttgttgccgtacttgatcagcatctaacaaagatatggggcttcctatcgaatttattctgggccaattggctagctacagttcaaagagttaagagattttatcagagaaagcttggatatcatggctatacattatattcgtgttaaacattgtgtggaatttcttccatacttttacctttgtactttgcagtctcagtgtctggtagaatcataataacatttgaaatcaaaagactcaatgggattatgggattatctcatagatctggtagattttgatatcaagtttcttttgatcagtaaacacttaaatgctagtgcaaacattgcaggcttcactcaaataattagcgatgactcacttataaaaaaataataaccagcgataattgtagaagcaatctctagtgcatacagaatttatgactagaggtatagcttacatagaagtgcaggattttttttttactggagaagtgcaaaattgttcttaatgaatctagatcatgccctgaaatttgatcttttatgaataaaaatgtctgcttcaattcctgcatgctggaagaagagaaaaatcaatatgtattcagaatatgttgtgtgaataaagaattagaagaaatcaattaaagggagcgggtaagcccagatactgttttagcatcaaagttttcaccaataacttatagctagtggtttatgaataatactttattccccagattgaaaactgcattcttccaggttagaagaggatgagtaaatgacatgtgcaccagtaaatgtgtttattgggagaaagaagtgtgcaattgaaaattagtactgcctacacaattgaaacatactcctacctagcatatgaagcaacagaatcagctgccaaaagtactagcacctgctgattttctcactcctttcctttccatattctcccttacttcattgctgtagttccactgaccttcagcagcatacatgttggaaagcaaaacatatccaccctcctctgcgggttcaagacagaggagttcctttgaagcaatctctgctacttcagtattctgacaagctgaactcgcacttaaaatggaaccccatatagaccgacttggcttcattggcatcctcctggccaaatctactgcatcagacagcctacctgatcgtgcaaggagatcaaccatacagccaaagtgttctactcctggttcaatgttgaacctttgcttcaaggtatcaaaaatcttgcacccttcatcaaacaggccagcatgactacaagcactgagaacagcaaccaaagttaccccattaggttctgtaccctcagcttgcatcttccaaaaaagatccaatgctacatctccatggccatggaatgcaaggccagatatcatagctgtccataaggtaacatctttgtccacggccttctcaaatacggcatacgctagcttgatacttccacatttgcaatacatatcaacaagagcggatgctaagaaagaatcttgagtaccatgctccttaaccacccaaccatggacactccttgctgaatttaaagtccccttgccggcaaccgcagagatcaaagtaacagcagtcaccttatcaggtattacactactagcaagcatatcatgaaatagtatcattgttgcagagaattcttcatatcgagcatatccagccagaagcgcattccaggatattatatccctggcaggcgcctcaccgaaatatttgctagcaaggtccaacaagccagcattagcgaatccggcaaccatagtgttccacgaaatgccatccctctcaccagcttcatcaaagactctcatggccgtgttcatttccccgcatttggcatacatatccaagagagcattgctcaagatcaatcccctatccgcgacaccgatcctccgcacgacgacgccatggacggacctaccaagaactgccttcttcagccgcccgcagcaagcgaggagagcaacagccgtgtactgatcaacaccgatccccctcgacgccatgccgcggaaaaaccgcagcgccttcccgctgcatcctcccttgacgtacccggacagcatgatgttgcaggacaccgcgtccgccgtcggcgcacaccggaacatcgcctccgccgcctccacatcgccggcgtcgaggtacatcttgatcagcgagttccggaggtacacgcgcgaatgcaggccagtcaccaccacgtgcgcgtgcacctgcttcccgacggagcggcgctccgcatccaccgacttgagcagcgacaggaaggtttgctcatcggggtgaatggatgacgccagcatcgacatgtagagagcagccggccgacgactaggcgaggaggaggccgccgccgccgccgccgcggccgaagagagcatgaggttgtagatgtagaggttggggcgaggggtgaagtgctcgaagagggtctcggcggcgcgcgcgtggtgcgggaaggagacggtggcgaagtggaggagcctgctcatggggaaggtctcgaaggcgaggcggaggcggagcatgtgggcgaggatggccttgaacggccgcgccccgccgccgcaccgctcgaggaggacgagcgccgggtggcccagccggagcgatacggtcgggtcccacggcggcctcccggcgccggcggtggaggccatcccgccgccggcgagacgggagcgcgcgtcgggtcgaaggcgcctgccgtctccccgggcggcggtaccaccgtcgctgtttgggagcggcggaggccgtccggagagggccgcctcgccgccggcgcccgcagcgcctccgagccggtgccttcgcggcggcggcggcggcggcgtacggcgaggcggcgccgcgtggcagaggcccaacagctaaagtaaacgttcgccaaattatgggccgcgaaattacttcatgggctgaatattatgcccaccctctaattgcgctacgctggaaggaagcccgagaaaaaaactcactgttgcaacttgcaacggccatactagtctgttaaaaaaacaaaaaaaagacaattctagttatgaacctgagcacatatatatttagattcgtagttaggattttcttttatggaggggtaaggcttatttggttcgaagaatttctaaatcataagaatatgaaaaatagaaaaattaagatgtcacatgtaatccaattcctaggattttttttctaaaatgtctatctcatactaagaatcatatacgataaggttataggactatgattcttaagaattttgaaacgaataatgtatatataaaaaaaatcctatggttttaattagtacaataatcttttagaaatcctttaaaccaaatgagtactaagctaaattgtgtaaactaaagtgtgtgcgcatgtacccatatagtgaaatccgtttatgctcaagcaagatcgaaatcagacgagaatcatacggtgctagctcagtttgttctagggataccatatttaccatggtcgattcacgtcacatgaaaaacaagggtctttctaatccatccaggaaagcttgtccagttctaatcactttcagtcagtgtcccctgataaaagtttagtataaaaaagagagcaagatataggcccctttgaattgcatgattaaaaaaaaagagaaatagggaaaacacttgattctgataatagtgcaagtgtaaaacagatgattgcaaaacacaggaataaccatttgattggacagtagaaaaaacgcaggaatcaaataagagagataaattcaaagaaaattttcaagagattagagacttagagtggatgttaaatttcatacatttttcaactagaatcgtagaaataagaaagttttctttcctatacgaattaaagacataaataattaaagacatgaatagtgtaggatttcaattcctcttttttttttgaacatttttcctccaattcaaaaggggccataaagttttgtaccttcacctgctcatcatatgtcgtcacctccatccccccatctcatcaaatcaaacaagacaatgaaaactgatcacattcccctggttaagtatgccattggcaaaccattatcgctcgatcacaaccaacatgatcttcagtttaccagatcaaaacccaattgctcccgaggaatattaccagcagtgtagtactagtagcagatacatgtcatctgcttttcgatatgagccgttcagtcccgtccatgtctgccatcaacttgcttcgtcagagttcatcagactaataccgaccaaccatcatgcatgtgcagagcgatcgatttctctctcgtctataccgaacactcgaatcgatcgatcgacaaaagcgtaatccggatcttcgatctgtcaggaaccttggcgacgaggagttaatcaacgggtgatgagatcgatcgatcgatcgatggatccctcctctcatgtcggttaggcgacaggaaagattgcgtaccagcgatccctgctcctcatcgacacaccagtctgtacattcctcgatcgatacggcgatatatatctcgatcgagcgaattcaaaagaaaaattgtctggtttatcaactctgcatgcagcgtttgatgtgattcgagtggcactttggtggtattttttttctcccgaaaatgaagatgaagttctttacgcaaaatgagacggtattaacatatgattgattgagttttaattattacgaacttgaaaaatagattaatatgatattttagcgcaactttcatatataaagttttcgcacgaaacgcaccgtttagcagtttgaaaagtgtgccacaaaaatctttatcttcgtccaactcttattggagaatgaatgggacctttgtgtgatatggatcctatctccagcctccagggaaccgaacaaaagaagagaacaagtaagagacgcttcgatcgtctgatcgacacaggatcagtggattgcatgtatgatcgatatacatccactggccacatggttccactgttatttctgcaccatgtttgattacgaacaagtagctaattagctatagctagtagcctagtactatgtactaatgcaaagtacgtacagggtacagcccaaattaattctatcttaagccaagtactaagtaccagttagttcggtacgcgtattagcagctgggaatagtcttaagacagcggtacaatagtccaagtaggcactaattctgggtcgcatatgcattgcagtgcagtgctctgatgggtgtgaagtctgaacagccggatataatcgagcaaagggaagagggagggggacaagtgaaactgctcatgtcgtccgagtgtctccggatgccacggttcgctccactgttgttcggttgagacccaacagggacacgcacggcacggccactgtttgtccgccacgcccacgcacacgcacgttgcaagagctattgctttccgtccaaaaaaaaaagatcaatcctatcaacgaacatagactgatccgtagttaggagttggtttattttgaaacgaatggtgcagatggttggattcggcttgggcccgggtgcggtggctggtggctagctaagcatcggtcgatcgatcggtgaacgaattctatgagtttgtcagtagccatcggtgtcatatgttattatcgtcgtcgctgggtcatatggttgtgacttgtgagttgtgagttgtgagagagagcgtcggtgcctagataattagctgttgaatacccatgccgttcgtgcgtgcagtggggagggaccggtcggattgctgcgagatcgatggagggagcaggtcccgttcacggggccccggttaagttgtaactactgtactgtgtaagcagtagtaggatgcagctaccaaagaaaagcgagtggccatcactacaactactgcattaggatggatcagtaggaccagcgtcgtctcagcttgctggtatttggtccattgctgcgacgcgtacgtacggcgggaagcagcgtgggttccctccaccaccgcacaacggccgagtttagtttcaaactttttctttaaactttcaacttttccatcacattaaaaataattttttcacacacgtaaactttcaatttttctatcacatcgttctagtttcaaccaaactttcaattttaacgtgaactaaacacacatgggatgggagagccaaacgggccacggctctgcgcgcgtgtgtgcagtgtgatcgtctgatcgatcgatccatcggccgcgcgcgtacgggatcacgcgcgattcgcaatggattaatgggtgttggatcgcgtgtggtgtagctgcttttgtagctaggcgagacaagcgccggctggccggccgcccgtcgagatgaccgtcgtcgtcgggcacgtacgtcgatgtctacgtgcgtgcgttccggccggccggtgagagcagctacaataagtccacatcagtaggctatagtgtttcatatagtaaatttttatctagttggaagagagagagagagagagtgaaaggagagaggcgctggctacccatgctgcaggcctagcttttttccctgcatgtgtgtgactttgtacatcctttgtgagcagccaatcaaatggtactacttaagatttttttaaaaaataaaagttgtacatgagaaataggtagagataactatagagctcattactttatttattagcttttgaaactagctataacaggatgatgtgttatttttgtagccaatagcgagctctactattaaccttgctctgaggcggccccacacatcgagctctccgttaatttttttgtgcgcatacgtgtggttcaattcgaacggtcgggatggctagtttgttggttgcctaagcgtgtctacactgacatacatgagagtatagatagctaatagatttgttaaacggcatccaacagaaaatttaaagagatttcttcaccgctatatatctgcgctaagattcatgtatgagtcccatctcctccagctctcgtaagttcctcctcttcttcgacggcagcagcatcccaactctgacagatgagctacgaattactaggtttgggatcaaaatttgggcaaagagtaggggaatgaagtccacttgggcttagagggataatcgtgggcgtgcaaacacaagaagacattgtggtggtgccatcgctgctagaaccacgaggttggaggaaacggagtcagtggcgatatctttagctacaggccggatctactggagacagtgaagatgatgggggcgggggaccttgctgagtaggggaggcggcgacattgacatcgatctactcaatctggaggacgcggcgttggggagatggataaggtgaagttatcgtagcagcactaatctcaaaccggtatgggtagttcaaaagtgaataagatgaaatggatttcctcgcaaatgttacataagcagtccctcaatctagagggaagtggactttaaactcttgagagaacatcctattgttgtttgcatgtcattcaaatagtgttatgaaactttttaaagaaaatcaagaaaatggttaatatgctatatatgtatcaatccgcaaacatgcgggttaatattaaattttattagttgaataaacaaatcaaactatagttggtcgactattttttttcttttcagcttgtagaagttaaattaaccttatatgtttatggagtaatctatcttattaaatattttctaaaaaaaattataactatttcaataattaaaaaacaagaggatatccctctcaacagttcagaaccgtttcctaatctaaagatgtatggttgttgagtcgaagccaccaacaaacggataatttatgaatacacacccaaatgtgtctgaccgatatccacaccacggtccaaccaccatctacaggaggccataactagctgccagtggctgatcgacctgtcacggcaaaaatacccacgacgcgcgcggtgctcagtagctcgatcggcctctacgagagagatgagcagcttcctttcctgcagggccctggttacgactactatcacgttgatccacgagcatggcgctagctaccgtgtactgcgtacgcacgtgcggcacctcacgcaccgggacagcatgcagggaagcaggcgagcagcgggccggggttccactcccacatgagaatccatcctcgtacgtcgtccggtggcgaactgatggccggccaccatgcatgcgcctcggctcatccgtcgtcatcgacacactgtcacacgtgggcgggggcgcgctcccgctcgagctccatctatcccgtaattttgataaattgaccctttcaaaaaacttattttaaaaataaaccgtaccaaaaactaatttcaggaataggccgtggcctgtcattgacgctgagctaaagcgtatcagcgccactgcagttggtgctgagatttcatctgccgtggtacaaactcgtcttgtatggagagctcagcgccacactccacagcgctgacctctgtataccataaaatcgcataggtgcttcaaaagcaaggaagcgtagatagctcagtggtggtgttgcgtagtagcaatccaaggcacgggagtttgattcctgtcctcttcattttaattattgtttttctcaacttgctctttttatgtgttcttttgaatgttcacgtgccttttacaacttcattttatttttagacttagagggaacgaatataagaaccaaaattatacgattcaagtttaaaattttatatttataattctttggaaaagaaattaataggacaataattcgtggaggataagtaaaagaaaaactgaaaagaaatactacactaacgaggtttgaacccgtgaccttcaagttcaaacttgtcgatactaccaccaggctagcttcacttgtttatctaatgtgagctaaaacgtcccagcgccaccggcgttggcgctgagatttttgtccaccatgacacgagcttagcgccaaatgggttggcgctgatatcagtgttaaaaccgtgggctggcgctgaggccacggtctattcctgaaattagtttttggcacggtttatttttaaaataagttttttggaagggtcaatttgtcaaaattatggccatctatcgatccccttcggcaaggcacaccgcacgcatgcgcgcgcccaaccggccacacatgtggggcgtatgagcagctgcgcggtatcacggacgcgcgcgacggatgcatggatgaatggatggatggatgtacgttgccgtgttggatcctgtgtggtgtggtgtagcgacttgtttttgctcaacacgccaaagttaggtccaacatgatgggatggcgtcaatgatgtcggcgacgttcttctagctcccgatggaagctaagtcactaatgtgaagggaaacggcgttaacattattggcgccaagtacctatttaatttgtatttctttaaaatataggatctatttataataataatatatttacaaataggtcattggcactagtgttttattacaaataggtccttttctgctacaaatatgtcatttttattttttttacaaaaaggtccttggcgccaacgagatattagtgacttagttttcacctggggatgagggggacggcgccaacgttattgacgtcaataacgttggcgccgcgaaaagggttcattcctagaataagttttttttagggatctatttgtagaataagttttttaaaaggtgaaaatccagccaatgcgacaatgtgatgtgcattcctatttctcgatcgaaatatttcagatgggtttatagatcgatctaccgaaagcaagttttattagattgagatctaggaagggagatttggcctagctaatgaagggtttggtggtgtctttccgtgcagctgagctaacgagttccattctgatcatgaagatatcaagtgggacacacttggatatattcgttgatagtttttattttactatttctatgaatccgtctcgacaatggattcatccattcgctggtgattgtgaatagagg

SEQ ID NO: 3631 - DNA, 2337 bp, Oryza sativa
ccgtggatgagggggaggaggcacggcggcctcggacagctagccgagggcgtggcagatgactgcatctggccggcgcagcagcgtttggaggaagggtcggagaccggcttggcgcagagaggcgcagccaatggcagcggaggccggctcggcgcgagaagcgcggccggcggtggaggaggcgaccttggtgagtggaggagctgccagtgggtgtggcgcggtcttcggcgcacgaaggctagccggcggagggcgccggtgcaggggtcccacatgtcgacagaggttgattggcagtggagcatcggtgtgtcagccgtggtttcgcaggtggtgagcggcaggtgaaaacccagcccggccttggccggaccgacaacaatggttaattccccctcctgagggcgttgtcgtgctgtctcgcccctcaagggtggttgccgggcgaaagcccagtcctggctcctttgatccttgacggacggcggcggcggttttccgtcgcttctcttcttgaaaacgtcgttttggcaccctcttgcttgacgatctcgtctgtgttcctttgttggtctagcggcggtcggtcacgcttagcggcggccggtatggtgctagccttctcccggacttgtgtttaggcgttgtcggtgtgtgggtggtggtttattttttctttttcctggttacgaccctccagggttgcaatcttataattttttcctgctctatcaatagaacttcgcaccgtctgtgcgagtcattcaaaaaaaattcccaaaaaaaataaaaaacatggatagacgcccttctaagtatatgtcaatttctaatacatagttcgcaaaagcgaacaacttttgaaataaaaccacaaccttagtatagttttaaatcacaatcttacaagctgcaattacccatagctgaagtccaaattttgtggttcaaatacagtaattgagagaatggaatttacagtggaaaagatgctcccaaatttggggatcagtggttcacacttatgatctatgaacggcatcttttcacccagatatcttccgttcagcgtttttcatcattatcacaaattcatcgtagttcacctgcccgtcgccatcggtatccgcctcccttatcatctgctcaacctcctcgtctgtcatcttctccccaagattggtcatcactgtcctcagctgcacacatgaacaagaacatggtcagaaatgatggataacagcttgaaaattaatggtctgaactgcttgaggtactaaaccacctcagttggggagataaaaccattctgatccttgtctaggacctcgaaagcttctttcagctcttcgtcgccatccccatcctgcgatacgcatggaatgcaattgcagagacagatattggaaatctagtttggcaaaggggaaacagatactgtagatcatcaaattaaagtatccatcaaagttcaagcttcaccttcatcttcctggcaatgaggctcaggaactcctgaaaatctatgatcccattgccatctgtatcaacttccctcatcatgtcgttgagctcctgatcggtcggctcaaggccaagagaacgagtcaccgcagccagctcttccaaggtgatgcatcctacatatatgacaaaggttccaatatcaaatgtcaattaggatatcatagacgcatagacctgaaggctgtaaatattagcaggatttcattgttgtgtaactgaagataatagccgtgaaaacatgcctccaatgctattgctatttgcttactagcacatagtaggtttttgtgcatatccaaaacgaagaccaagaccacaccatgtgcaaaacacggtcagaatcattgaccaagatagagacgtcaagggccaatgaatggtttaactactatttaataataactatgtgtatatcatagagttaatggcaagtagtggtagcacaaatatcagaaaagcagttttggaggacatattacggattacttaaggaacttgaccactagataagcatgtctcaacaactttttctaaacaaattaggtaggttacacattgcaaagattaaagggccctcactagtcaagaaaacgagtgagccaataacaagcacctttctgtcacaaactgaatgattctttgaccaaaggaagctctcaaactagtcgtgcagcaagcaaatccctgtcattgggcagcgtagaaacttcagggaaacgtttcctaagaacacagaaattccaattccatctacagctccagcacacaaattaaaacaagatgtaatacatatatataaaaaat

SEQ ID NO: 3632 - DNA, 43839 bp, Oryza sativa
caccaatctccttgggacacgtttgtgtcggtgaccactgtagtacatggcgaacagcaaactactagtactagcgatctagaaaatcctaaatcatgtggttcctgtacagtttattggtgagaaagcacgataaggataatgacgaatccgtgatgaatcctgagacgtagactttgaccattaagctttgaaatgatggctttctttgatttcctttgctagcttacttagctggcaaagcttaatctaggccaatctgccggatattcgcagccatttacgctttccacgtcagtgcatgatggagtattctacgcacgggatgtattaaaattggataagcataactgataatttgtttgttctccgaaattaccaaactgtcctttttaacgcaatttgataaacaccctagtgccgtataagcgcccatatatctaatttttgaacaaatcacagttttttcacttcttatttctgaatatatttcactctgtatttcttcctcaaaaatcatgatgtgcacatgttttttcataaataatatttttagtacatataaaagtgaactcccacttgcatttgcatctagaaagcatgacaaaaaccatcggcggcacaacaaaaatcaacccaatttatctgaccggaaaaataaaaaagcttccaaaaaaaaatctgaccaaaccgaccaaagggcaaaatgggaacccaaaaaaactctctataaatgttgactccaggcaatcagcgtggccgcgtcacagcacacagacatcggcgaagcaaagcgcaccacgcacacggaaagagaggagaggtcacatcgcggcggcggcggcgaggatgttggcggtgtttgatccgacggtggccaagtgcccggagggcctccggagcccgccggtggccggcggcgccgtggcggccggcggcgcgggcgcgctgatgaagggcttcgccggagcgcacgccgacgcggtcaccgtcagcctgggccccgccggcgccctcgcctactcggcggccaaccagagccccctcgtccccaggtgtttgctctgttcttggctcctctcgctgattagctggggtaagccgatgctttgtagcgcgttcttgggatgcaaaaaaaaagcgtgctcttttttggctgttcggcacttaagcccgagatttggtgatgcggctgtttcgtctgaggttggaacgatgaaattttgggagatctccgtttcttttggtttcttggggctaagccagtgtaggcagtagccatggattttttttttcttggggtttcctatggggattttatcttatgggaaaaaaatcatgctattttagttcgaccttgagttttgcgaaaatttaggggctctttgtaaggatcaaaatgaattgagtttgatttgatgttctttttggtgtcggccgcgtggtcgatcggcatgtccgcatgtggtgtgatctcgagtctttcttggataaagttgggagatttctgcaccttaaagttaggtgaggctcgtcgatctaatagttgcttagatctgcacgaaaagttaggggataggaccattatgatgagcggaacgggtatatggtcaaccattctttcgtaccattccatcctgcaagatttagacaatatttttatttttttagtcgagttcgtttcttcatgtggatgcattttgttcatggctatactgtaattttatttgatcagttgagtaccgagtacgttgtgaatcaatggcatattagccgatcaaacaatttagtgaattccgcataaaacttgatgaaaatttagtaagatcaagcttgttcatgctaatctgaaactaccatgatatgggagccttggctgaaccttttcatagacagatatgtccattcctatccacccaattctttgtgtagcatcggatgtttcaacatttttatacatgtcgctatagcttagatattcaacagaagaaaaagaaacaatccagaatgtgtggtaccacatgtccattgtccattgttgacatgtttgtattacatgtcaatttggtacttgttaaacaattgttccttgtcatccaacagggatgatggtgatcagttatgttttttattgggtagtaacacgtcatttacagcaaagagcaaacgtggacgtttgtggagtagtctgcagttgagttttgagcccccctaaaataacccaaagtgcatggcaaattgtctttatatagatagcgattttaacttaaaataacatttggccggttgcacttgggtaacctattagacttctctgttgcaaatttgtaagattccagcatcatggttttgtggtgttcgaaccttgaagcatttctctgttgctgttgtgaaataaaaacattgtgttagaggaaatatttcagatgacagtgtgtatttgtttggcatgtggtcattctaataaatagcagtaacatggacttccttttcaccatgagaatggtgcatcgcaattcgtaattattgttactggcaactcttctgttttccgcaactctacaatttcatgaattatgtttagtaactctggatttgtgctcctacccaggttgtttggtgctgtgaatgacatattctgcctgttccaaggacacattgagaacattgccagtctgaagcaacactatggtctgagcaagacagcaactgaggttaccatcctgattgaggcctacaggaccctcagggacaggggccctctcccagctagtcaggtcgtgagagatctcagcgggaagttcacgttcatcctgtatgacactctgtcaaaatccaccttcgttgctgcagtaagtacatcatctctctttcctgaggcatatacttctgctctgaaggctgtggttctgatcccatttctctgctcaggatgctgatggtagcattcctttcttctggggcgttgactccgagaaccaccttgtgttctctgacaatgttgaccttctcaaggcatcctgcgggaactcgtttgcgccattccccaaaggtaaactgcgatgaccgatatcagtatcgggcctttcttctcattgtttcaccagaattcagctgaagtgctccactctctcacaccgtcatttgcgattgttcgtcaggctgcttctacaccacctctggagggctgcagagcttcgagcacccgctgaacgagctgaagcctgtgccgcgggtcgacagccagggccagatgtgcggctccaactacaaggtcgacagcgaggccaagaaggactccgggatccctcgggtcggcagcgccgcagactggtccaaccatttctgaggcaaagataccattgagatggcttccattttaccatttcggcatttccagttgtggactctgccctgtatgtctgatgctgaagtactcaagaaccactcctgagacgacgcgctaggttttactttcaggcgtccgtaaaactcttctgcaaacattcagagcattgctatctttctacgtcatagtactgaatactgatacttatgtaatctgatgataccacgttgtggttgaggtctatctctcgtgttctgataaataaagctcaatgaaagcttcagatatgtggtactgttggcattctacgtggcgtattgtgatgattgatgatagcctccaagaattttatgcagcactctacctgaagtttgtaaagaaagcacacggtttttgttgattttcaagaattcaacttcaccgtacagcagatcacactagagggagtatctatagatcacccgaccgattttaaacgaaaaacactcagatttttaatacttacataatacacatgaaaatagcatgtataacttacacgtatcataacacagaattcactattaaagataagcttattgttaaaagtaaagtgtaacttacaagcggtgaaaaatagaaaaaaaataaatcatacaaatctaatagaaattgcatttgtaatttactctgactcccaatgtaactactacaaattacactctaaaagtactatatttacactgtaattttttttcctcaacctatctcctctctttatcccctatacacttttgggcgaggtgaagttgacaggaaacaatgcactacacaactaacaacaacttaaactatttaattagtgagtgacaaaataatcaaccatatgaatggatgtactgtaccaggtagtcaagcactcccgagttaagtgtttcgtgggcgcgctgacacaataagggcacggatctcaaggttagattaacagctgaaaattcgacaaatttattgacagatttttagcatagtcgggcctaaatgggccacatatgcagacataagacatgtttaaatgggcctaaattccggcccatataagagagagctaaagtacgagatgggcctaaacttggtcggcccataccggcccaccaacctcgtcttctcggactccgcgtccacaccaacaacgcgctcttctcttcttcacttcttctcccccatttggaataagttcatctgaggtcccttaacttgtcaacgaatccgatttttgcccctcaatccgaaaaccagacacaaagggtccctcaactatcaacaccggtacagattaggtcccttggcggtttcgagggtggttttggctgacgtggcgcctacatgtctaatttgactcggtcttcatctgacgtggcacatacgtggcaattagatccagaaaaataataaacttcgtgggacccacatgtcagtctcacgcacaaattaattaaaaaatgatagggcccacgtgtcattcttagtgtctccctctcttcaactctctccccctcttcttcttcctctctcccctctcccatcccagaggcggcgcacggtgccgggggaggagggaggcggccgggcgaggaggggcagctcgctgtagccgcgcgaggagaggcgacgcgcggcggccgggcgaggagggaggccgagctcgtcggcgacctcctcctctgcctcttcctccttcggccaccttccccgctcgctgtccggcctccttgctgtgctcatgctgcactggctcacggcggcctacgacgggtgatacatcagcatcgccgggagtcgcgggttgggcgggggcgacggcgcagaggaggaggtggtcgagggtggctcggaggcccgccgcgatgacctcgttctacgggcgaggccgcaccacgcctggctctcggcggtggcctgacggagccgctcatccagctcgacggcgtggcgtcgggtgacgtcgagctcgacctccttctcccgcagccgccatgccgcggcgaccgacacgacgacaccgagcgaaccagcgcttgacattgctcgagcccgacgcacatccgctcgcactccatccgcacaacagcgtcgatcttcgcgctctacatgcacagctccgacaccagcgcatcccccaccgccgcagccgacaccatcgaccgcccacttgtcgacgtcattgtcgactccaccaaccggctcactggtgcaaccaccttcaccatcccgggaatcggcagtgaagaggaggcgagaatggcgtggctggaggaagacgagggagagggagacgcgcgtcggctatataaagcaacgccttgtcgtcggcggtggcggtgattgggggaacgacgacaatggcggcggcggtagccatgaggcggcgccacggcgcgaggagaagcacccgaatacggccacagccttgtgctatcgcgcactcgcttcgcctgccgtgggcgcgcgaggggggagaaagccgacgatgaggaagatgagggataagggagagggatcatcggcggccaggaccgagggccggaagctcgtagtgagggccagagaaggtgaggccgagctagatgaggtggagcatatcgacgttggccttgagcgtgtggagtggggcatcggcagcggaggcgaggagccggtggagatccgtgaggtgtggacggacaaccttgaggtggagctcgcgttgatccgcgacgtcgtcgacgagttccccttcgtcgccatggacacagagttccctggcatcgtgtgctacccacgccgccgctccgctctgtgcgccgctgttgacagaaaacacgaggcctgggagatctgcttaactccagtgcaggtccaaagcttgccttcgggtgtgctagcgtgccagttgatttgatcctgtaaccaacaagaagtagaagcaaagaaatcgcggttaaatctataaatgatagccgattggctaagtgccgatgacatatcatttatctttgagccgatgtcatatgtgtatcgatcggcaatcttgaataagtaagaaagaactaaatctacttgatcggctatagatgttaacgatatatactccttatatcgatatatacttaaatcaagtgattggaatagatcgatcgccatgccgagacagtataaatcacttagaccgaaatatatattaataacaggactatatatgtttacagcatagccgatcagatagatctagcatgtattggctaatactccgatactactttatatcaggatattaaaacagcaatatcttggcataaagagcagatttaacatgtcaataaagcatatagagcaaatatagttaaatcagataagatcggctgaaactccgatgctaccctaatcggcaaccagaagacaggctagaggttgatattctaagcacgacttaatagatcaaacttaactgatgcagcattaagtatgaaaagaagaacaatatctagacaatcaaaccactggaagtttcataaagtggtaaatatcttatataatttaggtcaacttcgctatttaacctggtcggctgccttctaccgaccggtgttagctgattgtagattagatagcggtattgccggagattatgtaagatatatgatagctcggcgaattatataaacgagatcagagtatcataaagatggaagcactaatcccgaaaacacaagtcgtcataataagttttacctctcgttgaagatcaaaaccgatgcagctcaacccgaaagcaagaactagtcgaaacaaaattaaagtaaaagggtggcgatgcgccgagattgtattgaatgtgtgttaaaagttacatagggctcaggtctatttatacccgagaattataagatatgtccataacggacacgactactatctctaataaactctaagatactatatgtctttgcggcagacttttgcccaatcatatctctaaggataaaacataaaacatcctaattaatagatataattgcctcctcaggactctatccatgtgcggcaatcaccttgaagcacctcaatccaaccagacatcacacatatagattggctacatcggcttacctagtccgactcagactcagccgatcttatcgtagccgatctggactccagccgatccctgctctgtttccgaactcgatctctgcctccgacttcgcttcaatctaatcttctttcccaatgccgatattaccaaatttggttgttaacagccgttgcccccatttatctgcttgcccagcgctcccgccgccggccaccgccaccatcgcatcctccagcgctgccgacctgtacgggctccaggtgctcaccgacggcatccaggacgacgacatccagcgcaagagagagatgaagagagggagatggggagagaggaggaagaagaggaggggtgaggatgacatgtggggcccacgtgggccccaccattttttaattaatttgtgcgtgagactgacatctgggtcccacggattttattatttttccggatctaattgccacgtaagcgccacgtcaataccacgtcagatgaagaccgagtcaaattagccacataggcgccacatcagccaaaaccgccctcaaaaccgccgggggacctaatttataccggttttgatagttgagggaccctttgtgtctggttttctggttgagggacgaaaatcagattcgttgacaagttaagggacctcaaatgaacttattcccccatttccattcacaaccaaaacaagcctaaaaaattgaagttttttcacattaactttattattccccccctcccccttctccttccatccccttcctcccgtgtacgaaaccctaggtggcgacgcggccgcccaaaaccccgccgcgtcggcccccggatggcccccgccgcggcggaccccgacgccgacgacccccccgcgcgcagatccgacgccaccgacgtcgccggcaacacctgggacctcgccgcgctgccgcccccgccgcccgcggcgaggggcggcggcggcgaggtctacatctaccgcaacacgtacaacctcgtcccccgctccatcggcgggtgccgcgggagcgtcaggtcgctcaagttcttcggcaacgacgtggaggtgctcccgccggaggctggcgagctggaccagctcgagagcctgcaggtgaaggtgtccgcgcccagggtttccggggcgccgctccgccggatgcgggcgctcaaggagctcgagctctccattgtcccgcccaggccgtccgcgtgctccatactggtcgaggtcgccgcgctcaagtgcctcaccaagctaacaatctgccatttctccattaggtatgttcaggccagtggcctaattggtccgggcagtgttcttttcagcaaagttcttcaatttgttcataacggtgtcttctatgtaattgagcaacgctatgcaatgtaaatgtggttcctttcttctgtatttacatggcattttttttgtcagtaacgcgtaacaacagattaaatggataggaataacatagatatgaactagcctctaactggccatgacctttttatttggtgtggattttccatgctgactatctctgatggttatgattgcctttgccaaatttaaatcagaattagaggaggaacattagctttgttaggctgttacaaaatctattaattcctctactggtaaatacacattttgtagtatactccctccctccacatatctagggaatattcctttgctgctcaaaggccaagagttcacctaaaatgaccaaacagttctttacatgcactagctgggcccccctttgcgggtatgatgggttggcatggctgcttgatgccatattccttcatccattcacacttgcactagttgaatgctcaatgcctgcatgcacattcagtacagtgtgcggagtagtgaagggtacatgagaccaaaaaccaagaagagattcttcaggtgtagtgtgcacccttcattcctggtcaagagctcaaatcaaaaggcaccctacataagtggatggagagagtgcgtgctgtacagcatctggttacccagagtggtagttagaccaactattggaaattatacaatatttctgataatgtttctattttaggctatattaagttaatcattttctctcactccttcaaatagaagaaatgatgatttctcaacccctttttttacattctataggtacctccctcctgaaattggctccctaaggaagctgcaagaacttgatctttcgttcaacaagttgaagaacttgcctaactgtataactgagttgggtgccctaaagttcctcaaagtgactaataataagttggtggatctaccatcaggaatctcttctttgagatgtcttgaaagccttgatttatcaaacaacagattgacttcccttggatcagttaaactcatttctatgcttacactacagtatttaaatcttcaggtatatcttattatttattaacataatttattttttcctacctgtttattttgtataaatggcatctttttttgctgtgaattgagctgtcatggttaaacatgatactgtctcaatttatttgatatccttcctagtcttgtccagtaatttctgattttttagatctcaattatctagtttctgtagccttttctgattctatggattgattcactttgtggatcaaaacctcaacatttttaagaacattattaactgttgtatttgaagagagatgtttgtcacttttgagtaaaggaactatcgatgggttaatgatctttgtccaattttttctgttgccattgaaattcaatgaaagtgcaagtacaagagtttatctggaactagaaaaacatctatagaaatgtctagccaaaaagaaatatctcgcagctagtggagtggatttataagataaataatgtggcactgtggttctctctcttttttttgacaagagttttgatcttttcttttaatgcttgcagtgattgtactgtggaacttttgcattgtgttatggtatttaggatttatataccagactgactttttttttctctgtctcaagtttaataggatctccaattcttgtgttattcctgcatgggtatgttgtgacatgagaggaaatggtgaaaacaatatgaagcctggcaaactaaaatctatagctgttgtgagcaacacttcagcagaatctagaagtatgaatcatacttgcaatgcttcacgtttatgttcacatccagaagcttccgcaaatttaaaagttcatcccacacagaaaacaaagaaaggttggaagcggcgggattgcctgcaacaacaagctcgtcaagagcgtttggaatcaagcaggagcaagttcaatgatgattatgttgatgaaatggctgtgaatatgacagaagatgagagcccgttgcatgatatggaaaacaagtcagagatgaaaggcattgatgaagaagcttcattacaggatttgccaaaagaaacaagttctatatctgaggacttgtcatgtatagttgatgatgactcctatgggcatattaaagatagtggcatgatgttacaggaccataatgaagaagaaaagcctggattaagtatgaaaagccatggcaactgttcttgtatcagcggtaacactgatattttgagcaggagaaggatccgcagtgttgaaaacgaactagaggattctgcatcatcagtccatgatgctgctgtggttgttgaagagaatccttcagaaacatctaagcattcatggaaatctaaaaggcaccctgatatggactgcaatcctaaacctagcaaatgccctagaccatttgatgaatgctcaaagttatcctataagtacagtgtgcaatcgttctgcagcattgatgatcatctaccagatggcttctatgatgcaggacgagatatgcctttcatgccattagaggagtatgagcggagtattggactatatgcacgtgaagttattctcttggaccggttagtgcacactcctatctatacttaggctctctctattttgcatagtgtgcatgttttgacttccttttttttcgttcagagaacaagatgaagagttggatgcaatcgcgtcttcagcacaaatattgctgtctaatttgaaaatgccaagctgttttgtagctgatgaagatgcaggccaggacttactaagggcatctgtgcttgctttgtttgtttctgactgctttggaggttgtgatagaagtgcttctctcagtagaacacggagagctattgttagcttgagaaaggagcaaccttttgtttgcacttgttctgctgggagcatatgtgacagcactgaagcatctaagcggatcaataatctttacggccactttgattttactggcctgtgcgataaatcaatacatatcatcaaagaaaggagaaattcaggaattgtaccgataggagcactgcaatttggtgtttgtaggcaccgagctgtcctaatgaaggtaactcctcgtttctttggcctgagctcattctatatttgctctttaacattgcaaccatatccactgcagtacttgtgcgatcgagcagaccctccaattccttgtgagcttgtgcgggggcatcttgactacacacctcatgcttggaatgttgttcctgttagaaaagggaatacatgggtaaggatgatagtggatgcatgctacccaaccaatataaaggaagagacagatccagagtacttttgcaggtaaacacactgtgatcctaaaatctgtctgtgctacatgtttttgctttgtgtgtaatttatgttgttttaacctactatgatgtttttgtaataatttttagaccgaagatgtttttataatattttcactatttgaactgtttcaatgtgtggtattgtcatgttagcaaaaagagatgacaacatgacattttcctaatgttgccaatagctaacatcattttttggtccttatttatatcataagtaatctatatatgattgaagttagaaaacataagaactcctgtccatctgccatactatcatcattttttagttagttctgaagttcagaagctatattcactcttaacaaagataacctattcatcaatcatcctttttttttgtgtttctaatagatagatatccatttgatctactgttattttgttcacttgatggtaagtaatctcatccgctgatctagttgcatgcatcttacccatcttatttcagttagttattggaaacaagtatacattttacatatatattcttttgaatccaacattctaacttactgagtccctaggtttcgaaaataatgtaatggaaaaggaagtgtttccagtaattgctatttgacttgaacctgttctgagaatttaccctttgttgcatattgttttaggtatgttccactcagtcggcttcagatcatacttgatgatcagggttatactccacggtctccctttccttctgtctcactgtgcaaagaaatagaaactacagcttctagttcagtctactactgcaaaattggtgctgttgatgcggcagcaaaggtttgttatttttttatttatttgtcacgcctttgtctttttgtttggagttagttgatgttgctattaaatgcaggtaagatatctagacactcgatgtgcttctagtgatgaagttaaaaattttgaatacaagcttctcgcggaagtaagaatgctgggtgccctaaggaagcaccaatccatagtggaaatatatggtcatcagctttattctaaatgggttcaagctgatgatgataaggaatacaagatattacagtccacaattatgatggagcatgtgaaaggagggtctctgaaggtatgcatatgactccttatgtaatcaccttcagtgttcagatattttcgttaacttaaggcctttgttttctcttgttagggttatttgacaaaattgctgaaagagggcaagaagcatgcacctattgacctggcattctacattgtacgagaagttgcttgtgcattgttggagctgcacaaaaagctagttattcatcgggacataaaaagtgagaatgttttggttgatctggatttagagagaagtgatggcacaccagtagtcaaactctctgatttcgacaacgcaattcctttgcattctctctcccacacatgctgtatagctcaccttgggacatatccacccaatgtttgtgttggtacaccatgctggatggctccagaggttcttcgtgccatgcgagacaaaaaccaatatggactggtatgcttttattccacagttctgtcttgttgctatcaatgctagtttaattgttctgcattctggctgaggaaaccaaatgctgcaccattgttattattatgtttttgtagttgaggcggttatcataatattttgacatctgagcgaatgattttttattagcatgtgctatccaaatttgaaccagtttagttattttcatttttcttaaagcatcactttttttttggtgaaaactcttcctttttcttttgtactcggccattagagttactccctacatttcagtttacttgtcattctagcaaatctcacaccaaacaaggaggtgtggcaaattacatggttaccctcaataagtacatcccaatcaattttcccaaaagcaagcattaaaagtccttgtgtggagtactagtattgatgaagggtaggaagtaacctctaaaaatgttttggaatgtgagaatgacactttgataaacaaattgaatgctagatgacaagtaaagtgaaatggatgtagtatcacttatgttgatatccagtgtacatccacttctttaaattattatgtgaatatcaacaatatgctcctaggtaccttctagcatgtagtcaaatcaacactccatataattgcttgatgtttatatatatatatatatatatattgcaggaagttgatatctggtcatttggctgttttttattggagatgcttacacttcggataccctaccagggcctacctgattcagaaatatatgatctcataatggtaggtccattacatcacaatcaattacctgtctctgtgtacatcaggattaacaatgatctgaattttctataatcagaggaagaagcaaagaccaagactaactcaagaactagaagcgttctggacgttagacaagccaattacgaggctggagttgggtatcacatctgatgctcatgcagaaaaactaagactgttgatagatctcttctaccagtgcactaaaggaattgcatctgagcgcccaaaagctgaggcggtttacaatttactgtgctctctacccacatgctatgacatgaggtgaaagtgtggatcttaaatcagtatgacataaggtgaaaatgtggatcttgaatcaggaacctgttgatgagacagccagccagatcggcctgcgccaggatggcaagttatgctgggtggttttagcaggtcaacagatctggcctcgcttggtttgaacttctgaccagcatgccgcttattctttgagtgctggcgatgcggaacacgagaaatccaaccaaaaccaaagccggtggcagcattgttctgagttctctggagttcatcctgtgtcagttttgtagcagccagccccgtttcccgcctcttgtgttgctgcggtgttggcctgaccatgtgttgcttgtcgtgtcatttgtttttgtttttcattattgcgttaatttattgatttaggccattcacaaccccaaggcgtctgtctgctgcacatgacccattctgtatttgtatctgtatctgtatgtacaagtgtcggtccatccgtgatccatgtaaccctctactgttgagtcatgtaacaataacagatactgttttgaggttatttatcatgagggattgtttttccatttaaagtttcaacaatagtactcatggcagtttatcatttgtgttagtatcacatagcatgcactgtgtatgagtgtatccctccctccagaggaacaatgtactattctcattaaaacagtttccctgcatcagttaataatattcgttgtgcgtgaactgtactccagtgtaataaagtggtgatcttatatttggacgcatgctgattgaccatgctttacgcatgaactgatttatgctgaattgcattctcagcctggagtgtgaagccaatgatatacttagggtccttttgaatcacaggattgataaaacataggaatagaaaaaacgtaggattttgataggaatgtaagtgcaaaacggaggattacaaaacgcagaaaaaacacaggaatgaccgtttaattgaaccgcagaaaaaaacacaggaattggatgagagagatagactcaaagaaaagttatcaagaggttgaagctcttgctaaatttcctccaaaatctctataatattattcattccacaggaatttcaaaggattggatatgattcaatcctttgtttcaaagggctccatagaaaatttttctataggattaaaattctctaaaatttctatatttttcctccaaattaacctgtgtagtatttctgcagcagctcgttggaaatccattgccctgacaatgtaacaggctcgatgtaacactcacaggtcgacagctatttccttagagatcagtatatacaatactgttcactgtattctagtgtagcagtagtagctgctacagctcccattttcaacaccggtctgttgaaaggcaaacatcgacaatgcacgcacaataaaatttgcagtgtgctaacttctttgaccaccgttctgccatgctccaagcataagccgtggcagcaacgaataaataaatacttcacctgtcttagactttcattattgttcacattcattaacatttatatttatgtgggccaatgcttattttaaaataaaaaaggtacatattaatatatatattttttaaaaatagcatacctttactttattaaatttcaatacaagtattccttaccttatttatttttaatgtaattattctttgtttttataaaccctaagggtatgtttagttcacactaaaattagaagtttaatgtaattattctttgtttttataaaccctaagggtatgtttagttcacagtaaaattagaagtttggttgaaattaaaacgatctgacggaaaagttggaaatttatatgtaggaaagttttgatgtgatgaaaaagttgaaagtttgaaaaaaaaaatttgcaactaaacacaccgtgttattttagataaatggcataaccttaaaaagcctaaccgaaggagtaccactaggcggctgctgctgttgttgcagtaaaccaaaaaaaaaaaaaaatttgtttacaaaatgcggtttggcttctcgagacagaaaagacgggcagttaattcctgccggggaggaagcccgagaggacaccacgttctcctcctccacgtcgcgccacgacacgccccactcccactgtcgcatgtgcccaccccgccctttgacttgccgctcattggcgacacacccgcacccgcacgctgccatcgcctctcggattcctcctcctcctcctggccagcgacatggccgcgataaactacgccgccgatcgatcgatccatccatctgcccccccatgtgcatgtcaccgctcgatcccctcctcctcctcctcctcctcgtcttcttcttcgtcgatggattcgccgtctttataaacgagcagctagctgggtgcgcgagagagtgtcaatgtcgatcgaatcgaatcgatcctccggtgcccaagagaaagcgtgaagctgccagcatgatctaacttgcagacaagaaatcagctcagctcgctggtttcgaacaggaaggcggctagctgaggcttcttctgagtacgtgatggttagatcatgctgtgacagtttcactccttccctgttgggcacacaaagctatggaacacaccacgaacagagtcagtacgtacccagctaatatagccagtgcaagagatcgaggaatgcgagagggaaatgcagctattttgttgatcaggtgcgtacgtatacccgtctctctgataatatgatctcaatcgacagtgtgtttagatttctaagaattaatttatatgagtgttatttagtttgtaggattgtaagcacaggagaatatctacgagttgtagagagaagacataaagaaatttttatccacttaaatcttttggaaaattcatgcatgcatttctatttctatattttccctttttctatggatggaaattccttcaaaccgaataagtcctaagctctcttgatatcagctaatttgtatgcgtactcgaactaaacttggaacacattcacacacacaatccgggtttacctttccgttttcgagtagaaaatcgctcctcatcgggttatcgaaaaccaactgaaaaccaatagaagccaacaattttcaatcaatgtcgtacgaaaaccagataaaattgattggattggttttcacaaaccgactagttttcgtgaaaactaatcggttttgtgaaccctgtgcacaatgtgacttactgactgatagagacacagtgctcttcctcgcaaccaaacaccgatatcacaatgacagacatttttgtgtggtttcaacttcgagatgttcgatccacatctttttgtcaaactcacatttccttcttgaatattggacacaagtttcttcttggtgcgcgtcgcccctgcccactgggcattgcatgtcagtgcaagcagaatccaaccttgcgcttccaatggcgtcaggaaggccaattagccgccgctgttcgccgccggtgcggcggcgacggcgagcggagcggcaggaagacgagaggcaatccaaggattaaaatgtaaatcgatcataatctgtggcaggggcgagctccgtgaatggcccatgttccaaaaactaggcccatccaacccaaaagcgctccaaatcgtttcctgtggaggcacattaattaattattatcatgatccatttgccgatttcgttgtggaagcatcgatccaatttctacctctatgacaattctatgacctcgggggtaactattattgtcaccgattattatttggttcatatgggaatatctatatctataactaatataaatatttggatttttccggttgtcacataatgcttccgatcaatttttttcgtccgtcgtccgtgtttgaatccgagaccgtcttgaaatttttttttcccgagcggactcaaaagaagccgaaaaagaaaacaaatatatatcaatcggcattggagtgaaaataaaagaagccaactcgatcaatcggctaatcgagtcaattgctcccaatcccattgcccctaattcccaaaatacatgaataacaaaattactcaattgcaatcccaaaccaaaataaaaaatctccacaaaatcaacatcccaaatcaaaccggcgtcgtactgtggttactatatcaacattccaaatcacaaaatcctcaaaatattcacaaataaaaaaatcaaaccaccgtcggctccacgtcggggaggtgaggggcagccagggaggcggggagttgctgccaacaccaggggagggaagcagctgtcggccgccactccggggaggggggagcagcagccaccggataactgctagaggagccgctgccctcgaatccgccgcaggaggaagctgctgccacccgatccactctcagccagcgccaccgccaccggatccacacgcggtcgccgtccccgctgtcagatccaccgtgggagggaggagagagggggcagagggagccgtcgccgctggatccgtcctcatccgccgccggatccacccgcggccgccgccgacgccgccatcgatgccggatctaccgcgggagggaggcgagatggagaggaggagatggcgagcgaggcgaatccatccgtggctcactcggcctccccgtctccgaccactctctccgcctcaagctgctcgcctccgaataccaccaccgcctccacgtcttcgccctccaggaggacctccatggtgatggcatcgtggatctggccggcaactcgagggaaaaagaaggcctgcgacgatgttgtggataggccgtcgacgatgtggtggatcggccggcaacgttgagggagaggaataaacggagaaagtgaggagggagagaggcggagaaagacgggaagagagaggaaaaaagagggagctgcagtctagatatttttactggtagtacatagtgtacgtgcttgagactttagataattacagtcaagtggcattgtgctctatattgtggtaaccacaagattgaatttcgctgaaaacaaactatttttgacatacacgtaccaactttacagacaagtaatattttattttattattactagcaaaatacacgtgcttcgttatgggtaaaagaaaccgttaaatagtataaaatgcaaacaattaaaatacttgcacgttaatatttgtttgagataaaaattatcgattgtaaaaaaaatttaaaattttccacgagacaacatattagagacactagcggcaatagacactagtggtggagctattgtgagcctctgactcatttcatgcataggataggataattattactgagatgtgcacgagatgcgcagcgaggttcttagtgtcaatcaaagcgatcgcctcagccgtacgacgcggcgtcgtgcatgccatgtcgcatatgacggcgagccgcctagcccggttaaggaatctcatagcggtgagcgacatgtcagggaaagatggcgaggttgacctgcgaggtggcgccgcggccaagactggatgggcggaacccgcccgtgccgcggcggaccgcatgatgggagtatctgcagagctagctgtccggtggcggcaataacaagagagtgggacggcagcggtggctccaaaggtggagcacgatagtcagtaggagcagaaggagtagcatggctatggcggtggccgtggcaatgatgaggaggtggtggctgtggttgttctcaaggataaacttgtcttttataaaataataaaataatacgtcgggtatcaaataactaattaccatgtaggacattgactcacaagttgtaggaaaaaaaatccgtcgccgatgccgctaccgctgccgtatccgctacaagagggaggcgagagggagaggaggagatggcgagcgaagcatgagggggcggagggagaggaggggcgggggagagtgagagtgagagagattttgtgtagggtggggagcgagtatggacaaggacgggacgcgtttggctcgtctaagtttttctggtgtcatttattttttaaaaaaacccaatatttatagtataggtatcagttttgtttaaaatcggtacctataattcctgaaatgtgctgattctgtatttttccaccccccgcttaggtgggaaaagttgtacttgtgatggttttaactgtttcgacacttatagtaccgtcatctatatgtctttttagtggtgttattaggtatatatttatcctcatgcgatttataaatcgaaaacaatactcccttagaaaaaaacaattacattggtttctatgatttttacgtgccacgatttagacgtgtcatcagttcaagtccatactttttttcacatagcaacgcacgagattatttccacaattacattaaaaatatagtttctatatgtcgctattcggacgtgtcgtcggttcaacttcatgcattttattcatgagtatattcaacaattacattatacatattataagaaaataaaatttctatgtgtcgcgattcggatattgcatcagctcatttccactcattttcttcatgtaaatagttcagaagtgtcattatccggtgcaacgcacgggcattttgctagtatgttaatatattcaaattacatactcaaacacctaatctattaacttattggagtaataattaaaaaaaaagagaaacatacatgtttgctctcagggcctagatattctcatattaattggagaaaaataaaaaaaatcatatggaaatataatttaaaaatagctgaaattcagaacttaaaaaaaaggaatatcagaagagaagactagagtccatacggtacacttcctacattccaaaatataaggctcaaccctttttttttcaaatatttcattatataaggtgtgcatgcatgaaaacaattatctagcatgtcttatccactaaattattgttttttaaacccttcattctcaagttctctaattctaatgggtgcatgcactatatttattatatttattaggggtgatccaaatggtgaggtgataataattgtttcttattctttgggttaaggatgattgtgccttatattttggaattgagggagtacaatttagagctaattgaaattgagaatttaaaaaaagagaaaaattaaaagtagaggttagagttcatatataaatacaatttaaaaatagctaaaattcgaaattaaaatataaggaatacttgaagaagagtatagaatccatataggaatacaatctagaaataactgaattcggaattaaaaataagaaatattaaaagatgagtttagagtccatataaaatataattagaaacaatagaaatttagaattaaaaaattattggaagaagagcatagagtccatgtagaaatttagaactaactgaaagttgaattaaaaaaaagaatattaaaatagagtttggagtacatattttaaatacaattaaaataaactaaaattaaaaattaaaaaataagaaatattgggagaagagtctagattccttacaagaatacaattttttaaaaaattaaaatcgaaataaaaataaggaatattgcaagaagtgtctagagtccatatagaagtacaatttagaaataattaaaatttggaatttcaaaataacaatattgaaagaagagtgtagagtccatatagaaatataatttacaaataacagaaatttagagttaaaaaaatagggaatattgtaagagaagtatagagtccatatgtgaatacaatttagaaataactaagattcgatatttaaaaataagttatattgaaaggaggtttagagtccacatataaatataatttataaataacggaacttcaaaattaaaaaacaaggaatattggaagatgggtctaagtccatataggaatacaatttagaaataactaaaattaggtattaaaaactaattgataattatcatgtatatacaatacaatatgcatattacatatttgttattttggtcaacttagtatagaatctaaattatattaccattttaatatattttaataataaaatatgaaaataaatatgttattatgtaaaaaaaaacaatgctagccacaaaacctgctcaggtcaccatgctagttgtagtaatagtagtggaaacatacaaagggcggctaaggttgaagcactatggctagcttggctagggctgaagccctatgtatagcgctacaatcttcaatataattttataaagtgccatgtaatttgtgaaaaaaagttacgttcttattagtttagcattataggtgaaagttttatcatggctcaccactgagtggggacgaatatatgttgttcacatctgatagtaatagttggtggtgtatatctatctttgtccttataccacgcatatcacattgtacactaacagctcaattgtcaccttgctgatgggacacagcgaattgatcgttgtatttatagtgtatttatagtgtgtaagatcaaattgattttgtggttatacatatatagctcccttctgccagcacatgccgtaccatgcatattagtattatgacaaacccaccttgatggctagaaaacctcaactaataaatgtacatatgtaacttttgtaattatctttttaatatacgttgtaggatgctctcctacaatagggatggaaacggatcggaaacggacggaaactaactttatcatgtttttaagattttttttacatgttcttctttgaaaaaactgtttttatgtggcatatgaaagaggaatcacgataacttgaacggaaaataattattgtgtagcatactaaggataatttaaataaaagagcatcaatacaagggtattctattagcatatgaaacataaattatactttttttagaaaaataaatacatccaaaatgtaaatataaagtaggatatgtaaaatattttatatttttcaatacttctattggtcaatcaattatcatccatcgtaggttttaaagggcattttaggtcttttttagaaaagtgtccaccctaacggtatattataaaaaaaatcaaccatgtattataaagagagacaaattctatgataaatttttgaactagagtaaactcattgatatactccctccgatccgtctaaaaaaagtctaattctaaagatgaatctgaacacagggatataatagattctcccgaaaattacatcaacagaattacagtggatccgtacggaattatagctgttctaggattaatccattgcagcggaaagctaaattaatgatgggtacaatgaacagttcttacattctgcccttgtttgaagctgtttaccggtagtgtattccctgctgtcgagccacacgttgttgacgccattagcatctagctaagcgacacgtactattgtaagagcgaatagtactgtagaagtcttaatacttatcccgaaataccacgtaagctcatatatgataatatgatgagaagagaagaaagaaaggattgtgaaccacctctcatacaagagataaccttcacatttaaaacttttaagaaaaaaaaattaagtgtggatcgaacaaacaaattaaaataaaaatattgaattcagtgagctagagtacatcagattagaagtggtgattagctcttctgtaaaacttgctcttagtgtagctaggactagcataagtacagttggtccttttcaccactaaacaatgttaattacagctaaaaaaattactatatctacttaaatgaacacgcccatagagattatgatgaggaaaggaacaaaagcagagacttgacacttgtatatattatattgttcttgccactctaaaagccgccaataattcaaacaactatatgggattctctgcggctaaaactatgacacaccttataggattatttggggtcgcaaaccttctgtataaatttcacgtataaagcagacgtgaacattcgggagccttttgttccctcggaaaaaaaaacattcgggatctttttggctgcgtttgttcgggagggttagaaaatgaaaacggttccttttcagcccgtaaaacaaagcaatgaattagcatatgattaattaaatattagctaaaataaattaaaactagatcaatatgatttttctttttaagaaacctttccatataatttagaaaaacacacaccatttattacaccatttattagtttgagaaacgtatgtgaaaaataagaagatataatgaatacaaccttagcttctactccctcccctctatcccaaataagtttatttttcactcatcccaaactatgaatacagagataaataagactataaacctctattttattaaatcacaatacaattattctccactttatctactcccaacacaattattctttactttcataaacttcgatgcaatgattaaaaaagcttaacttattttaggaataaataagtagagccaaaaataaacttattataagatggagagagtagagatttcctggaccacttgagctataatttttgtagatggaaatcaaaattaaggggctcggatgaataccgtgggccttttgatttgatgatcattgataatatgagccccaggtacgtagatgcaaattaagtaagatatcaatatcatcaccgtgttccacactcctgtataaaattggagatgtgtccttttattagttaattaaatgaacagagtaaaatttctcgatataatcacaatatcacgctcacgcactgttttaaagttattgcagggaccaacaaggatggttactgaccggaagactatgaattcatgtgcaaaattcaaaaaactgtacccgaaactcaaatatgtttttttaccagttggcaacaggccgattggttatcggacaaaaaaaatctttttggttctgaacttttgcctgataaaatcatttcataggatttcaccattggcatttgtcgatgggctgcacccatctaggatatttgagtatggggatcgttgaaatctgggtatacgtgagattgagataaagagacgggagatagatttttatataggttaggccccttaattgacaggtaataaccctactcggctactcctattggccgaagctggtgttgtctttatatatcagtatcatatgagtacaatatttgcgataaactaatctagtctttgtcggcttggcggcatggagctttcacacgtagtcgatagctagtatagtcttcttactcgaatataattttggtcatgttagtctttgtggctccacgttgggtttgtgtagatctatattggcttgtcttatgttggcctacccctctcctcctaggagttcttgtatatatttatagtgatgatcgtcttcctccccaagtataactcaaaaacttaggataagatatggattaaagagatattatgtttcctgactagaagtctgacatcttctattttggaaagataacttccttctagatatgtagtactatttccctaatcaaaggatacattcttgtatatctcattaggtatatggtattttcgtatactataaacccatgtatagtaggtatgtcttatccttaacactgacaaaattacattaattttgaagatagcggcattataatttcaacaacatctgattatagcattgccaacccaacaacattgcactcatacattagtgtgaaattattgacacaatattttggatatggcggcattataatcctggtaagcttcaacgaacattatattatcacattgccatcaaaaacagcaatacagcatcacactcataaacactgttgtaatatatgttaatgtgacaatctcgccacatttatcacacgcatcacactcatatacattttagcaccacttacattggcgctaagatattgtccgatgtggcaagattgtgacaatgtgatatcggtgagataatataatgtgcttcagcgaacatttgcaggtatgggtgtatatatgggcccagaaagccaggcaaggaccaacaaagggtggttattggttacccacatgaatgctatggattcatttgaaaatttcaaaatgtatatctcaaactcaaatgtggattttgttttttcatccgataactagcaggctaccggtaataaaaaaatcatcaattactatcattttaatatgatttcaccaaaggccgtaattttggaaatagtagaattacggtcatgggaagcttcaacttcagtatgaaatatttatcaaaaggaactgataagaatatacttgaataaatatttatctcctgttggagttattagtttttgcatcgtcaatttttagattttacgtgctctctattaagcgaattacgtaataaatgattgtaaaattaaaggccatacttcattccgttatcgatgagaagccagcgaaggcggtttatttagtacctttacttggtaaagcatgagaggtgtgccatcttttgccgaaagtgaagaactcgagcgcttgcgagcttttattttagacatttttaataaataattttattaatagatatcccaagaacttatttctaaaatgaaccattttgccacgccactggaactggcgtggccaaactactatgccactctaggacaggtggcgtggtaacaaatgccccgtgacgatcattgcctttggcaaggtcaagcgggtgctgacgtggcagggggctgaggctgggcttgccacgccaggcttggtggcgtaataccgccatgccatcccgcctagcatggctagggaatagccgccgatgtcgtccctttctgccttcttcctctcttcttctcctctccgttgctctctctctctctctccccgcatgaagcaaccaatgccccctcctcaaatccctcgaaatccattcaaaatccgatattcttactccgattttaagcccttttgagtaggagcccatcccataggtatatttccttttttaggttttttctcgtgtttgcatttagttatttccatccttctaaattgcagtgaaaacatgtaacaaggaatcgaatatacttgaaccattcatatcttcaacacataaatcaagtccatcaaaaccattctaaaatggattcatccaaaccattcattactatgtagttttctaataataccatagatattttatccgatctttatccgtttagtaccaattttctaaatacaaacttgttatattcatcataaaccacaatagtcatgaaattaataaaacaataatcctaacacatgaaattttcttatcgaacacttgaaattatttcttaaaaggcatgaaataaatagggctagctgcattgtcaagccaatgagccggacatttcagctgccacgccatggaccctgacgtggcaataagttctacgttggcgctgcttgactttgtccacgccaactactgccatggggcacctttgccacgttaagaccgatggcatgacagagtaatttggccatgcaggttatactggtgtgaaaaaaaaggtttatttttaaaaataagttcatatgaagtctattattaaaattatttattaaaaagtaaaaaaaaaacacatacacacgccctagctcactccagctgatccaaaatactactccacccaaacaaaccaaaaaaaaaactcaagttcgcagaagatccaaaccttaaacatgacacacaagttcatacgcctgcttggcagtagaccagtccaaatccaaccctgtcccccaaattaacaaaccccagaaatgcccccaaaagacaacaaagcactcaccacccccccaaccctaatcagcatttgattttgatccatcctcatcaacccccactattaatcctcttccccttccccccgctctccgtccatgttcaccccgcccccatgccccgcaatcccatccaggttcatccgcctcccgtcttctttttttttaattcatccgcaaccactgcgaacttgcgaaggccgcgggtacaagaaaagaagagaaaaataaaaaggagccgcattataagtaggtagtggtggtggtggaggaggaggagagcaaatcgaggtagccatggcgatgcaggccgccttcgccgcctcgatgttcccgcagctggcgcagcggaggggaagcgatcgcgcggtggtggtggcgccgccggcgccggcgccggtgagggtggcgatgaggagcggtggggcggcggcggcggcggcgagaggggtgaggtgcagggcgagcctgatcgagcccgacggggggaggctggtggagctggtggtgccggaggagggagggcggcgggaggcggcgcggcgggaggcggcggcgctggcgcaccgggtgaggctggggcgggtggagacggagtggctgcacgtgctgagcgaagggtgggcgagcccgctgcgagggttcatgcgcgaggccgagttcctccaagcacttcatttcaacgccatccgcggcggagacggggccatggtcaacatgtccgtgcccatcgtcctccccctcggtgacgcccagcgccgcgccatcgaggcgtccggcgcccgccgcgtcgcgctcgtcgacgccgccgaccgccccctcgccgtcctcagcgagtgagacatcccccctaccccacctcttcttgtttcccttgtttagttagttgcatttccctgttcagacgcttaattgcaattatttggttactaggagtgcttgctagaagagtaaaattactaattacatgagtggatggaatgtagatatattgattgttcgtgttggttggttgattctcacagttgtgggatgcctttggacctccaaaagccgtaatttttgtgcttgggttggaaattggaattgtgggggttgtagcctgaatggttcagagaagttcataggtggtttcttcaattggaaacataatatgcagaaatacagattatgagtgtttctgtgcagttcccacatttcgtgagcttatccctcacaaacttgtgctctggttatattttagactttaatgctagtaaacaatttgtttcacagcaacctggtcaatgatatatcattcatggcggaggttttatcttgggcgttaaactaattttaaggttgtggcattcctcttttgtcgattagactacaatatcgtcatgcggataacctttgtcatgctatatcaggaactcaggacatctttatacatctcggtcgttttcaggtcatatttttttgagtcgtatatatataatacgatgatcggtaataccattggtagtccttataaatacatgttccgtagttcttttgccgtgttctctaggtattttagttttatctatattaaactgacaagtgatattatatttgtttcgttgttttttcgccgcgttctatgggtattttagtttaagcaactgacacatgatatgatttacatcagaaagattattttttattcaccatttgtttataagggtttgtacacatccagctattgtaagatgttgttatagaggtgacgtaacaacgtcaaccgtttacatctgtgtctaggaactcctcaagtcatgtgtgttcaaaacaatccgacttgatttagcatggttttagttctttttaattagttataccatggcattccctgacatatttttcttctttgttgtcagcattgagatctacaagcataacaaagaagaaaggattgcacggacatggggaacaactgcacctgggctgccttatgttgatgaggcgattacaaatgctggtgattggttaattggtggtgacttggaggttatagaaccaatcaagtacaatgatggtcttgatcagtatcgcttgtctccagcccagctgcgtgaagagtttgccagacgcaatgctgatgcggtattcgcgtttcagcttcgcaatcctgtacacaatggacatgctttgctcatgactgatacacgcaaacgccttcttgagatgggttacaaaaatcctgttcttctgcttcatccattgggaggattcacaaaagcagatgatgtgcctcttagttggagaatgaagcagcatgaaaaggtacgctttaagagtagcaatcgtactgtcaaatctttttagcaaatgcatgttggtgccttgttgttgatgaaaccatttgatttaattacactactgtaaggcccaattcatgcacaattttgatgcgtgtttattttggtaggttcttgaggaaggtgtcctcaacccagaatcaactgtcgttgcaatcttcccctctccaatgcattatgcagggccaactgaagtgcaatggcatgctaaggctcgtataaatgctggtgcaaacttctacatagttggaagagatcctgctggtatgggccacccaactgaaaagagggacctgtatgatgctgatcatgggaaaaaggtgttgagcatggctcctgggcttgagaagctcaatatccttcctttcaaggtatgtcatcctaccagaccagatatcacattttttggatgcactagattgtgtagttcgctagcttactgtccatcttgtacatttgaatttggatgtcaagcaacatattttagttttcagataaaccttgttgtattctttttcttggcatgactcctgatttgttttatcaggtggctgcatatgacacaaagcaaaagaaaatggactttttcgatccatcaaggaaagatgatttcctgttcatctctggcacaaaggtaacatccatttcaatcctgttttggtacaccagttaattttgagcaccaatgtttttttccagcccagtcctaacaacattgcctgtgttatatagatgcgtactcttgccaagaactgccagagcccccctgacggattcatgtgcccgggtggctggaaggtccttgttgaatactacgacagcttgacgccatcagcggacagcagcaaactgcgcgaggcggttgcggcctagaaagctgaaactacctcaaataagcaagaacattgcatcttgcaactgtaaaatggttctttcagagagagaaccaatggtatatgtgtatactactggtcgcaaggcctaaacatttgggtttgattggaagcgcattctggtgtgatttgtatgtgccctatcatctggtaatgctacattggaagctcatcatgttgttggtgttaataaggatgagcctttgtgtgctctgctagatatgtacatatacaatgtggtggtatttatatagtgcttggtgtgtttgctattatagaagagcaggtttcatcttctattgtcgcatctggtcattggacagggctcgaggacatgagggatggtcagcaatatttttgttaacactggaatctcatcaaggtttctgtatggtatgggcaattgctttaggctagagtgaacttcatattctggggcaacgattattttcagagacagaatcaggggcagaataattattgacaattacttataggagagaattagatattattatgaagtaaaaatagtttgaaaaaagttatctaaacaatgctaataaaaaaagcttttaacatagtctcggaagaatggcatgaataattcggttgatagtctgcctccgaaagcgttgacgtataaagaatggggaatctgaagttctgaacccttcccctaatctgaattctgcatttgtataatacgagtagcaaactctaataaatctacgtctcctgaatgcccttgaggagtttgaatatacacacaaacttcagcctctatgatttgatcatttgatgttgaaagctctgttgacaacgagctaatcatgccggtgcacctacagattttgtgtcgatctaccaacgcttattcaaatgaacttgtgtcgatctaccaacgcttattcaaatgaactggtggtatatcgccaccatcttgtatcaacctaaacaagagtaggagcagcaacaagaagccacgcaaagaacttgttgcttgtaatatttcgcttgcatcgttcatttacactgaaaagcaggtaaagataggcccggcgaaaagcaggtaaagatacacaaagtgtatatacatacagaaaagggaaagccgtggagatatttgagtcgaacgctatctaacaattgcaacgtaccaagaatccagtttccatctcaagaaatgaacaagttccatagaatacctggggacaaagctatctccatctcgattctcgaagatcaatcccctccagcatccttgacatcgacggcgaactcgtactcctggtcgcagcccagataggaatcagacatcaagtaaaccatgtaatcttttctccctgcttctggcaggggcagcgaactcgagcttcactcgagccctcttctggagcttgaccctcttgattgccagcaactggtcggtggagcgatcaccaatcaccagccaccatccttcttccttgggctttgggaacctgggggcatggactggaccagcctcagattgcagcaggtctgccatctcgcgctctagcgtcacctgcacggtcacactgccaccatcgccttcaagaacttggaaagccatgtcgatgtttgggaaccgcctgaggaatccgacgatgtcctgcagctgggagcttggtagctgcagcagatcctgcatctcatgcgtgctcatctcagccagatcgaagatggtctcgatggccttgccttcgttctcctggcatctccgggctaactcctcggtgaagtgtggaagctgaagcagcacggaatcgcgatcccacatgccctgtgtcaccatctggctcagctccattgcgttgagagcgagggtgagccatccgttgctggagatgacatcgatcagtgcctggagcaatctatgagcaggaaggagaatctcccgctggtcagctgcaaggtcaccttccaccgtgcgccttgagaaatggcattgcagcagtgcgttggccttgacatgtggatcgtcatacctgactttcttctcgacagaaaatctctggtgatgaacaagcctctcaatggatttttgctcaccagggcgactggggagatctgcatattctgaggcagaagctagaatctccaggaggcctttcaacttggtcttctgagttagcatagaactgaatcgctcaatagtcgtgtaggtgacgtagtaatacgaggcaatgagaccaaggttgagggtcttcaggtaaatattttcctcgatagccaaacaattggttgattccaggtcgttcagcactgtctcaaccagctcagagagatgttctgatacatgcctgtggctcacatcctgcagattgtagtagttagggttcttcgcaagccgtcggtacatgaaggtccaagtaagataatccacggcatcttgcttgttttctataagaccagctaccacctcggcattcatatgatcatgcaagaagtgctggagatggctctcaacagggaaggcctcaaaaaggaacttcttgtagtattccttgcgaggcgcatagcacaatataacacatttcccagagtcatcttgaagaggcctgttggcatggcccatcatttgcaacagatcagtgactggataatcagtatggctgttcccccggccatcataatactgggttcccatcacaacaaccagatgagagggcaatgatcttccccagcacattttgctgcttgcaacacacacttggatcctcccaccaagaaagagctgagttacaagttcctgatcgaagtcgctcaggccctcatgcaagtagcctacaccacatttcagagtgtatttaagtgcttcatcattgacaccactagtgaaagtatccatctcgtcttctgacccaagaaggaaaggtgttccaccactctcagcacttgagtgtgcacacaaatccactgcggtcaaccttgcatgcttatgtgttggtacaaacaccagggcaggcttaccatgctttgcatgctgggttatagcagtgtatgttggctttgacattgcctgcatccttgcctcaaaaattgctacatcccaaccctgaatgtgaatttctaacggcagtggtcgcactgctggagggaagttgaaaaggctatgagaggaggtgccaatccattctccaagatctttaccatttgcaagggatgctgaaagcgctacaatccgaatgttactaccaatatgattcgccatatgcctcatcctagagatgatgatttccagaatatgcccattttcagatccaatcagatggagctcgtcaaaaataaataaactgacctgttgcacattctttcgctgtttccatcggcgtgagagtgcatcccacttctcagcagtactgattataatctcccctttatcaagaagcttcaaatcagctgctgtttcgcctgttagctcaactacccgcgccaattctccaaatttgctctcccaatccttatatctttcttttgcaagagcttcaataggagctacatacacaacacgcatgttgctgtcaccagatacagccttctgatggtttcttagaatagcaaactctgcacatatggtctttccactgcctgttggcgccgcaaccaacacgctgtcatcactgttgtacgaggcagtgaacacttgagtctggatggggttgaaatgtttaaaagcacagtaaaggctttcatatcgtgcatttctcagggcagtaacaggtagtggctgcagatcaatcaattcagttggtggagcatatttttctggaagagttaaatgcctaaaactgacaggaagaattgtctgagaaccaagccacttatcagatactacgcgtataaagtactgagggggcagtggctcatatattggcactgtgaagttaagtgtatgatcttcatccacgtattgtttcttaagcatgaagtactcatggtgaagaatgttatcgccaccgttgtcctcaacaataagccagaagggctccacatatccatgcaattcatcatcccattggaaatcagctgttatagtcagttcaaaacccaaaaccgtaggagtaataggttgaacatgggctgaaaggttcagctttggtaattggtggatgcacttgtgcagctgcatccccatcttcgggttacgaattagctcaccaatttcctgtgatgataggtcaaagtacctctcccaagccaattcttttttctccagtttcattaagatttcctttggaatacttggaaactggtgcaggggaatttggacgttccatatatgcttatcaatcatcttgcaaagattcaacgctttctccgctagttgggcccatcctctcttcaaaactatctcaaacagcgctcgtaggagacggccagcattctgcatcataaagtagaaaatgctacgtaagattaatagaccaaataagcataccataattcaggaagtgcattcagcagagataacacgtttttacctgtctgatgtagaccatatctgaactaagggaaagaccctccagttccagcctagaaatatatgcttgcagtagaacattgatctttgcactgggctcgtccaagctctctttcacaggaataggcacacaattgaaaagctttgccaactccattttctcatcctgtctaacactgacatacttaaattcttcactcagtgaaaagagtcgacacagctcaatatcacccattgtaggcttcaggcactcattgtatgttgagatagtcctgtgactaacatagtaataactagcaatccttcccaggtcagttacctgaaaatatcctgttttcctgtcatactttatcaaattgttccaatccagtatatttgcagcagcgtgtacctgcaacagcacatacaggaatcagagtgtgccgggcagggaacagaaggggtgagacaaacatattaaacatggaatgatgaaaaatcaaggcagcatctatataaacactaacaatacaatgatagatcatgatacttcttcaaaatcttgtgacagtagttattacaaaatgatgacatgcaatgaagcaagacaacggaaatcatcagacaaatagctctgaatcttttttctcccttttataaaataattgattatctgataggatttcaattcttcttccttattctacgtaactgtatagataattcaaatcaaatgtcccacgcaataatttcagatgatatctggattgcagcaaatagtctgttctgattttgtatatattattttacatgataagtaataacacaatgttttatattcataggaagtacatgtgctacattttacatgtaccacagttacatgtgctacattttcataaaatgctatatatatacattactccctccgtcccataatataacaatctagtaccggatgtgacacttcatagtacaatgaatctggacatgtttcctatccagattcgttgtaccatgaaatgtccaatccggtcctaggtttctatattatgggacagagggagtatgtattaacaatgaagagacatgaacatgaatagtttgtttcctgttactattattatactaagaaagcaagcactaatgtaaggagcaagcagcatagatttatacttcctttctagatgtatttgctgtcttttttaaatgaacctcgcaatattttgtatggttcgtttaaaaaagacagccagcacatctggaatggaagtataaatctatgctgcaaataagcaggtaaacaaaaatatccaagagcactgtacactatccattctagattccaacatgcaagtatgatgcaagtggtgaagtggaggaattcattccaggtttcttcactacctcataaacatcaaaggactgccctattgcagtttatgaccgcctagtcaatactgaacagtgatcatctcagtaaatgctaagaaaaaaattttacgagaaatatttatgctcacgcaattcctgaacattcagaaagcctaagaaaaaacttggacagttcataccacaatggacctaagagagcatagtgggattgtggaaatgcaagcataaagtgtgaacaaatattggaaagtaaaacaccagaatgaaaggactaatataaaagaacctaaaaaaaggataggacataagtttttacttaccaagtcaactctcctttcatctagagtattgtctgtttccataatatctgctggtaaaccgtacaacgttggattccggagcatcctgatgtagaggtaggtgtagccaagccaggtgcatgcctcccgaacattctgaatagtccccagaacgatctcagcattcagatgatcagccaatctggatatgaactgactctcaataggcagttgctgattcatcagagacaggtagtactgcaattcactttgttcagttagtattattccctctccatgtgtatcatactgaggtctgcccgcgcgaccaagcatctgcatgacatccagagggctcagttctgtccaagcacctttttccggattgtaaacctgggtaccctttattattacagtgtgcgcaggcaaattgacaccccatgcaagggtcgctgtcgaaacgagcgcctgtaaatgtttatcagcaaaaagcccctcaatgagctcacggtctacccttgtcaacccagcatgatgaataccaaacccatacggcaaaagatctttaagatcattgcttttcacatgatttgcatgatcggcaagaatctctaggctcgcgctctcaacctttggaaagcaggtcagtttgttattagataatgcaatatctttgatggcacgagcagttttggctgtctccttcctcgagtgcacaaatataagcacttgatgctttccagcagcagccataaccttctcatagcaaatctgattcatcaactgaaacctctggaagggcttcttcacagtgatcccaatgtattgttgagcaagagggcaaggtcggtagctgttatcaaaatggaagagaccaccagagtgaacacgcaagaaaactgcaacatcttgatagtttggaagagttgctgagagaccaactagacggatatgttccttggttgtttcagtctgcctgactgatctaaacaatgctctccagaacaggccctctgttgtcatgaagtagatgaatctcatcaattattagaagcttcaccatttgagtatagattctgtcacctgattttcttgtgacaatatcccatttctcaggtgtagtgacaataatctgtgtttcatcaatctgttgtttggttaagttctggtctccactgagttcccttacagtgatattgtactctttcagccgtgctgacaaatttccaacaacttcagcaaccaaagctttcattggggctacatacacaattttgtatttggtattgtcaaactctccatctttcatgtgcaagccaatctgctgaaggattgtaagcacagccacgttggttttcccagcacctgttggtgcacagagaataatattatctggtttgaaaagggcagtatcataaaccttgctttgaatcctattcagctgtgtcatcccagcaaaagctggttgagcccagtctggcatatcagatatcttgacaaccttctctccattttcatatggcttagctttcagtgctggcacatggacttcctcatacccgttatgaggggttctaaatgatcctggtggaagttcacatttcttgttaaccatcaagagaccaccttggtggaaggttaggttctcaagatcaagcagctgcttctggcctttcaaccatccactctccatatcccgcttaactaccctttgatccctcgcaccattaatgccagcattttgtttttcggtaagcctcttggcctcatccctgatgcttttctccatattcttcagcctatcttttgcagacaccctcgttgcatgcagctgctccaatattggacttaatgttgggtcactcagcatattctcttctatcatcttccgcttttcctgaccttcagcccttgccaaacaagtacaccagaatatcttgagtcggttccgcaccagcaatttgatgaaatcaaaattgtcatagcccaatagcgtgacaagccgattctcaacatccttgtcgtcactctcagaaagaaaactcatgatctccaaagaaagctcctggctaacctgcggatcaatatcttcatatgcctgtgataccttcctctgaagccagtaagcatcaatgtcttgtgcgtttatggccagctcctcattggagttatgcatatcatcatcgtctaactcatcaccaatttgcatggcaccagcagcattcagcatggtgtcgccgtcgtcctcatccaaatcatctagtacctgatatagacaaacgttgaagggcattacacattaggaattaggatatgatctatcagtacacgcagatagaagggagagcaagagattgtaaacagaaggatcatttgaatgtatgtacctgatcagaatcacttccctcatcgtcttcgttctgttcaaactcaacagcaacgccgaaattttcatccagttcactagctgaatcacaaactgcagtatcatgaaaatctgtgatgagcttaccgatggagacgaactggtggaacatctggtcggagatggggtcgaggaacttgtcgatccccctcttcttctcagggctcttgatcttgtcattgttgaggatggcaagcacctcgtcggcggcgctgccaagcacgtcaggaggctggccgccgagctgccgctggatgacgctgagcagggcctcgtaggcggctcgcgtctccttggtccggggcctgtacacgacgtcgtcgatgagcgtgagcacgctgacctcgcgctgcgcggtacaggcggaggcggcgcggcgcctgcgcttggcgtcgaggcggtggccgatgtcgtggtccgcggcgtcgcgcgccttcctcctgcgcggcggctcgacggggggcttggcctggacggcgcggtcgccgaagctcctcgggtcgatcctgccccggagcgtctcgggctcgccggtgtgctcgtccgcgccgccacgggggcgcgagccggagccggagccgagcacgaggttcgagttctcgacgtagtcgtacttcctcgaacgcgcgtgcgcctcggcgccaccgccgctacccggcttggccatggctgcagatcaaagtcaatcaaaagtcaaaaaaaaacaaaccgaatcgaatcaccacgcggccgagacggtgggggtaggtttttggccgaatcgatggatcggctggtggattacctttggcagggcgagccgaacgaagccggcgacctctcgccgagttgtccgccgccgccgccgccgccgccgcgtcgagtcgcggcgattctcctctcttctcgtcgtacgtcgcggcggagaagggaggaggagggtttggtttggagggaagacggcgttgaaacccgcgctgattttgcggggatcttttttttttcttctttatttttgcgggtatttattttgtgggggagacaggtcggtttgatggacgaaccgactttggaaacgtgtactacagtgaaaggaagcccacgtaacctcaggcccacaaggcccatctattttgacggttttgctgacgtcaaattttcttcttagatcgatttttctaacgaaaggcgtagtgtgcggttcgttacgtacgcggcattggactcgatgatgaccaagtgagggtcttgcatacatattttttcccttttcactgtataaactgaagtgattagatgataactctacttaaatgcatatgggagagatatgtgaccttcgaaaattacatactaattacgtgcaagttatattatagttacaatataattatattgcaaacgtaccatatttaatttgacaatagctaaatgtacaaataatatctgaatgtgataatttaacgctatttcacgaggggataggggttggcttttagtccgtgtgtctatgtatataatttgtatacatgtatatcaagtttatacgtatatgtataagtgcatacttttaatgtataaaatttttatatatatataaacaaaactttgtatatatacatacaaactttatacatatgcttacagagtttattcatatacgtacaaactttgtacgtatatataaaaatttgtatatacacgtacacatatatgtacaacaagtactccgtaccatatagaaactaactacgtgcaagggggccgcgcatggccgatcgttaattagcaatcttggtttcaacgtggtctacttttatccactaagatagtcttatatgtcatcctcaagtgtcgattaaaataaattggtaaaaaaaaagagtcaaattatcaaaattctcaaggttaccatatctataaatttcaagaaagggtttgtaagccacttacagaaattgaattctagaaattaatttttagggtttttcaattattatgttctactttttcagttttgtcttttgaaccattattaccaatataggtcttaccttaattttttattactttgtttatttttgtacgcaaattttgaaatagaatcacaaccttagaattgcattgaggaaaatcattacaagctgcaactatatcatgagcaggttatgcgcacagtggaaacattgcgtccaatctgggaactagtggttgcacccgtatgatttcttactagcatactttcactcaatttttttttttgaagcgaaaatttcactcaaatatttttttttctgttcaacatttttcatcatgagcacaaatagtttggaaatggtcttctccccaagattggtcatcatcagtatcctcgaatgcacacgcgaacaaggtggccagcaatggtgcaaaatagtttgatctactgtatattcgccaaaactccatttttttcccctagagaagaaagggttcagacttctgaatttacctgctatgtttcatttttatctgaccatttgatagatgccaacataaggaaggaaaatgaaatattcaaggtccataagaaatgaaattttcagagaatgactaaggacagcatgaaagcttgttaacatgattcccaaaaaaaggaaaacaagtctgactatctctttagacgcccggtcgctctgcctcgggggcgatgcgggcggcgaaacaagccgcgtcgcccccgtccctctcctcccctcccacgcctcgccgccgccggcaaagctgggcggctgcaaggacggcggcggcagggctctctctctccaccgctcgcagtggagttggacggggcgccggcaaggcgccgacgacgaggaagaaccgacgacggcgaccagatccggcgccgggatgcacggatccggtacccccatggccggatctgctgctccgggcggcggcgagccgggtcggcaagtcgcagcatcggcggcgtggaggtggtgccttcggcggccggagggccgcgtcgacggccggagggcggcctcggtggcgtggagttggcagcggggcggaggacgcggcggcatgaccgtggctgcggcgacaaacggcgagcgtggccagatctggccggacggctggcggcggcgctcgcgg

SEQ ID NO: 3633 - DNA, 2004 bp, Oryza sativa
agggcgcgcgtgctggcgaagcgcgcgcgcgccgcggtgggcgaggccgggtcgtcgtggcgcgacatccaccgcctgatcgacgatctgacggaggccacggcctccccggagccgcagttgcagtagatccgaagatctcatctgagacagattaataagataggatttgtagcttccctttacttgtcgctaattcgtatgcactctgtaatggtctttatgaatacatttcttaatagttgcttgaatatctatctgtgtttttaacacaagagatcaaagtttgctcggtgaattttcagctggcaaaccaacaaaccatttcaatcttcaactacgggcaaaactgtgttggtattttttgggacagcggagcttttgtcctgactgggagagacataggaagcaatatctgcacatttctgtcgaagtcgaagttgccactgccaaatcctacctctcttccaaatgcgaagatctcatctgattgacaaggtagaatttgtagctttccttttacgtcttgcaatatatgtccacccaacagagtgataatcttcaggaatgaatattgacttgaatatctgtattttaaacagaaaataattcaagtttggtcggtgaagtttcagctggcaaaccaataaaccatatgtttattttcctctggatcatttggcaagctttcaatcttcaactacgtgcaataataaagcttttccaggaccttttttattgtactaaaaaagaaaagaaaaaggatgcttcagggtctgcagactacttcacaatattattgagcccagaagaggcctgcagctctatagcccatacaagcaatgaaccatttcgtcgaaggcccaaagggtaaaaaacaaaactttacttcgtctttattaagttacatgcaccagccagttgcacctaaaagcctaaactgatagggaaaggcgggcaattcactttatacactccaacactccccctcacgcgagaccccctcaagtctcaagcgtggaatattggagtgggctacaattattttatttaattgcgcgccagccaggattcgaaattattttatttaattgcgcgccagccaggattcgaactcgagacatttggctctgataccatattaagttgcatgcaccagccagttgcacctaaaagcctaagctgataaggaaaggcgggcaattcactttatacactccaaccgtcttccccaattgcggtatgggagcctcgcccattctaattatttgatgttaggtcattccctaatattcatatcttttttcaattgcggtatgaggggtcgctcgactggttgcttgttagggcaagtattacaagcatccaagtaaaatctcctaaatgtcacataaggttaagtagtgaggtggaagagaaaagagatgagagagatatgaagtcacccctcatacaagaggcaacccctacataaaattcaagacaaaagaagagagatgaagagtagattgggcaaataaacattagagctagtgtattagaattagtatatatgtgatataatgtacatattatctatatttattagttgatgatatgattaagattagatgtagcactatctcttttataaaacttgcccttagtgatctcggtaggtgctcctctagtgtccaggtccatgctcagggaaagttctcacgcttcgtttcatgcggcttgtcgtgaacacggcctgtggcaacgagttcatatcttccaaccaagtccaccggcagcggcagcggtgcagaggcgatgagcttcacacggcacctcattggcaaactcatgcatcccatgatgtggagcggtagcagacttgccgaggactatagccgcctccaccatcaactccttcaaatgacaatgccgcccgacggtggtcgtgaggccatccacctccgcgaatcttcgctgtcactactgctcagtcttggccgctgcttggcttcctcgaaccaa

SEQ ID NO: 3634 - DNA, 8525 bp, Oryza sativa
atatatatatatatatatatatatatatatatatatatatatatatatatatatagatatatatatatatatatatatatatatatatatatatatatatatatatatatatatatatatatatatatatatatatatatatatatatatatatatatatagtaaatttgtttggtgctccatggtgcccgggcaccatgattgaaatttactatatacccaattcaaatgagtatgaaactttttcaattacttaggtattaacattaactactttactaactagtttaaagcaagtttgaactgaatttgaacttgtttttgttagattttgattctaggtatatagcatccatacatataattagttaggtatgtaatcatggattgtgaaataaagttaaatttgagttgttttgttgataagtataggtatgaatcaaattattataactaggtatatactcacaatttgaaaattttgaaaaatttgagtaattttgtgcattagataccatggtgcccgggcaccatggtgccccatatgagtgtcctctatatatatatatatatatatatatatatatatatatatatatatatacactagaaaaaatatccgtgtgttaaaagctatcttaatcttattattgttatatatttttgggtttgctaattaactgttgacagttttcagcgctggcggtgcgtgcagagatggaaaaaatttgcaagccctgttcgtgctaacggtgcaggaggataggaaaaatttatcaagcgcgccatggggatcgaacccaaaacctgcaacatacacacttgctccattaaccagttactcctttgcacttttgtgggagttacatccgagttacatattaattatattatagttacataatagttacaatgtaattacactatagttacatactagttacatttgaaagtttttcatctaaaaaactgtcgagtgttgtatagctactcccatatattttagttaacgagaaatctattgagggaacttgtttggatatatattttttaaaaaaaatcatgagctgcaattaggaatccaatcgtctcaagttagcaggcgagtttttttaaagagatttcttatacgatttcttctatatttctaaaagcgaacgaacttaaaaaccgactcaaacatggatctgtatttccaaaaacgaataaacttaaaaatcaactcatgcacagatttttaatttttataatagtagagataaatgaactccaacagtaaatttcatcttaactgaaccatataacaataataagattaaaatagacttcacccgttgcaatgcacgggcattttttctagtacttaaaaaaataataggtgctttcgtcgtccgtcaaaaaaaccggccaaaaaaagggcgaaaaaaagaaaataaacaaattgtccgatccaaaaagagggcgaaaaaaccggcttaaaacaaatcgtgcgaagaaaccaggcgaaaaaaggaaaagaaaaattaaatccgtccgatcaaaaaaggggcgaaaaaaaggaaaagaaaaacgaatccaactccgtcaacgcagtaaaaaagggcgaaaaaaaataaaaaagaatctgtctgattccaaagaaaaagaaattatatatgacgcggttaaaaaaatatcaaatcctattatattatctctatctctactacttaaaaaaaatctctatctctaactctaactctacttatatgatatgagctgtttccgtcctctgtgaaaaaaaatcgggcgaaaaaaaaacggacgaaaaaaagctaatcctattccgtctaaagaaaagggcgaaaaaaaaccaataatcatgaaaaaaaacgggcgaaaaaattcgggtgaaaaaaaaccgtgcaaaaaacaacaacgattccgtgtaaaataggaatcggtaaaaaaaaccgggtgaaaaaaccagacaaaaaaacgaatctgattccgtggacgcggtaaaaagaggggaaaaaaaacgaattatgtctgattaaaaaaagaattatatgtgatgccgtaaaaaaaatttgaatcctattatatgtgacacggtactatatatctctatcttctctatctctatctctactactttaaaaattaaaacgtttccgtcgtccgtaataacgaaaaaagagcaaaaaaaaaacattaagaaaaaaaaaagtccgattcaatttacttccgtcgtccgtgaaaatcttatcttatcttaaaggtccaggccgctcggcgctcatcgccatttgcgagcccgcctagccagaccaccgacgctgtagcacggctttgcaccgccctcgagtgcgcccgctagctggcgaagcaggagccgcttggcggtcgtcaccgcacgcgcgcaccagctcaccaaactgccatcaccaccttcggcgtcgttctgctcgcttgtcgctggagagaaataggatcgggagagagggatgtgggagcttgggttttgcccctctctcccggtcgtcacttcatccagcacggggacgatcggagccatccattagatcggacggctcagatttgcccagcgtcgggccaccgccgccgttgattacgctgcgcccaacgggccgcgaaagtgcatcggaccgtccccacatatgtgtgctgcgtcagctgcttggcctgcgagccgtcgaattgactcaactaaccaaagatgggccagcccaagtttggcccggttgggaagacctgggccaatagcaaatttgatcaaacaatgtggctcagattttttaaattaaagtccgtcagataaactcataagtagattcgaaaaataaatctaaaactaaatcctaaatcctatgctaatttatcaaattagactcggtcctacctatttgttaatatatcaaattagacttgatttttaccgttttgaggttttcaaggtttcccactatcgaacggtgtttttcccgttgcaatgtacgggcactattgctagtaaaaaaaaaaagctgaagcccatgacgccatcttaatcctctgctcgtactgtccaccaactaacaggcacttgacctccgccagtccaatcatacacagccacgtgtcctggcacttcaaaagttagttaatgtgttcaaccaccagcagctaaaccccgccaacctttgcttcccgccattaatttctcctccctatttatgctcccccatcctccgcccaattcttcccccaaaacgcacaccccaatccgatccagaattcctccgtcgcgaatcctcccttgtaccctgttcgatctcgtgcgcggcgcggagcggcggacgacgacgatgccaacggcggcggcgatggccggagggatggcgacggggccaggcagccgcgtgacgcggtacgccaagtcgacggcggcgtcggtgacgccggtccgccccggcaagacgcacgcgctgtcggcgctggacaacgccatggagcgccacgcggtgtacctggtgctctactaccgcgccgcgccggggctcgacagggagccgctcaaggagtcgctgtccgacgtgctgtcgcagtacccggccatgaccggccgcctcacgcgccccgccgccgccgccgccggcggcggtgaaaagggcgggaagggcggcggcgccacggcggctgtgcaccacgggtggatcgtcaagtgcaacgacgccggcgtgcgcacggtggacgccacggcggcggccacgctcgacgagtggctcgcgacggcgtccggcgaggaggagatggacctcgcctacttcgagcccatgggccccgacccctacatctggtctcccttctacgtacaggtgaccactactctttactcaaatcaaatctaacgacagtaattacctcacttcgtgtgtttggtcagagtaggtgagctaattagcaaaaattaaagatgctaatggaccagtagatcatcttatctatttgttcgtcagttgtttcaattaacattgctaccagcaatcatgtcgcgaacctacgatttccggaatttaatgcgtctctctagtctggttagttggttgcttggaggctagaatcgtacgtactgttacatctcgccggccagcatggccattttctgtcaattgaatgcgtcacatggagttgccgttcatgaataatccgatcaattttcaagttgatatttgctcaaatcagcagcgtttagtacaaatttacagtgagtttttactagttttttacggctatggagtgatcgattctgaacttgtgtgagccccgtgcagctgacggagttcgcggacaaatcgtacgcgctggggctgagctgcacccacctgcacaacgaccccaccgccgccgtgctcttcctcaacgcctgggccgccgcccaccgccgggatagcccctaccctccgttcctccactcgccggcgctcgccgccaagtccgccgcgccgccgccggagcacccgctgctcgccgccaagtccaggggctccccggacaccggcggcgagatgtcatccgccacgttccgcttcagcgcagccgcgatgcgcgcgctgctgtccgccgtcgagccgggcaccaccccgttcgccgcgctggccgcgctcttctggctccgcgtcgagggcgacgccgccgacgccgccgccggcgggggcgcggccgaagagagggagctgacgctcgcgctggacttcccgaagcggatgcaggcgccgctgccgacggggtactacggcaccgcggtgcacttcgcgacggcgcgcgccgacctgtcgtccgggctggcgagcgtggcggccgcggtggagcggcgcgcggccgccgtgccggaggaggagctgtggcccgccatcgagtggctgcacacgcgccaggccgccggcggcgagccgttccagatgtacgggccggagctgacgtgcatggcgctcgaccacgtgcccctttacggcgcggagttcgcggccggggcggcgccggcgcgcgccgcgtgccgcgtcggcggggcgagcggcgagggtctcgtgatcgtcctgccttcggccgagggcgagtccgcgagggacgtggcggtgacgctgccggcggcggtgacggccaggatctgccgcgacggcgaggtgctccggtacggcgccgacgtggtgttcggcccaaaggtggacacgcaggcctcgtaggatgtcgggctgtcggcccacagaaaaactcatctgggtttctttgtgctttacttaatttgttgtgatgtggccttcaaaagttcaaatgattgatgtaccctgctttgatgtgtttttttttttggtcttctgttgtaatgcatttcctagttacaagttacaaccagtcataagttttatttatttattggtaataaaaaatgttgaactgaattcatttatgagagtatcactctatgctatttcggattatttgctccacacctttaaaaattgttgtatattttcatctattgtattgcttgaatcacttattctgagcatttgttaaatttacttttaaagatatttaatttttccttagtaaatactccctacatcccaaaatataaggcataaccgcttttctcttatgtctcataatatgaggcagacgtgcatgcatgcatacattaactagtatctcttggtccaatagaattgatttgttttaaatcctataccatcaagcctcccagttacattgcttgcatgcatcaagatgatttaaccaaggtgattaaatgttttcttggtctttgtgttatgagtggttgagccttatattttgatatggagggagtaatctatatcaataattcggtgcataatttcattccaaggggccagagtgccgggccctccctcataaaggaattgtcttgttatgtagttagaaatagcaatgtccaagaccgaagatgcagatatgcaacgtgtgaatatggaatcttctgcctttgtagctttagccaaaataggcgaatgagttgctacagacagaagtgtaaactgtaaagttgtcgaactgaatttcctttttttaataaaaattgttcatttgaatccatttctgattgtatcactatgttgagatgcacttgatagtgcaatgacaaagggtgtgtgatttcaacaccaagatcccgtgttcaattcccaacacactcatagtttcctcttaaaaaatgtttggagggacgtctcctactccaaatctcctttttttcccctattgtatcactctgttttaatatttgaagcagagaaatgcctctattatattcctctctcataaagaattgctttattgtgtagttagaaaaagcaatgcccaaaaacagctctttttttatcgctctgttttaatatttgaagcagagaaatacctctattatattcctctatcataaaggaattgcttgattgtgtagttagaaaagcaatgcccaaaaacagcagcagcagatatgcagcttttgaatatcgattcttttgaatgatttgctactgaagcgtagagtgcgatacttctagtggtaaaaatcttcagggctttcagaggccaaaagcgtgctaggcaccaaggagatattccacggcaggttcagtgctctttcttccgccggctactcgaaataaacgtgatttgtttggccactaatgacaatatgacatgtgccacaattggacttgttgtctctggttgctatcaatgtccttcaaagttcaaacatgatgaaactaatgtatcttagctgtgcaatcatgtttccttcgttttgcatcttttgcatcaatatatatatcatgcgccttacgaccaacatggtaacttataagcataacatttagtttttaaaatatagtttaaaggtttttcactatgatttattttccagtatttactttttttaaatagttaggaacaattatataaaagttttagcaataaattatttttttaattgttgataagttattttgcttataataagtataagaaaaaaatgttgagtcccttggtattacagcagtgagtttatcaataattcacataaagaatcttctttttttttcccgttatcagactagaggcaaatattcgatcttacttaatttccatctaaagcacacttacatatgcgtatcattcttggttatgggcaagaaggttgggtttacttcatcaacgaaacccgatcgattttttgcgattttcaatgttttcgacgtggctcaaaatcaatatctgggagggatttcgaatggtctttgataaattcaaatttgaaacagtagtttgatccaagttttggccttgtttagttttaaactttttcttcaaacttccaatttttccctcgcatcaaaacttttctacacacgtaaactttcaacttttccatcacatcgttataattttaaccaaattttcaatttcaacgtgaactaaacacatgtcgaaatgcaatcaaaataccaccacatggcgcgggatcgggtagtcagtcggaaacgtaaacaacaccgttgtttgtttgtggaaaaatatggtttgagatttgagaaccgtacaagagtttgccgagaacttgaaaaaagtacaagccaacgatgtgatactatcagaaaggtcaagagatacgcaccgtgtttagttttaaatttttttaagagatacgcaccgtgttttcatttttttttaaacttacaactttttcatcatattaaaacttttctacacacataaacttttaacttttttatcacatcgttttaatttcaaccaaactttcaattttagtgtgaataacacaccagatcatacgagacgctatttgagatgcgtaccgccctaacaacatctcgcgttgcgccgcgcgcttctctcccactccactccactcgtgcatcggccatggctgacgcgatcggcggtggcgggaggcggcgccggctgagggtgttcttcctccccttcttcgcgaagggacacctgattcccatgaccgatctcgcgtgccgcatggcggcggcggggcccgaggagatggacgccaccatggtggtcacgccgggcaacgccgcgctcatcgccaccgcggtcacgcgcgccgccgcgaggggccaccccgtcggcgtgctctgctatcctttccccgacgtctggatggagagaggggtggagtgcctcggcgtggccgccgcgcacgacgcctggcgggtgtaccgcgccgtcgacctgtcgcagcccattcacgaggcgctccttcttgagcaccgcccgacgccatcgtcgccgacgtgcccttttggtgggccaccgacatcgccgccgagctcggcgttccgcgcctcacgttcagacccgtcggcgtcttcccgcagctcgccatgaacaacctcgtcacggtgcgcgccgagatcatccgggccggcgacgccgccccaccggtgccccgtgccgggcatgcc

SEQ ID NO: 3635 - DNA, 523 bp, Oryza sativa
tatagggcgaattcgagctcggtacccaacagttatctgaagaatgccaaccttaagcatatagatagatcgtcgtgagaacgttacaacgcaatcccctgccttaatgttagagaaagacccgagagtagtcttcagaggaaccaatggagatagcctctcataatattggacctgcatagagacatacagccagcaaatcggaatatttgacgacatgatgcgtgtatcagtactaacaccaaaataaacattagacagctcaacaaattctattgagaagaaacagtttctcgagttcacttggaatattatctgcaaatacaaaacatcagctaatcaccaacaaaagacagatatatatgacatcatgcctgcacattactttctcagatggaggtccagaagtagtgttactatccaggggtgcaatctaaattgttggacgggacctcaaattggtgtggctaaggataagttgagtaacagaggttacaggattgctgatgctatccaccaatga

SEQ ID NO: 3636 - DNA, 1797 bp, Oryza sativa
actgaagataattgatagaacatgaatgaattgcatacttaacaattaacccttggtatttcaactctaaaacttgcataattgatcaatggctggccggaaaccacaagcttttgtagtgtgatccatatgcaacgaagtgtcgagtaatgcaggctgcaacaaccctcaagttcttttttgcttcaaatagtttctattgctaattttgatagtattaacttcatgtatgaatggaagatttagagctccctgttttcttgattctgatgaccttctgtttgttgtgccatcattaattactgtaaatgatctatgcagtatgtcgacaagcttcttattgccaaagataccaatcaaattaccattgatatattggaggctgtaaggacgaatgatgtgagggcagcatatcgcattcttgtgttggctgatgtgagccctaacatgatatatgatgagttaaacaatgatgttcatcatgatccttcagtaacagatgggaagttatttgatccagcatcttgtgatgtaaaggatgattctgggaaaccagaaggttgtctacaaggctgttccctgttgcacattgcttgccaatatggccattctataatggcagagcttctgcttctttttggtgcggatattaataagcaagacttccatggacggacaccgttgcaccattgtgtccgaaggaaaaatgatgcacttaccaagcatctgctaaagaggtaggattgaatttctagcagtatggaatatagataattacagctatccttccactgttgccaagctgaagtatcgaactctttacataaaggctattttttttttgtttcattcagcataaaagtacagaatgagacactgaggcatatatgatatgttctggggtcctgacaatgtctttagtatcttatcaatatacccaaaattgtataaaatcaattggatgacttgttcgccaaacacttggattcatactagtcatctcatcccatgtctaaggtccactggtctatggaggtttgtctcattttcagtctcatcatacctatagcgcctatcaggtggcattcagttggttggcataccacttgtgctgtgagttgtgccttttcgagatcatcaatgatgcatttcaacagtttagtaggaacagagagggaaacagcaacaaaaaagcattttcctttcctcaggctattattacaatccctttaatcctgtgtttgtcctcccattttcctcaggacaacaaaaaaaaccaattagtcactgttaatttttgtttgactacatggataatgttaaatggatttctgttccataggggtgcaagaacaaccattaaagatggtggagggttgactgctttagagagaagaatggaacttggagcaataactgatgaagatttgttcattttatttgtaaggtatgatcaagattagtaaaattgcttttcacaatattatcttggcaattactagcaaatgccagtttttcatttccttttcaacgcttgaaaccttctcttgttttcaaaatatgatattgtcttcatgtctgagaaataaaagtacatctcatatgctaaatatttgatcaagcataccctaagtaaaactttttaggagatatcgatctttgcagtttcctgaaatttcatgaagtagcttgtttatgcctgtttcttgaagccttatgttatttctagtcatgaagaattttgttacttagtggtgtaataggaatacttgttaagaaaaagggtctcatttgggg

SEQ ID NO: 3637 - DNA, 537 bp, Oryza sativa
tcgaattatagagtgaccatgcctgcttgaaatatctcaaatgggcatccatcactgcacttattgattccaagaactcatacttcttctttgcttcaatatttgaaagtgcgtgcacctgaattccttacaaccaaggagaattattggcttggcaaaatcaataaaattagcaacactatataaaaaaatgttcatacatactaggttaaagcggcatcgttcgaaagctgacttggcattgtgtagatcctgcaaatttggaattagagatgttgtatagaaattaaataaatgatcacttacggaaaaaaaaacaagttgtccctgttcacctcctcaagtcctgtcactacttctgctctagtccctttccgtactgatacaaatttttcacgtgcctgacaagcaagatagcaacatatattcttatagggcaccacatgccaaaatgaagaaatatgcaaattgaaaactaggtaatcacatagctagagtgcaagatatcacctgatcataccccactgtagccctatc

SEQ ID NO: 3638 - DNA, 653 bp, Oryza sativa
taagatcggtatgaaggtggtcatgcagtgtgccattcgatatgaattcataaaccagcagtggcacctcagattcaagacaacatccaaaaatctttaccacattgcgggggataatttgtgataagataacaaccttgttgatgaattgatctatctcagtttgctcaacgatttttgattttttaatggccaccacacgctggtcagatagaatgcctttgtaaactgtgccatgtgctccacgtccaagaacacgagttccatcaaagttgttggttgcctcctctagttcttccaaggaaaatatcttcgttttgtttgtggcgctttcatttgagattagttgctccaagagtaggccttgatttttcttgaaatatgctctccgtattctcttttggatgcctttcctccacttattggcaagtatcattgcccccaacacgataactatggagccaagaccacaaccaattccaattgcaatacctgcatcaattcattttgtcataataaaatcattttgcatgttggctattacttcttacggtcttacctaaaagaagattgcgttgctttgctgatgtaacacacttctttttgattggatcaaactcttttctatgcgggcagcttgtgcatgtataatt

SEQ ID NO: 3639 - DNA, 628 bp, Oryza sativa
tcacacaactcacttgatggccccataccggacgcccgcacacacgccgtcgctgctatagcacctgccgccacccctccggcccccgctcgccgccgccacgaccgatttggcccccgttccccgcgtacatccgtaggggaatagaaaggaggatagaaagggagggaagggagataaagggaggaggaagaagggaaggagagaggatgacatgtgggcttcacatataagtgggtcctacaatattttttttggatgaaaaatgggtcccacatattttttttaattctactgccacataagtgccacatcaacgccacgtggaacgaagcccaagtcaacaccgccacgtacgcatcacgtcagcgaaaccgtccttcaaaaccatcgagggaatcaattgcaccggttttaatagtcgggggttgagatatccggtattgtggtttagggatagggatggcagttttgcccatgggttcgggtatccgcggatacccgacccaatgggcacgggcatgggtgtaaaattttacccgtgggcttgtccgcccaagacccgtagacatcgtgggcaacagccgggcttcattttttacctgtgggtaacccatgcctgacccga

SEQ ID NO: 3640 - DNA, 674 bp, Oryza sativa
gtggatcaagtcagagccgctcaagtaaatgatccggaaatagcagaattgaaaaagaacatgagagtcggaaaggctcgggatttccttgaggatgagcatggcacaatctggatggaagaaagattgtgcgtaccggacgacaaggaattgaaggatctgatactcaccgaagctcatcagacccagtactccattcatccaggcagcactaaaatgtatcaagacctcaaagaaaagttttggtgggtcagcatgaggagagaaatagctgaattcgtcgcactctgcgatgtttgccaacgagtgaaagcagagcaccaaagaccagcaggtttactccaacctctccaaatcccggaatggaaatgggaggagattggaatggactttatcacaggactgccccggacatcatcgggacatgattcaatctgggtagtcgtggatcgactcaccaaggtggctcactttataccagtacataccacctatacgggaaagagattggcagaattgtacctcgcaaggatcatgtgtttgcatggggtacccaagaagatagtctccgaccgaggtagtcagttcacctcaaagttctggcagaagctgcaggaagaaatggggacccgtttaaatttcagcacggcctatcacccgcaaactgatggtca

SEQ ID NO: 3641 - DNA, 582 bp, Oryza sativa
attttcaagcaaaaacatatttcaaagggaaaaattggaagtaacatcctaacctcctttacttccccatatgttccaaaaatctggcgaacttcttcattggaaactgagggatccaagttaaaaataaccagagttccctggtttaaatctttatctgatggattctcctacaaaatcaacatggcaaactgctaagtactttatggtaaagggactaagcatttgaaagtgaaccataacataataaaccttcgggatggagaaatgaatgtccaactttctcctcctcagaggcttgttctgcaatccacgcatcgcaccacgtgcagctcggatatcaaaataagatatcatcacaaaacctctatgtttcgttgcagtataaagtgttcggatatccccatattgctgaaatacaataatggatattgtaaagatcaactgagatacattataagagaagtgcagacataacactgactatgagttgattagacagcacataaagttgttcagttgcaaggtatacctactgataagtaacactaacaaatcaatctcagatggcaataattatat

SEQ ID NO: 3642 - DNA, 1926 bp, Oryza sativa
atcgccgtggttcgccccgccgttcacagccgccgtcggccgtccgttccggccggcgcccttcttcaaccttccgccggcccgtgtggcagccacgtaggcgccacgtcggcgccaactcggcaagaccgggtcaagccgaccccgatccgccgctcccctctgccccgctcgcgcgcgcggtccaccgcgagccgtgaggctgctcgtgggcccgccgcatccgcacccaccgcgagccgcgcgcgtgtaccgcgccccgctccaaaccctagcgccacgtcgcgtgctcctcgctcacggtgagccgagccgccgacaagcgggtcctactcgagaccacgccagatggacccggcccaccggctccctctctcctcccctcccgcgcgtgccttgggccgccttctcgggccggccggcccattaagctcggccgagccgcccctttctctcgggccgcgccctagccgcccgagggaagtctgtttcccctccctctttcttttctttttcgaaagggtttaattaaatcctttttcctttagaccaaaaatccaataatcttagaaattcaatatcttctcaaccgtatgtccgtttgactccgttcaacttccaaaattcctcaaatctcgagatctatttaatggcacgtttagaggtcaataatagggctttattttcgccgtttgttgagttgtcccgtttcgcgtgtagtttcggagcccgaagacccgtagtgcgaggatttcgaggatcaagctcaagatctcgagcaaggcaagtcacctttgatcatcttgcacctataatttaaatctaagtacttcttttccgcaaatattgcatgaataagtttaacacaagtatttcggccgcggcttgcgagatagcctgccagccccaatcctaattgctgcaattaccctccttgaattattgaacacttgaaccacctttgtcaactgttgtgcttcgatgcatgggcctacaggcacgtgcatcggaacacctcccctcaaatttaaaacatccaacgatgggtaaaacttggggttttacaaaagacttggaaaacccgacacctgggtcggtgcttgcgaactaaaatgaatttccaaaatcgcagaccaggggacgtaccgggagtacggtttcccgctcttgcacttaaggaccgtttccttagaatttcatccgaacataaagcaagtgcgaccacatgggtggaatgggacacccctggctgagtaactagctaatcgggggaaccatgatgccaagagacatgtggattcaacagggtggtgccggggagaacccccgggcttcctggcacagtatggtctgggactaacctgatgtcggtctgggacccctctcgttagcatatggtgaacctgtgtcggctttcgaaatgccttgtcatgaaagcctcaaggtctctagacgtggccgttctgcacgggctgggtgatccgggttagtaatgtcttgtgggtaaagtgtaccccctctgcagaggttattaaactgttcgaacagccgtgcccatggtcatgggcgaatgtgaggtgattcctagcatagtttgactactgcttgtgaaattactgttgtggaatgggttcgatgtttggaaaatctacggctgatgggatcagccaggcccgggtggccgtttgaaagccgttggccgggtgccaaccttgaatcaattcaaagattgatacattgcacatactccgaccggacgagacgcactgtctcatccgtgtcgtttgagaagcactcacttagttgtttcaaaaaggagtttaaataaaaccaattgcaaaaacaacagcctttcctttgaagcctgcattaaacacttaattcccatggcttgctgagtactcctgtactcacccttgctctata

SEQ ID NO: 3643 - DNA, 3254 bp, Oryza sativa
tttctttttcgatgtattggtttacacaatatgactcccttatatactccccatattcaggctcgtaggcccatgcaacacctaggctctcataggcctagcttacacagcctaggcgacaccaccccaggttatctacattcttcaagtgtgacaaggcagcgatcgacgctagggacgggaagggagcaacggaggcccgacatagagaagaggaggaggagtcagcggcgctccttgcttactcacagaggtggccagggcggcagagaagacgacgtagagaggtaatggtagttgcaaatacaaagatgattactaccatctgtaatggcttgaaaaaaattgacccattatagatgtccttaggtcatcaataatggctcttaaataaggagctgttatagataacatatgtaatgtggcaaattatcacattttttagtgtattcggacaaattcactatcttatagtgttcccagtaaagatcgtattttttaagtgtcctgtgacaaattttacccatgcagtaccacataattatgttgcaaacatattttttcgtgcataaaatagacaatggcgaacataaataaattcataaataaaacaagggcgtataaatacattgtgtctatatccgtgactagctaacttaaaagggaatcaatattaaaacattggtgcatatccagctaatccattctcttcaacatatggcgtgcattaacctagcgagtaagcgagattatatagatgtcaccatttagacacactctgttaattaacaacgctgctttggcatgtgcaacatcaacccctggcgtcgaagatcacgaatcctatctcacattagacattaatgtctcgtcgaaacattaattacatgtttcctgtttgaacataggagtagagtcctagctatataaagccggcatgctcgtgcacctgagcacctcgctagctagctaacgctgcttcacacctcggcgccgtcactcgatgggcagcactgtcagcagcgtcaggttgaatgttatatccaggataattgtcatcctgaaattcttttatgactaactaatgaaaagaaggaagtaactaatgcgcgcattaacacatgaattaatatggcgagctagtagaagttggtttaaatcaaaggtaaacttgatcaatgataagggggatacaaattttattatgaatagtgcaggtatatagacatatttatctgcatttatttcttaatggatgggttgtgcttgtttgaaaaactaaaatatggtggcagacacaacttatattaggataatttgtagacatggaaggcctaaatgtgtgcaatacacttatacttggccctaaacaaggaagctttaaatgtgtgcaatacacttatacttggccttagacatggaagccttatatgtgtgcaatacacttgatcgataagtactgtcttttaattttcataattttgtgcataatattcaaagaaatttcaggatttatcttttaagtatctagatttagaaaaacctatcacttttcaggaagggctctcacacacaacgatggcatcccatcttatgagtcattttacatagctattacgtattcagagatcatagggaggaagaaaagaggtccttccaagcagagaccacaaatcgatcatctaccttaagcctgtctgcccagagtgttgcatcctcaatacatttcactagcaatcgatacaaggatacagtttcatttcggaacactactccatgacgatgattccacagattccaaaagcaaaggaggtagaagaccttgtagtgtcttgctgggatttgcgcaggagggagtagggcagctagctgcttggtcgtcgagatagaaatttgaatgttgaggagctcccataattcagcagtgaaggggaaatgtaagcacagatgcgaagcagtttcagttgctgaattgcacagatcacacgaaggggactgcacaattttcttcttatgtaagttgctcttggtatgtagcctttctagagctaacagccaagtgaagaattgcactttcagaggcgctttgttattccaaataaacttccaatttgcacaaggctcaatatcattacatgcagcaagatagatttgtttcgacttcaggatgccacccccacctcgcttactcctaacatcttgatctagtgagctgatgtgtccttggaggagagtgcaaagctggaggaactgatcctctgccacagacgagaggcacgggacgaagtgattccgcaaatcttcagcaagaacctggaacaccgatgcatgtttattcggggagtgggtatagagaggatttaacttatatgccagaacgtcttctccacaccagcaatcatgccaaaaggaggtgtgtcggccatcgccaatctgaattgaggtgagatcctgcaagactgggagaagaagcttcgttgattcccagtgaggatctagctgtttctgttcgttgagattcggacttgcatgttccgcccatatccatttagaccaaggcaagtctgaagagtgaagatggtgcagccttttaacgagcagagcattgttctgtcggccaacatccttgataccaaggcctccaaattgctttggaatgcagattgaatcctaggccactaagcatctggctccaatgcagctatcctcccctgtccagagaaatgctcttctcatccaatctaagtcttcaatcgttccttttggaagcttgatggctggcatcgcacatgcaggtaagctgtcaaggatcaggtaagctgacatcccatctatttaaacaaccccaactagggtcagtccgatcacccaaagcccttgggcataaagctaagggcttattcggttcacaggatttccaaatcacaggaacaggaaaaacgtaggaatagtgtaggaatgcatgtgcaaaacaaaggattgcaacacaggaatttttactacactgagttaaacaaaagatgatagagtggatgttttcattcctatggaattagtacattttggaggattggcatagtgttcctatggaaaatttttctttgaatcctacaaaccaaatgcatgaatagtgattattccaaaggaattgagatttcctttaggaatccttcaaaacgaataaggcctaagttggctcctggcatccgctaccacggatgcttccaacaattgtatagcacaaaggctgcagg

SEQ ID NO: 3644 - DNA, 1193 bp, Oryza sativa
gcccggccgagagagaaaagcggggaacggagggggagaaagaaagctcgcgctatgccggtttagggaggaaaaagaatgggagcgggaggcgctgcctccggtttttggacggatgcgggcggcgcggctcgggccgcgtgctggcttgcggggcaaggcgcggcgcaggcggcgcatcgcggcagggcgcggggccggacggcgcaagcacgggcagcaggcggctgacgacggcgacaaccgcgcgggcgcacgggcgtgaagtaacggcgcccggggagcttgccggggatggaacggggaaagagtgcgggagaaccaaagagagagggagagctcggctcggcgtcggctcacaagcatgggcacgcgcacgcggcgcacgggcaaaacgaggggagaggttaggaagagagagagagatgggccgagaggaatcggcccaccgaacctgagggaggcaaaatagacttttgcggaggaatttgatttgggaaggatttggattcgggatttgaatttgacgatagatcggggattcgagatcagggattggcacggagactgacaacaagcaaagaaacagatttcgcaattagggttttaaatttaaattttcccgctaggcgccacgacggaacgggcgctacagtgtgggacccaccccttggagatcgatttcctcggtctaggtctcggtctacaggggatgcggatgccggccaccccgacggcagcagggatattgtttgatggtgcttccacgctagcgccggctgaggatgagtttatggcaaacgtgggcgacatctcgttcgccggtagcaactagtagcaaaaacaaataagtgatttatcgtttctagaccgatcctgaatcaaggatatactcctttctgtcaaaaaaaaaatcaaccttgctagtattggatgggacataaactatacaacgagcttgtctagattcgttgccctaggtcatccaatattagatcttttattcaatattagatcttttattggacggagggagtctttcatagtatcatttcgtttatcatttcaattcgtttcatttcgtgtttcaatcatagctagctagaatgctagaaaaattgtcatagttcattttcatgttttatcagaaccgaggctggcttgcatgccagcagagtatgtctcgtccattt

SEQ ID NO: 3645 - DNA, 9008 bp, Oryza sativa
  unsure (1)..(9008): unsure at all n locations
tcttcgcgcggttagagattaaaaaaacacctgaaacatatatgctaatcccaatctaaattgctctgcatcggtacgtacagataatatatcatcgagcaccaagctagcctccatggatgcatgtatcacactccatccatccaattcttttgttggttagtttaaagttgaactagccaatatcaaacgttataggaaatggggtagctatagtatatctatcacagaatatattaatatatgtgcatacagttacacgttataaatttatgtgtgtatatatcaacgcgatagtacatattttttaatgatggaaaaatttatattctcagtccctattatcacatagctaataggttttctactgaatagaaaagaaaaattaagtgcaatggggaaaaaccccccaggtacccaaacaaaaaaaaaaggactagctaaaaggttaaaaggcggaccacattattctaacaaagtaagccctataaatactaggcttatccatacagttgaataagtactatccttattgtctacaaaatacaagaatataacatcaatgtgcataatatcctatgaaagaatcactaaattggaacacctcattattgaaacccgcccatcactgtcagattctctagaacgaacactaataatactatgaacagcgggatatataggaaatgagtatcactgggcagtcttgaatgtcgaaactacagtgatactcaaataacaactatctttagaaaaaaataacttttccatataaagggcaacattttagaaaaaaaaattcatatgaaggcagatgaagataaaaattcatataaacgttgtagcgctctactccctccgtcccaaaataaactatgaggttgatttatttaggacggagggactatgatatctataactttgtaggagactattttttcatttgagatcatttatctagctaaatatgtgtaaaaagttctcatgtctatttggacaaaatgattttttgaatttgtaaaaacttcagatttagacaaactttgtatcaaagttgtagagctcgacaagatatacaactttgtagtaaaaaaactatttaattcgaagtaatctaaaagagatttactccggtcgaacaaaaagtatctcgagatatcggtacctcacggtattaaattgttccgatcattagatctagctaggcaggatggacattgttaaatccaacgattggaaacgatttgatactgtaaggtaccgatacctcgaggtattttttgttggaccggagcaaatctcaatctaaaatgtcaagtacgaatattacttttttggactaaaagagttcaaagaataacctatgctattcaggcacgaagtgccctataggtgagatgctatataccacacaccttcatattttgtgcgaaaaatcactgatttccaacgcacgctaacagggttttctgctatagtgtatcatatatcaaatagaagcgtcagttgtaacttgcatagagttaactaacttttgttttcaaaaaaaattatttctataatgccaaatatattagacactcccgtcatccggttactaaatatatttttggcattttaaggtgagagtattgaaaggaaaaaacacatcatgcaccgggcgaagagagcaacatgacattcaaagaggtgccggtgtctctttcctattgcaaaagcaaacattattgcttatcacctcctatatattacattttgcgatcctatatatccattgtcagcttccattatctaaaaaaaataaatccattcttagctaggatgcgtgcggcagtatatatgcagggcaaatgtattgcttaatcgatcgtatacattatggaagataagaacaaagaacacatctgcactcgttagagggatcaaaaacaaaatccagcaactagctcgtttatttaattttctgtgtacaaaactttttcgatcggttcagttttcttatgcatatattatatatatgttatagcttggtcgaagagattctttcaacatccatttcttcaccccaattctttgttaaagactgttggaacagtcctgctaactcctaacagaccggcaactaacaagggcttgctgacaaaaaatcaattagttaccctttgataaggagtatatatttcaagtattggagccaattctgcatctgattcatatacagcgagtactgttccatagaacactctgtgtgtgtgtgtgtgtgtgtgtacggttaattagaacactgcatgttaaagttgtttcatcgcctgagacaatcaaatcctcaggtaatatatgggaccatgttggggtatgctttgaaagtatttttttttaaaaaagaaaaaagatgtagtgccaagcttggaaggatgaaaccgaaggaaatcaaagtctcaagcagtaatgttcaagtgcaagtatattatatgcacaggaattcaaagctgaactacatatatacattaattttctagttttctactaataattttcttaatgaaaccacagcctttagtacccttgatcatgcagctatcgttcatagaggtaaaacaacataccatttcacatcttattgtcgatggcccttaattttgagctgatcaccataatctgcagtacaagtaggttagcacaatagttgacagtctcatttgatgcagtgtacgagacaaagtttctctctccctctctctctctctctctctctctctctctctctctctntaaagtaaaactggatgcacagtaagttattcttgcaactttactgcatatggtactagctaattcgtgttgtgcatcatataggtagaggatatatatgcaatagagtagtttatgagctcgctaatttagctagaaggactacgcatagtgttgtttggagggtccaagtccatgaacttatccttcgggattgtaagttatctactccctccatttctaaatatttgacactgttgatttttaagcacatgtttgaccgttcgttttattcaaaaacttttgtgaaatatataaaactatatgcatacataaaagtatatttaacaattaatcaaatgataggaaaaaattaataattacttaaattttttgaataagacgaacggttaaatatattttaaaaagtcaacggcgtcaaatatttagaaaaggagggtttatttcactaatatattgcaccatttcctcgcagaaaaaaaaatcatgttgtgcttagatatgtgcctgtgcctcaacgcccatgaactgtagctatcaagggttcatcaggctaggactgaaatttttgaaattttggaattcaattacaaatgaataattattcgaacaagttcgaaattccaactagaaattatttttatgtattgtatttgctcattttagatcgacaaggttatgtcaccattgtagtcatgtttatatattgacacgtagatctaatggtaggaagaaatcaagaaaaaaaaaagggaggaaatattttggtcagtgggtaaacttttctgaatgatatatggatatctgaaccaatttttttattgaatcaacttctagaccaaattatttcaagggatacatgcaacaagaagaattaaagctcggttctgatacaatacaacaccaaanaaactaacgaaatcgaaactgagctagcccccattgaaacgggaaaagtatactagctaattaaacttaaaccaaatcaaaatattcagaacacatgcatgtccctttttattcaagctttacctctagaaactgaatggcgctttgttttgctactggctcgctagttgctcccggcgaacgagccgccgtcgacgtcttcctccgcctgatcccccaccgactcctccccgtcgtcatcagccgccgcgagcacaaccgccggcgcaggcacaggcgcattcgcggaagcagcgacgtcgccagacgatatccccgccgccgccgccgccgccgccggcggagcgcccggcaaatccagcatccccgccccctgctggacaccgagaccgagaccgaggaaatcgatctccgcggggtgggtcccacgcaggcggtgcgcagcccagaacgcgtggttgggggacagcgccgccaccatcatgccacggcggcgccgccgccgccggtcgcggcggatcctcctccgcgcctccctgctgtcgcggaacgccgccgcgcggagcacggcgaggcgcgcccgcggcgccagcccgccgcgcaccatgcccctgacggccgcgcggtagtgcctcctcaggtgggagcggaagcggccccgctgcggcccttccgggcagtaggggcagcagaacctgcgctccggcgccggcggcggcggcgcgagcgcccagaacggcgggtggtcgttggacgaccagacgctgtcaacggtgctccccatcgcgcgagcgagtgtgacggcggcgaggtggtgagcttgagctggtgagggtgcatgaagacattcccgttttatatctaggtcaccgcgcttaaacgggaaagagggtgaatgtatcagcgagacggcgcataaatgctcctgatctcttccatttcaaggtgcacggtcgaacattgatagctgctcagcctgcagtcgaacattgcgtgcatctgacacgcacggccggcgtgggtgacggcggcttcgcagcggcgggcggcgcgcgacacatgcagcttcgacttcggggtcgcagcgcgtctaacgacaagtcaatgcatggcaacgggagtaccggagtagagactgccatgcgacaaacaaaactaacagtacgtacgtatgccatgcgactatgcgagacatggtctgatcgattgatatgagatttaccgttgcatggctcatccactagcttccgatagttggccagaagatatacaaacgctacgatttgggcttagattggttactctggtaggagaggaccgagcgtagcattgagcgtgtatggctcgctcgctggtctacgataacgcgagcaacaggcggtcaattcgatcccaggatcgtgtcatccggccgccggccccctcacttcctcaaaaggagtaaggagtttacatggagtatttttgtctaattaacggtattttttcagattttcgaattagttactttttaagtttctttaaaaaatcaaataaatcaatttttaagtttgtaatggctaatattcaattaatcatgtactaatgtgtatcctcattttgtataccatggaaaagctgagccgatcctcttccaacgaagcctaagacttgttcggttaatcccgaagagagagattgaggggaggataacaccacagcataacagatgtgaaatttgaggacttttacggtagaatatactagtagtatatatgggggtgaaaatgggtcgggttgggtcggatcccacccttcccatatgctaacacatattttacaatcggaatcaggtcagacacggatagtgccaaatacatatacaaactcggatattgtcgggcaaaaatacgaaacgaatacgtaccaaaatggatacgtacactatcggttacaaatacttattcggatatcaagtctaagcaacaatcatatatatcacatagacaataaccattcagcaattccatatatccataatacgattatatatgaccttaggaaataaatagggtgcaacacctcgcaattgaaaattatttcatatatgacatacatttaagaatattaggtcgttaaacacgatatatctcacagttgagtcacaatgccaatatatcaccccatacaagctatcggtaggcatcattcataggaccacagaggcatagactaatagatatcatttaaattatcaccaatagactaataggtactacgttcccgaacctgatctcatatccgccaaaaaagacctgtattcgacccgatatctatgaaaagtcccagatacccgaatttgtcctgaagtaatatcgtcgggccgagcgggcggaaaatacctgccccattttcacccctaagtatatattgatagtataaataaataagattgcgttgggactctctcacaaaatagaaaatgatctttagttatttcatgttagatcttaactccgattgtaatccaaatattgtttgtgggtcagattggattattgacctgctacgtttgaatagatggcacaactaaatcctcctgatcggatttatggattcatgaaacacataaaaacattaatccgtactggatagctagagtgggagaaagtatctaacataaagaaagaccattttaacccccccccccccccaaaaaaaaaaaattaattttcactgcagtcaatttaagtcgtgggtaggcaaatcaatgtacgcccttgattgtttataccagtagtatatggagtactaccaatatattgtaccgtaaaagttctctaaaatttatcctgtccatatccccttcaatcctcttaaggggagaataaccttaaaagacctaaagaatttgatttggtttgttaatatttgagaaatttttgaattgcattagacgaaactgagtaatacggtttcgattagtgtgtcaatttgtaaacttcttctccacgagactgtaaatgtaagcaacactatcattgggtaattctagcaccagtgatcgatcgagacaaccatgctacgttcggtcctctcctaccagagtaaccaatctaatcccaatcccagcgttgtatatcttcggctcgcctagtcacatggcacacgcgctgttagatttgtttgcccgatccccttcttcctctagctagctagtctactcccattgccatgaacatgtcgttagacacactgcgaccacgcagtcgaagctgtgtcgcacgccggccgccgctgcgaagccgtcatccacgccggccgtgcgtgacaaaagcacgtaatgttcgacatgctgcaacagctagcaatgcttattaccaggtgcactatgaatggaagatcaggaatacttgcattaatgcgtcgtcatcgaaacatttaccttcttccgcgctggcgccggctgatgacggggtggattcggaggcggaggcagacatcaacgatcgcttgtccgccgagagcaactagatcaccttgttgtcccaatatagtacactccccgcaacgaaaaaaaaaaaagtggttagtacacaatcaccatacatattagttaacgggtctccacataaatgatacatatagtgtgtgtatatataaaaggagacaagtggacaaataaattgacatgcagcaaacaaaagataaacataatgaaagtggaagtcaaaagattaaagatctagcattatgccacatccagcatataagtcataggcaacaaaagtagttgctacacaattatatctaatgtgtcttcacattaatgggacgggacggggtagggtgattctagttttgtggttgtttggttggagcgatacacggatgtgtcccattagatcggagaccagctcgtccccctaaatcaagcagcaattcatccctcttacatctctctcacgtgcattcttcctccttacggcacacagcacaaggcttgtgggaggaactagcatcgtggcaaaacctgatgagcagtggccggtgtttgcaccagtttgtgggaggagacatgcgacgttgtgcagcaaagctcgtggcagcctctcgttaatataactagctcttacataaatatgtgagggacattttctattgtcttgttttctaacttttttgcgtgttgcattgaagctaacttccatgttaacattcaatcgaccttgtttattttgtgtttaaaaaccaaaactagcttgcatactaccatacaagggctgagttactcactgtgaagggtgggttggctagcccagctacaacccattcactgcacgccactagaaccctgtcctagtactaggctacccacattagtcatcactcaccagcccataagcaactccaggccagtgattagatatggggcaatcgaccgttgtttctcttccaatcttgtgactacatgccccttcgtcatgacccataactgatcatctttattacttatcgctcaacgctcgtaccctttgccgcgctggtgactatgccagcaccagtctgcatgtgttggcattgtgccatttgtggttccacggtgcacggtcgtgcttccaccactatgcgctataacctctagccagcaactggctagagctaggtgactccataactatattctattatttatcttggatattctcttgtgccttcatttattggttgtactttattttttatacgattacattatgtgttatgttcggttattttttttattgagcatgtgcaatccatcgaaatgtgaccgccgctgctactatgtataacattgctcctttatccattctcaaatataaaaactttgcttgtcttaaccaaattatattcatattttgcttgatttgatcgagactaattatattttcagctcctgctgttagatttaattgggtaattaatccatttaaatcaattaaatcaaataaattccaaggctcattatgctaggaattcatgtgaattcattcttctatgggatatcaatgggatgaagagttttgagaattaatccatttgattaaggaattggtaacttatatcaattagtcctaattgatggatggttgatggttgtgtagtggaggatggttcatggctagttgatgacaattagttgctctattcctcttcctattccattggtaacttacatcaattactcttaattgattgttggttgatggttgtgtagtggaggatggttcatggctagttgatgacaattagttgctccattcctctttctattccatgactcttactcttcatcttccattcct

SEQ ID NO: 3646 - DNA, 607 bp, Oryza sativa
atggcggcgccgttgaatcgatcttggtgcaggcctttcatggcttcgggttcgaccgtcgaggtcctccagctcctccattgcttgtctgttgcctctaaaaagctcaccaacggctaccacggggcctgtttccacctctgtgcccatcactgcggggcccgcctgcgcccaacccgtcgccggccgccctttcctgcctcgcccctccagctgacccacacgaggggtgcggggaggccggcgagctcgtgccgctctgagcccgtgtgtcgccacctggggaagctaagatccccgggagccaccgtcgccagccgcaccaccctttagccgcgcgcgccaccgtgggcgccaaccctagtgccatgcctgtgtgaaagcagagagcgagagggaggaaggaaggagaaacatagaaagtgaagaggggaaagagagtaggtgctgacatggacacaccgacatgtggggtccacgtgggttccatgctggctcagctaccatatcggataaaaccgggatcaaacccatagaaggatctaaagttgacggttttgtaagttaagggatgtcgtatatctagttttgtggttaggacacaatt

SEQ ID NO: 3647 - DNA, 6034 bp, Oryza sativa
ttcattgttcagtgccatatacaataatatgcaatcaagaaaaatctaaaatttatgcaaagcaaacctgaagacaatatttttttatcaagagggcagaatcattttggaggagtgataaccatggtgcagaaattttactaggaagcaattggagaatgcactcatactaatctgtgcattgtcccattctcaaaagagaaaaaaaaatcacttgagcagttatttgtactacattgagttgagctacatcaaaactcacttatttcattcctaactcctgttgataaagaaacaaccacgctaaagtataactgagctatgaccttactttacaaatcacatcatttagaatattcaaaaggaataaatatataagtagaaatcactgatcaatctcagggaaaaaaaatcatgagattaacttattcggtagtaccactgagaaatataaattatttagtcgtagcactgaaaaacaggcaaagtctaggtgtcccttccagcaaagtgcatgggttcgtttctgtatattgagaaaaattactactactcgatgagttcctttaataataagctactaacatgcatcaacagtttagcttgccctggcaaggtataataaacatagcaatgacacttcagctttgcccgactcatcacatctggacataacaacattgcaggctcactggagaatactaatgcacacaacaattaacacctaacaaacttaattaatcggacacaggagacaggagtagcaccgtaccttcacgaacaaatcaagcatcatatctgagagggatttgcaggactaatcatcagatctggaaggtatttgcagccataagaggaggggcgagcaggggacgcgttgttggccggtgctgctcacccgtcgtcgctgcgacgaggcactgcggaggcagtcggcgcttgggcaaggaaggggcagcaggcgccagaggagaagggaaacagggtacggtcgccctcacccgagacctgacgcagggacgagccggcgaggagggggcggcgaggagggaaggggtagcgcctggagtgggaggcgccgccggctcatcttgaggccggatttggcaccgccgaagctggggactgccggatctgtagcaccagcggcggcggcggctgcggcggcggatgttggctatgcggcggtggtggcggcggaggatctcggtgacgcacttgtggaggggagacggcaaacttcgtgggctatcgccgaaaaaaaaaagaccagtggcggctggggtagggaagtggggaaaagagaaggggatttagggtttagttgtggcttaattatagagagcagctacaaaacggaatcttgttgtaacgggatagtttaagtggctcctccccgctttcacgtgcactccatcttgatacctggtaccttgggtatcagttggtacctggtacttggaacttttggtaccgactgatacctttggtacctgatacctgatatcggctgcctttggtaccgactgatatctttggtacctaatacctggtaccggctgccggctggtacatgttatctagtaccgtgatacctagtacctgatacctggtagcctggaggagaaggaggagagagagagggagaaaggagaaggcagccgcgtggtggagcaggacgaggaggcggtggcgaatccggtggtcggcgaggcggagtgtggaggaggaggcagctgtgaatccgatggtcgtcgaggtggggcagcctatgagaagaccaacgagggcggggagccagagcagcgcggtaagggaggggagcttgagggcgacccttgccgaggccgcgccgtcgtcgtcctcctcggcggctagggtcctgagccgacaggagaagctcccacccaacaacgccttccccggcgccagcggcggcctccacgtcccgctcctactctccctcttgttcaccgcacccatcgccgagctcctcgtcgtcgcctcgacccctgcagtggtggagcgacggcaacagggacaacggcgggcaccggctccgacgagcgttctccacgcccaacgcgccaccccacatagctagccaccatcgtcgtcttcgtgctggtagtcacagagagataagggagaaggaaggggaagagacaaagaagaggataaggatgctagatatttagtggtagtagttgtcacgttgcaacggaagcccggggtgtaggttttctgttaattataacctatatttttttgctgacacatatttggttagtactactataaataccgacagatactttgacctcaaaatatatggaattactgacacattttatgtctcgtcaggcagtattgccgacaaatagtgtgtcataacctttagcgacagatagattctcggtgattttggtgacagatgtctgttggtaatttagtgtcatggtgtagtgtccgtcctcgcggcggaacggtggcggcggcaggccgcgggcagagcaaaggggcgggcagagcggcggccacctcgccaaggacatcgagcgcacctctgacgcgagaggagcggcggcgcgcaccagcctacgggagggagggagaggagcggcggtgcgcttgggtcggcggccggcgggagggagagagaggagcgacggcgcgcggggactggcggggggagcggcgcgcggctgccggagggagagggtcggcggcgcacatgagtcgacgggtgggagggagaggagcagcggcgtgcgccgcgccggtggagagggcagccaacaggagggtggaagaggagcagcggttcaccggcctctgcgcccttgtcactccgcccaccgcctgctgccgctccattttaccccgctgacgctcaactccgcttcctcccgccgcccaccattgctccgtccaccgccggccgctgcgccacttcgctccatcgccgctccgctcatcgtcccctcggctccgccgctcgcccttctttcctggcagtgtagggggagagagatgggggatagagagaagagggaggctgacatgtgggaccacatgggccccacctttttttaatttaatttttatgtagctgacatataggtcccacgatttttattatttttcgggataaaattgccacgtaaacgccacgtcattgccacatgggacgaagacctagtcaaaggagccacataggcaccacgtcggccaaaaccaccctccataatgccaagggacctcgtttgccaggtttcggaagttgggagaccggtcgtacccggttttgtggtaaagggacgaaaatcggactgaccgacaaatagagagacctaaagtgaacttatttctataaacaatgacgagtttcgaattccagcccatcgtcacgattacgccgcagcctgcaagcccatcgttacctagccagaactacagcccacttgcagtattggtccatgcccctttgcatgcaaggtggtccttctgggctcacggtccgtgtacttcaggtttcggcccaccataaccgtgcacgtttccggcttccccttcttgacgctggcaaaggaaagtatgggacctttgaattggaggaaaaatatagaaattttggaggattttaattctatagaaaaatttccattgaaaccctttgaaattcctatgaaatggacaatcctatatagattttggagaaaatttagcaagagcttcaacctcttggtaactttcctttgagtctatctctctcatctaattcctgcgtttttccttcggttcaatcaaacggtcattcctatattttttctgtgttttgcaatcttttgttttgcacttacattctgtcgacgtttgatgtcgcgattccggtatttgcatggtatggggatcgttggtactagggtatacgcaagactgaggtaaaagatatggagacagggatttttatacaggttcgggcccctgaattgtcaggtaataaccctacatcatgttggccgaagccgatattgctcttattcaccataatcacaccagtacaatatttggggtagcctatctaactgttgtcgacatggcggtctgaagttatgactcgtaatcgacaacagggtagtcttcctcctcgagttcgtgcccggtgagatcagagatagcgctttcatatctcctgacagtatccgaagacaccgtaggggactagccgtgcctatctttgaagtcgatatccggcgtcttgtcttggcgtatgttggcttctatattaatcttctgtcttgatctattgttccgtctatgttgactgtggtgggtgtgttgatcgtcccctctccttctagggggcattgtatttatacttataggtgtccccttgtccaagtagaactagggaaaccaatatggatacaatccgagtagtccttgtcgttttcatgtagaactctggttgtcttcccttatccagaactcctcctatatccgtaggtcgtttccgtataagatatggtatgtggtgggtcctaacgagatttagtcgactactattaggtatacgtggtattcataaccctgacacattcctattaaaatcttacgtttttttctatttctacattttctcaatcctacgatttaaatgaccctacaggttttgccaactttgcagctttgctatcgaatcgagataccgatggcgcatggatgcaatcgtgacacgcaatacgtgctaattcatggcgctttctcctgcaagctcgcatcgtaccttgcgtcgttggcacgtacagggaacgcgtgcattgtcgaataagacattatctatgtagatagacgtctatttagatttatagaattagaaaactatattcatttgtgttagttgggaaccttcttctctttaaaaaatggagcagcttattaacacatgattaattaaatattagctaaaactaacataaaaaatagattaatatgtctttcttaaaacaacattcggtatagcctgaaaaggagcgatctattgcacagtgtcagcgagagcgaaggatatgctcatactccctccgattctatattaattgacattttgaacaaagttaaagtcaaacttttataactttgaccatcaataactttaaaaatatttagtttaaaggaactagaacaacatatatagatttgtcttttaaagtactgtaataaaagtaaatatatatttatttaatatatatattataatagaaaaataagatcaaagatgtatcttatagaccgtgtcaatgtctaaaacgtcaattaaaatggaaccggagggagtatgccgctgttgattattgtacgaagtggccatcgattggcgtccggacgatgagcagttaatgctcacgtttattatatggtcatatatcgtgatcgccaattcgtcatgagtcgatcacgacgttgacagcgctaattccaaattaaattgagctggagttaagtctgattgatcggaacagtgctccaaatctctctcgccagcgcgtctccaaagcatcatcagatattctgattacgcatctctacggtaaagtttgttgcttgaagaaaggactacacgggatcattctgctccgtcagaatcgattttcatgtccaatatttgaccgttcgtcttatttgaaaaaattataaaaaaaattaaaaagacaagtcacgtataaagtattaattatgttttatcatctaacatcaataaaaatactaattacaaaaaaaattatataagacggacagtcaaacgttgaacacgaaaacttagggtttgactttttttagggagtacacgtgatcttatcactcgctcggtacatcagaaagaggcacccaacaaacacacacccctcgagacagaacaaaaacatctcaggcttgggacagagacaagaaatgctgctgcctgcatgattccagcctactccgtactccgtagtgtcctactagcgttcccatcacatgacactggccg

SEQ ID NO: 3648 - DNA, 2608 bp, Oryza sativa
ttgtctcaacgggacccacacttgtgctagaggagagaggggagaggggcgaggcagctgacggggagagaggagcggcggcgccgcccgacgccaactcggggaccgccgctgcttcggggaaggagctcgacggcactgggccacccgctcccccgctcccgcgccaccgacgcgttcgggagaggagaggaggggtggacgacgtggagaggagggcgccaccgtggagctcgtcgcagcccccgcttgcgcgacagcctccgcttgctgccggctgcgccactggagcttgccagccacacgccccccgatccgcgacgacctccgctcgctgccggccatgccagccctcgattcgcggtggccggaagaggaggacgggagggcggctccggccacgccgcgccctcgatctacttgtcggagagggagggggagatgaggttgaggtcggcgagaggggagaggcggtgatggccgcgaggtcgccaaccaccgctcaacctggtgccggccgccgccgctctctgcagcgtttgctctgccagtggcccggtggggaaaggagtagaggagagagagagagagggggagtggaggggagatgaaaagtgaaaagttggtaccggtggtattcatactacaaatactgcactgtggagcatgtagcttatatcctttttggtctatgtggcatgtgaagaacgccaaaatttagtggcgcactgtgaatggcctgaacatgctactcctacatatgctagccaccgttggccggaaagagattgatggatatgccggccgctgctgttgctgatgcagccatgcaggcgtgctctccctacgttttcagcaaactctgtgaccagaaaagatgggaatattgtcctatttcgagagatcaattatttcttgctagtaccaccaatggtcagtacatatctaatttggtaggagctgcaatttgcgagacagttgagggcttgaggcccgaaagcaacactgggtgcgagtgactggccctctgtcctcacaggtcaagcattggtttccaacatcgcagaggacacactctgttttagccacacaaacgagatggctttggatttgcgtccggtgctcgccacaacttccacggcccaaagataggaccacaccaaatacaccatggcaatatagctaaccctgtagtactacatgcaaatgcagaactacaaccatgtatatatgtccatatcagatccaaacgttctcttcagcaaaacagaacacgtagctagcatgctgattctgcaatgctgtacaccacacgctttttgtgtggatgggctcttccgtttccaagccggacaatcttgggaaagaaagcaagcaagaaaacatcccagcaacaaatgtaagcggagacggaaattcatcagttcccaaattcagagaccaacccaactactacgcaaaaaagttgtcattccattcgacgtttagttattccgccatgaacaccacaagcgttttacaacagcaagcaacggacggagccaactcaatgacagacaaaccgcacaagacacgtcgtccacacggacgccgaccatgacaacacctaaaccgaacaatggcggagggaaaaaaacgatggaaataacacgacagggaccaaggctgcgacaccggagctcagcagctgacacatacatagactacaaatccacaggcatgacacacgcctgatccgcctactttgcacttgatggcaactctagcaatggcactgcaatagccttcctctgtgcccaagtgccctttcctatttaaagagactaaccatagatagatgcatggatagatagacgattgttcattgggttgatggaatggatggatacttgctacgacgatttccgaagacactatcttctttcccttggaatcttcttcttcaaatttggttgctggttggcttttggtgtgggaatccgatttcacagcagcagcagttaaaacttgttgttgtaccagaagacgcccttgttgtcctcaggctcgacgtaaatgcactccttggcctcgcgccatgtcgccttggcgacgggcgtcgggtcgaactggtagtactcgccgaggatggggcggatcgccttagtggcctccatggcgtggtagtgcggcatggtggaaaaaaggtggtgcgcgacgtgcgtgtccgtgatgttgtggaacaccttgttgaggatgccgtagtcgcggtccacggtggccagcgcgccgcggagccagtcccactcgctcgagtcgtagtgcggcagcgccgggtgggtgtgctgcaggtaggtgatgagcaccagccacgcgttcacgatcagcagcggcacgccgtagacgcgcaccacccaccagaacccgaacgccgacgacagcttgaacagggcgagccccgcggacacgacgccgacgtcggagatgaagatctggacgcgctcccggtcgttgtagatcgggccgtaggggtcgaagtggcacgcgaagcgcgggtacgggcggccggacacgttgaacgccaggtacagcggccaccccagggtgagctgcacgaaaatgtgcacca

SEQ ID NO: 3649 - DNA, 808 bp, Oryza sativa
tcccatcccgacgagtgtgtgcacacgcgttgggagagtaggcctccgaaaccacgcgttgctgcgacgtttgcacagacgggcgggcgatcaggtttttggggagcgcaaggcgcgactactcactgttcgtcaacatctacttcatcttcaccaacatgtcgaacactggagacaaggagaaggagactcccgtcaacaccaacggaggcaatactgcctcaaactccagcggaggaccattcttggggtataaccttattacattatttcaattagaagttttactgttaatgttcatcgcaatgtcaacattgtgtcattatgtgattgttgatgcttattcaacgttaagcatgctcatgttgattacattcaccactatcactggatcaaatcctattgtaaatatcatgtttattatcttgttattttggattaaaatatgccgaattatgaccaaatttccaacacctgcttcttttttcttcggctcaccgactcaccaccctcaccccttgcctccaaaacactggattgctgcccacccttgaaccgtatgaagtgatgaagatcagctaaagtagtttccttcaaggtttaccaaaccgtttaggatagagttaccaccaacccactgttatatagtttggggttacggccaccccacggtttgacagttaccatgaggtataccttggtttcaaaaactaaaaccacacatggtatcgcgtgataaccacacagttttgtagccctagtttcctcccaattggtgtattaatagccattgcattgagaaacactg

SEQ ID NO: 3650 - DNA, 5360 bp, Oryza sativa
acgcgcgtagctcgggcgtgcagtcgaggatgaccttgtagcatccggcctccttggcgatctccacgaggcgacgcacgacgcggagcccgagcccgcggccgcgcgcggcggcgtcgaccacgacgtcctccacgtgccccaccttcccgccgccgcgcaggaacttgcgctccacgaagaggcaccccgtggcgaggatccgactctccggggcggcggggtcctcggccacgaggatgacgtggtcgtcgccgagggccgcgaggtcggcgaagcacgcggcgaactcggacgcggtgaggtccgggcaggcggagagctgcgagaggagggccacgaatcccttctcgtggtctgtcgcctccaggcgacggatttggacggaacagccggtctccgcgacggcggcggcggtggagggttccggcgaggtggatgccatttgagatcgggagcttcttgggctttggccttcgcaactcacaagtgacagtccgtactagaacgggccatgcgggctggtggattccactgaaacaaacttgctagttctaacatgttcacacaatattcagggcccaattgaatcacatgaataaaaaaacagaataatagggaaaattagaattttggcatgaatacaagtttaaggattaaggacccctttcaaacatatgattgaaaaaaataaatgaatagaaaaaaaatagaggaatatgataagaattcacgtgtaaaatagaggaatataaaatcatagaaaatgtatatgaatatgtgtttgaatggggtataaaaaaacacaagaatatttttacttaagaacttggcccactttccatttctaataactaacacaaattatatccattaattgcttgttctcctgcagtgaagaaagagattaggagcttgattgcctcgagcctacgcaaagcaagtgaaaaatgagctcagactggatggaaagtttcatgtgtttctcccatagaatcagcaatgaaggaatatttccttcagttttcctatgacctattcctacaaatcaaaggctgctacagtgaatgaatccataggaactcacatcttctgtttttccttcgttgctcctttgtttcaaaagagctctaaaacagatgattgtaaaatacaggaaaacgtaggaataaccgttttattaggccgcaagaaaaacaccagaatttgagaagagataaaagactcaaaggatttttttttccatgagattctacctcatgataaaaatgtcctctaaaatttgcatgggaataggcatttcataggaattttataggattttataggattcattcctttgatttaaaaggctatataggaaaaattcctgtaggaatgaaatcctctaaaattcctatgaatttcctttgaatcaaggggggtctcatactttttcacagctgtggctttctctcaggattagaatcttctacaaatggtttagatttacgcttgtattttaagaagctgtagttatagaatacaggaaatgaactataactacgaaatgaaaaacctaactttttaagatttttataggctagctaccaataagttatttcttgaatcctaagttttctaaataggacaaaccattactccccttgatacaatgtttggtcgggttaatatttagatctctgtgaaagattacgatttagattagcgttgtaactttttgtttttcgccgggccgcgttgtaactttgataagtgcagaaaacatttacttctgcagactgataagtcataataccttgtgccatgagcccatgatatacgattatatgtggaattccagtaaaagagtccaagttaatttctagaatggttaaatgatttgttacagtagcttgaaaagaagatacaggtcaaaagattttgcatgttcaaggaaaaagggggtgaaatgatctagatattgcatacccctccgtagttggctacatcacatgtcccattcgttcattcagtcaactgaaaataaagttaggattatacgagacatacacctactccaatacaacaaaataccgaagactaattaatacatggtcctccacaataattagcagcatttctcttaacctctgcttgatgcaactgtggtgcacttttagttcgttcaacggagcattattattggtcaatagtgaatggatcgatatgcgaaacttgaacggcaatttacatcgtttctggatatgttttctagcttgtacgaagtggtcactggacaaatttacaactatctgcatgtttcattttcatgacatcaaactgatttccgtttccctaaaccatatattcatatcactactcactgattacagattagagaggttaataattgtatattcctattcgcccccagacgacgttactgcatgacagcacgctacaaccattttcttttcgtctgttcggcagtgacgtcaacgaatccacgtggacctgtaaatgaaccattttgattctgaactgttctgagaagaagattagattcaatactgcgatatcccaatgagaacgtcagccatgatagtgaggacttgacgaatgggaatctctgaacacaaagtgcatcgcccaagtctaaactggaatatacaagtcaatagaagatggttggcaatggagaacagaaacttttcctagagctgctgggatatactatacaaaccatgaacatatcagatgccatgaacatgaaagggtatctctattatcatgtaatagggtggtactattgtattcactaattagctcggctagctgctgaagattcggtttgtgtttttgttgataaacatgttataaatgcatgcgctctcaaggcgcggaatagtgaatacacaccttattcttgtaagtatttttaaaagattacacttatcactaaattaaagttataaatatgagcatatatatttagtttaccgaataaactgttttcatcgtcaaaaacctaaccagttaagctacgagtctactcccacttcgtctgcttgtgttttggtagagaaacgggggttcagaaacggtttcgagatgacgaggtccgaagaagcggcgggaatccggaactggacggcggtgatccctccctatcagcggccccacgcccgcgcgcgtgctgtctcgctcgacgcattccaagtcggcgatttccccaatttttccaagtccaccccaccaccgagagcctgcccctctcgctctcgctcgctcgcctcggctcggccccgtgccacccgctgccgataacgtgacccacgccttttcacaaccacccccgcgacgcggatcggacggctcagatgcagcgccacgacgatcgtgcggcgcgatgcgcaccgagtgagagagcaggagacggcagcgcctttaataccgtcgtcaccgatcggcttccgtttttgctcgcacacgctgcgcagcggcaaagtcgcgggaatcttcgtgggctgctccgagcggcgacggcgacggggcggcggtatctcgcgcgggggtcaacacagctagatctccctctctctgcgtgtatagaagggcggttgctggtgggaggaggaggaggaggttgagagaggtatgcccatggagcacgggaggaggcagggggtggtggcgatagagtgcgtggcgggcgggtcgagggcggaggagtgggggcccgggagcagcgagacggtgcagacgggcgacgtggtggaggagatcctcatcggggtcggcggacgcgggggccccgcggcgcacgccgcgccgttcaagggcgggcgcgccgccgtgcagaggctcctccactcggcgtacaagcgcggggacacgtccgtcgaggtgcgcgtgcggcggcccgcgcacgcgcagcagctggtgaccaccagcggggagctgctgccctcccccgcggcgggggcggcgacgaccacgacggcgaggatgcaggcctgcatcgtgccgcaggaggccgcggtcgggggcggcggcgcgatgatggccgtcgtgggccgcagccgccagtacgtgctccgctcgatccgtgacccaaactacgccgtcggcttcgtcgaccgcatggagagcgagtgcatcgccattcgaggtacgttcatacgccatgtcgttcctcctcatcacgatgcaaactactacggagaattagattttttttttcgctgaattttttgatccatgtccgtccgtacagccactttccttcggtttgtgcaagctctagaccaaccaagaaaagtaaaagtccgcgactgagctttcgttacatgccatgttggactttaattaaaaacagacaaagaaggaggatagggctcgtgtgccttctgcatacgacttttgtgcacaagttaacaagtagatggtggtagcttgataggtgacaccttctttatcgttctctctctcgcgagaggagatctttttggcgtgatcgatcacggtatcgttttcgattggcatatacttggatcaatgctgattgataatcagaaatttgccatcttgtggttgcaatacatggtgtgattgctcagtctggggatatgatcagaatatcctaggtttgatgtatgacagagtcaggattgcaagagctggtgataacattgttgttggtgttggggggtggagggcagctggtttgtctgggaaatttgaagtttctagagtagcttggcttgcacaaattaataatatggccatccattagtccaggttttttgaacgaattccattaggttattcatggctacaatgtttgtttgattgtttgttgaacaaaggctttactagaacactactctatttaacgatcctaattgcttcttccgtgtgcaagctgcgaaagtcacggttgaacacttttgagctatcatggaagaatccacagtagcctatggcagattactggtactgcaaaccacgcaactacagcaataacaaaatcataagatagctcggagaaaaaaaaatcataagataagatatttattaagcgagttaaaaacctgggtagtttgcatttgatgggtgttctgcttccacaagtaaaacaaacacgtcagtttcagataagaaaaacaccaagttgctgtagtctaagctcaagttgcatacttccaggcaacagacacggcggtgcacgttgtttggaatctgcattttgatttctttatacagaacgccacttggcggtgatgataattgaatcttccctcccctgactcggaaaaaacttgtcgctaaattccaatgcgattcagatctccctggtgactttactcctcagtcat

SEQ ID NO: 3651 - DNA, 563 bp, Oryza sativa
atctatccatgcatctatctatggttagtctctttagataggagagggcacttgggcacagaggaaggctattgcagtgccattgctagagttgccatcaagtgcaaagtaggcggatcaggcgtgtgtcatgcctgtggatttgtagtctatgtatgtgtcagctgctgagctccggtgtcgcagccttggtccctgtcgtgttatttccatcgtttttttccctccgccattgttcggtttaggtgttgtcatggtcggcgtccgtgtggacgacgtgtcttgtgcggtttgtctgtcattgagttggctccgtccgttgcttgctgttgtaaaacgcttgtggtgttcatggcggaataactaaacgtcgaatggaatgacaacttttttgcgtagtagttgggttggtctctgaatttgggaactgatgaatttccgtctccgcttacatttgttgctgggatgttttcttgcttgctttctttcccaagattgtccggcttggaaacggaagagcccatccacacaaaaagcgtgtggtgtacagcattgcagaatca

SEQ ID NO: 3652 - DNA, 638 bp, Oryza sativa
tttccggccagagccaactcggcctgctgtttgttgccccagaggaggacaacatggagacgatcgtcgcgcaggatgcgcttgtaatcacgtggaactcgtcgccagacaccgcagatcttgcccgtggcattctgatagacactgagagtgcccgccaaggtggtctccagttgatgctcctccaggattacacccgcatcatcaacgaattgaatggcacgcggacgaccgattcgcgatgaggtgtagaaggagtagtatagattcttcttgtggaacaggaaacgggcggtggccaccacattctgcggattgtaggtggtgtacatggacttcatttcctcacccttgaggaaataggaggtgcggcccgttagcaacgcagcgtaatctataaatagggatcaaatgaaaggtggagataatccaggtgttagataaatacaatagttctcttgttaattaaatgtaggagctggtgaatgggattacaatttcccgcaggatttggcggattctattgggatctgggtgggtgtccggtacttttgtacttacgtttcatgttgcgctcttcctcttcattgggcacgggcacatccaaggctacatccgtatctgaaagatggagggaa

SEQ ID NO: 3653 - DNA, 5698 bp, Oryza sativa
agtataacatcaaagagaagaaacttattaaaactatcacttttttccttatttatataccaatctcattaattcacgtgcctaattagaagtgcaaacacattttagatacaaaatttaacaacccataaaataagtaatttatggtactcattcattatttgcgatgcgatcatatcaatccgaatatatgccattgatgagttggatatgaatatatatgcattcatgaacatgtgcaactgagctttttccagaatgatcgtattcattaattgtttgctccacaatagtaggctgtatgcaggtggagacagggcaaaattttcccaggacagctcaatgctcaacaaaaatgtgtaatctataacagcttaccattttttgcgtctggtctgttgtatttgttactcttttcgaactgtacctcaatagaaagacacccgctctgatgtgtgtcctctaaaagtatatagaagctttttttttaaccaggaaaatgtttgtttgcccttcctaaaactgtcttggaaatctttccgctatgaattcactttactccattttaaattttataaataactcccgtaatattccaatatgaatgagcatgtaaactcagttccatcaaataattctgagcgctcccacactaaacaaaattccgaaaatatttgtttgcattctccgaaagggcagattcccatgaactccgctgacatttctttacgttggatgtgatgggcctatgatctcaggccatcaaaaatgcagattcctttgctattacccgactagatgcaaatagccaaagatagccgaaaatcgtggtagatagacacatggaccctacatgtttattcagaacagattctcccccaaatccctaggaccaaccaatggcccggaccaccggccatcagcgatggaaaatcctaaccctttttctcctcctctctgcaccgtcaactgggtcagagcaagcatctagcggtgcattttggataaacgaaaaaagctctcatgcacgcacatcaaaagatcttcacagaagttgtccccatcggatagcacgaaagtttttctatcaggaaataaaaagtcgacaacaacgttaagcatatctatggcaaatcagcaacctagcttactagcctgggagaaaaaaaatattccaatgatttgccatagtgatctcctgaccccttttttatattcaggccgagtttagttccaaattatttcttcaaacttttaatttttctatcacatcaagactttcctatacacataaacttccaattttttcatcacattattccaatttcaatcaaacttttaattttggtgtgaactaaacacaccctcaatagtgcaaatgccaaagaccactaattggtttctacttgggcgacagggatttgtggcgtctgtagattgttttagtggaattgataagatgggggcatgagggcatccctgttgcactccaagcccatatgcatcgcagcttttacaaggcataggaatgtaaaggatggaaatacaggaagcctgaggactgaggagtaaaatatttttgcataggctgattcagtcacaaagcaacttattctcgagtccttgaccctcgcattcaagcttgtcggagcttataataaggaaagaaaagctacaggtacaacagattattttgactcttgtggctctcatcagaaatctgaaatagaacctctcacctcccggttcaagaaccaaacccttgtatcttatatttgcgcctcacaatctgttgttcttcatcatctctataaattcaccaaaagctgtaaagcacaagaaacaggattagtaaaatcaacacttaacagtgataacacaagttgtgttggtacaacacttttctctagaagtactatattgttcaaggaaatgtacccaagtcagaatcatgcggcccgggtgaggactctggatggtactgaagagacaaaagtttcatcttagggtactgaaggccggcacagctattatcgttgagattgatatgtgttactttcaccccttctggaagtgactctgggtcaacagcataattatggttctgcagagaaaaatacggtaagacaattgcagattgcacagtagtaaatgcaagtatgacaagtaaaacaaaggggaaaatagctaagactcagaaatatgaattaaataaaaggaaaatagcaaggatgcacacatttctcttggtggaaaaacaacttctaataatacagagttacaaacaatactacctgactctcagctgatttggtgtatatgattttagtctagaaggatagacttgctacttcctccgtttcacaatgtaagtcattctagcatttcccacattcatattgatgttaatgaatctagattaatatatgtgactagattcattaacatcaatatgaatatgggaaatgctaggatgacttacattgtgaaacggagggagtagttgattaaattggatatacctaacagcttaaaggttcaaattcattactctcagaagctccaagttttcatcaggaagtgtcacagcgagaagtccagcacctctcccaacaccagtaatacggaaagcctttcaggaaataacataggatagatctataaatcaatacgtaacagaaaagaactataatggatatcaatggtttctagacttaaaaacttaaaacagcaatcctacaacaagtttctatacctctagttagacaaaacagtttattgtactgaaattcaaacggaaggctatttccctcgagagtcaaaaaacatgaatcgcattcagtatcaaaacagtaagaagtcaggtcaggaacaaacttgtgcacttatgtcgacacgtccacttcgaaggtcacaaacaggatgatttcctccatgatgaccaaacttcattttaaatgtcttcccaccaagagcttgcccaatcaattggtggcccatacagatgccaaacacaggaaccttccctattatttcttgtactgtcttcacagcatatggaactgcagctggatctccaggaccattgctaaaaaacacaccatcaggcttcaagttaagtacctcagaagcaggccaattggctggaacaacagttatcttgcatccatatgacgtcaaacgtctcaaaatattgtgcttgattccaaaatcgtatgcgaccacctaaataaaaggaagctaatgtttagatatgagattcatctgaagtgtttcaaaaaagagaaagggaccaaaccaacactgacatgaaaactttcagtcgattgacccttcttgaattcccactctgaatcagtcttgtctgaccattcatatggagcatcgcatgtgacaccactaatcaaatcaacacctgcataacatgaaataccagatcttgttttataaccagtaacttgaatagtgtctaaatatggatggaggcaatcaattttgccaatacactattctaaatgatatcattacatgtcaatgctggtgacacaatattcatcataaagtggacatgaaaaatactccagatagttactctaatagatcagtgaaggatagcaagcatcataaccatgtgtccatgtcataaacatatgaaacttcaatcgagttaacaatctgcttgaccagcaaaacataataatattcctgaaccagtacgcggttaaataataaatagtccacgttaatttcattaagcctagtactatcatgtttgcaaggtaattaattattttttaagacttaagagtaaattgcactgttcaccaggtagaattatcactttgcactgagttcagcacacactttcactttaaaccagagtagatcgaataagtttcattttgcactaggttgcttcatataactgaagggaaatcttgtcaaatcttatcaaaacgttttttttttaatttagaccatgtttcatgaagtttcatttagatttcatgaaatttctatatgtttgatgatgtatcctggtgttaagcgaaacttatttcgatgcacctggtgtaaatagaaatatgtgctaaacctggcgtaaagagaaacatgttacaatctaccatgcaaagtgcaattatatttattaaaggagacagacaattattcaaggacattactgcttgaagagagcatagcataccaacaattttccaattttttgccatttccaacaactcatcatcggtccgagattgatcagtacttaagacaccaattagactaccatcttctcgtaatctccgtgttatggcgcgtgtgtccacatcatctgcatataaagcaaattgatggtgtttattgttgcttttgttgtttgtcggacatagagagcaatgtatcaggtgacaatacttacatattcccataatgtttctcttcatcagatactcttcaagtgtttctgtgcatcgccagttggatgtactacagagaaagaataccaatttaacaacattaggtggttctcttaaagttccaattatgtcaaccaatactaggaaaaaatggtttaccatatgcttagattccttatgatcagaccagcaaggaaacatcggttcgattcttcatcatctgcatgagcattctaatttgttaaaacttacaagctattgtggaaatggcatcatatcatgattattgactaatagaaaagatacggaccaggattaacaccagtgtttccaatatgtgggttggtcatgaggacaaattgaccagcatagcttggatcagtcaaaatctcttgatacctgcagcccatttgatgaggttagttgtttcctgttgtcaataagcagtacgcgcgtctcaactatttgatgaggttagttgtttctctatcaggaagaacaataagcacatctcaaccacaacaggaaacaaatgccatcactcaaacggttagttgatttaccctgtcaaagatgtattaaataccacttcaccaacttgtgttcctgaagcaccaaaagacttggccttccaaactgaaccatcctcaagaacgagccgagcatcgctgagcttccatggtctttgcactgcacgaagaatccaaaaatggtgaaacagtattcatcatcttcttaactgtggagcacaattgcctaatcgcaaatccgtagcagaaccctgagcacgtattccgcgctgcgactgcaaaactagagcgattcgaatcagctagcgaaaaggcaacctgactcacctccatcatccaccacggtaccactctgcacgccactgacagcctgcacacggaagacaacacaaaacaactcaattttcgcgcggataaaacaaccatcgacagacgaagctgttgatggtgtatgacggattcagtcttgcaatacaacgggactaaaactatggcgaaggcttcacgggaaagcacaaaagccagatataccaatcagtacactcctcccaaacgataggtaggtaacaaggccccgccggcgaagctaaagcagcaggagcaatccactcgcgctcaccttggcagcacggacgccgaggaagcggccccgtttcgcctcgggccgacggtgcgaggccctgaggggacggcgaccgaccgagcggcggcggcgcgtgggctggccgcggacgggcgcaaggaggg

SEQ ID NO: 3654 - DNA, 506 bp, Oryza sativa
cacataaagtataggtgccagaaaatcactcattccctggaagaaagagcgctcgctgcatgagcaaacaaacaaagaaacctagacaacgaaatttcatgctttataggtctaaatatttagtgtagcatgattaaccctgtcacttgtaataatatggctacaaaacaaatgaatattctgcagtgccttgtgattcagcatgtatacattccttatatttaacaagaatcagggttatgtgatctagtggaagctttctagcaaatgcagtgtttttcacttaaatgacttaaactggcaggcagttttcttcatcagctgatgttggataattgcgggtgaagggtaatagaacgtgcaaacttacttggcaatagccaaggtcgaaattatagaaggaatacgtcaacaggatatcccgtagcacaagaacattttgattgtcatctccttcataatatggaactgatctatctgtcctcaccttgatatccaaaaaacag

SEQ ID NO: 3655 - DNA, 663 bp, Oryza sativa
gaaagctgctgtaagactaaacataagccaatgatataaccattatggaccatatgatgtggtggcgtggggaaaagatcaacttttttcttttaaattttgttcaaacctgttttaaacagaaaatagaaaagcataaggcattgtccagccaaactgaacagatgagcgtccatatctatctatctattatattattaaaacagctttgaaaggagacaccacgttcgctgtgagggttagaaattcccacattaatcggaaaaaaaagaaaaaaaaaagaaaaagaagagtccaagtagaagtacaatttaaaaatagctgaaattcggaattaaaaataagcaatattgaaagaagtttccatataagaacccaatacgagattaatcaaaattcgaaataccaataaaataaaaatccaaaattaaaaaaggaaatgagagtccaagtagaaatacaatttaaaaataactgaaattcggaattaaaaataaggaatattgaaataaattttcatataagaacccaatacaagattaatcaaaaattgaaataaaaataaattaaaatccaaaattagaaaaggaaatgagagtccaagtaggaatacaatttaaaaatagctgaaattcgaaattaaaaataaggaatattaaaaga

SEQ ID NO: 3656 - DNA, 564 bp, Oryza sativa
tgatgaggaggacgatgactccgaaaggcggaaccaatcaattgggaaaaagctatggtctttcttcactacatgacaattgcagagggctactgaataggttatttctagcgtttctgttttcgattcatgacatgccattcttggaactctaggttgtgtgcttggtgatgatgatgatgtactagtagattttcccacttcaattatgttctccccctgtaattgaaatatatttgtagtagacatagctttgatgggcgctcacagaagttagcttttgagaatgtacaatggcgcgatgcctgtaactgtcaagggttgaggcttgtaattgttgttcattttgttccaggatcagtttacgtggttgaccaccttgcgaagtttgtggcatttgtcaacgcgggaagcttttttttttctcgtccagacgaccagattgtcttccatgtctttgtgcatcttgaattataggactttgttgactggcagttcttcagcttgtgaaatagggggctcaacagtggcatccaggatcagggtaccgagctcgaattcgcc

SEQ ID NO: 3657 - DNA, 1014 bp, Oryza sativa
cgcgacgggcctggcgacgctgtacaacgcagcgaagcagcgcccaaacgagacgggtcccgtgggaaagttcgtgaaccgggtgaaggtgaagacggccctgggcgcgcgtggcaatatggagtggaaggagtgcagcgacgcggtaggcgcggcgatgcatggggacgtgatgaagagcgtgaagccgaaggtggaggcgctgctgcggggaacgcgcgtgctgctgtaccagggcatccgtgacctcagggacggcgtggtgtccacggaggcgtggtgcgggagctgaagtgggacggcctggccgtcttcctcgacgccgactgcgccgtgtggcgcatcggcgaggagctcgccgggtatgtgcagcgctccggcccgctctcccacgtcgtcgtctacggcgccgggcacctcttgccggcggacaacggccacgcggcgcaggagatggtcaaggattgggtgttgcaggcggggctattcggccgccacggcggcatgaagcgcgcaggctgactccgcactcccccggggggggggggggggcgcaacctgtggcctcatctctcgcggtgtcaaactctaatctgatttgagaatcgagcagagtaaatcgaggaatacaattcccgggaaatacaagcatttgagtttataatggttcttctggtgtggttgaattcatcgtggtaaacttccctggtttcattgggattatttcctccagaaggtagcttatccgggattgtttttgttcagtccaagatcagagggcaataccgaaggatcacttggtaccaaactaccaaggcagtattcagtaacagggacttaaaagcaattcgcaaatctcagaaacacgaagctcctcatttcgaccagaaaaaggcccatttggctctctggtactctggagcagggtttacgaaaacgaaaaaaaagccaaattcatcgcgcgggcggacggcggggggaggagcggcgcgcgggctcccccgccggccgccg

SEQ ID NO: 3658 - DNA, 730 bp, Oryza sativa
acaatcaacaaataagttaatacttaaggatactttatgaatattcaacatcagaattggataacatacctaaggtccagttgcagcacagggtattttgacttcggatttgatataataaaaacattatcctggatttgcaattgtgtcaattcaggacagtaaatcagaagataagaactggcacgttgtgcacaagtggtagctttaaagtcaaataaatccttcaaccaattgcagtgcttgtaccttccgatcaatcaatgtgggaacatcctcttgctctggccgatccaagaaaacttccttaaatgggaatgacctagggggttaagatcatagatttggggggtttaataaagagtaagataaataatataggataaaatcacttaaacaaggaatatcacaaagtcaaattttgatcaataacatacttattgtctttggtctcattcttctttgttactcttctggccacagtttccaggactccctggtaggataaagaacaagatgagcacttctacagagacacatgtgcgatgtatacagtatagccaacaatatttcacaaaaagtaatgaagacattgaaattcagaagaggaatataactagtttaatacaaggaacttcagaagaagaatataactagtttaagtttagtaagatttttcaagcaagtaaatacattaacctaggtacaccataaactaatattagttgtg

SEQ ID NO: 3659 - DNA, 670 bp, Oryza sativa
tttgttctatacttcaaagaatggacattatcacattaatacctttttttctgtgtgattgtatcatgtttctgatttgaaactttttttttcaaaaaaaaaaagaactctagtaagagtgatgatcatgagcacagagtgatcatttgtgacatgtgagagttgagagcaagaagaagaagagattataagaatgcgggttgagcttacgggcggaggaagttctcgaacatccaggccttgagcacggcgacggacttctccggcaagccgcgctgcggccgccacgactgctggtcacctcgccggagctgctgcatcgcccagtgcttctggatgaacgacgactcccagctccgctccttctcctccagcgccgccgccgccgccgacgacgacgacctcgccgtcgccgccgccaccagctgtcccatcacccgcctcctcaccctcctgtacgccgccgccaccgcccgccccgcgaacgccgccgtcagcccgccgccgccgccgccggtggagcgcaccatgctgttgaacctcgccgccgtgctctgcatctcctcgacgcattggttgcacttctcgtccacctgcatctcatcgccattggttcgcaccaagaaacggtttcttaggtgttcgacgaggaactgagccaagaactcac

SEQ ID NO: 3660 - DNA, 744 bp, Oryza sativa
actataggaatcttttccaaagttatctggttcagtcttgaccttaaagactcagatgacaatgcatgaacagttacaactcgaccatcatagctgttgagagttacttttctgttggcacagtctatcacacctttatgtctggctaaccagtccatccctaggatgacatcaaggtctttggattctaacaagataagattggccagaaatggtactcccttaatttctattctgaccgaggggctatgttgcaaagaaagtgcttgattacttggggtactaaccatcaaaggacgtctaagatcttctacttccatcccatgatttcccgcaaaactcatagataagaatgaatgtgtagcaccagaatcgaaaagtactgttgcaggaactgagttaacaaggaacgtacccaaaatcacatctggagcatctgagcttctgcagcagcgacatgatttacacgagccttggatgctggtacagcagagttattctgggcagggacaaccttcacgcgacggggcttcggacacttgtcagcataatgtcctgggtctccacagttgaaacacaccacgggcttgctgccttgctccctcttggcaggttgttgctgtgctggagctgcaacaggacgtggagcttgattacggatgttgttgccagcattgttgttgaagaactgacgttgcggacgaacaacagacgaagaacctccctgtggcatgggctggggtc

SEQ ID NO: 3661 - DNA, 3411 bp, Oryza sativa
  unsure (1)..(3411): unsure at all n locations
atatttttaacccaagataaatatattatgaaaatttatttaattatagatttaatgaaactatgctagtgttgtaaatattactactttttcctatagaattagttaaacttaaagtagtttgactttgaccaaagtcaaaacgtcttataattaacatgaaacggtgagagtagtacttcttgcattcttgcataatgctatctatttcaaatgaaaagggcagttttcatgactagtttttctttttgaaaaaaatatatgacagaaactcgggctccttcctgcatgccattatattagttgcttaagaaacttcgactatatatactgaaatgagtncaatttatcatatgcggtatcatatgatcactcgaactgacaagtaattaaaatgcatttttagcccatgatctagtttaagcagctagctagtttttctttagtttattagttgtaacttccatagagagagcaccagacccaaggtgcagtactgagcaattataatgaactctgcaatacaattttgcttatagatgtgtatactcgtactatatatatatatatagtgatgtaccaaaatatcgactgctaaaactttttatttgtttttcctagatctaattaataaattaaaacggctgtacaagtgctttgatcaccatgttttacagagaagaattatgtggaatggactttaatcaatgctgatctgaagaattaatcagaagaatgccttctcttttttacgagaattacatacagaaaaataatatttttttaattaaacaaggaagaaattcattcatctgaatttaactcaaagtcgatgatacaaatagatatatctgtcaaaaagacagggttgaaattaattaaaaaaacacacgcttcaattttctagtgctatattatagcaactaaatgccccttgatgagatcggagagctaatctgaaattcatccatatctcacagcttgcaaataaaggaacactaggtcaaaatatcaagttcggatgactccgaatccgatacgtgtaagcagcacacaaagccgatgcaataggctcagatggtggtggggcaatagatggtgtggcgcgaaaaagtctatcccaggatagctacctcccctgcggtactcctcctagaaagaaaggttgggaggaagttggaaaaataagtcttgaactattagagcaagttcaatagtatagtccactactagctccaattcaactatagctaatttaatagccaattgataccatagttgcttactatactattaatatatggtatcacatgtcatacacacattgcgtcttgaagtccgtgctgcagctggctacagatctgtagcccactactcttctctctcatcgtttatctcattaaaatatatttatagctggctaatagcctgctattgtacctgctcttacaccaacaaatcctacccggtgtatcgtgtgaggcctgcctatcagttcattgcggcgacgcggtggatgtgcaattacagtgacggtttttgtggcggttataaaatagtttaatttaccgtggatgaggccagtgaggtggagccagtcctcgtcggggaaatccttgcggatggcctcggcggtctggaggaggtgctcgatctgcggcatgtcgaggtccgggtcgctgtcgtcgatgaactcgttgagcagctcgatgcactcccagatccccatctccgtcttgtccaccctaccgtactcctcccgcatccgcctcacctgcaatgttacaatgcaccaaaataatggtaaatctcatatattaaagctcccgttcttttttacttgtcgtttaggatattatgagtgtatttttttaaaaaaagattattagatacagaatttgcacttacgaaatcatatgtctggttgatgtggttgacccggtagaactcctccaccgtctccttcctctcagactcggcctcataattcctggagatttaaaacatcaccatattattccggttaattccttttttttaagaaatatcttttactaccaccgttgaaaaagatttcaatttctagattatgaccataaggtttttatttttcgaacacaggtagtgttttatttgtccacgtgttggactttttaaagaaacatcaaattgaagtacagaattcctgaagaagcgaaaatgataacgtgcaaaaaaggaataggcaaaaggccatgttaatgcagccacagatgccacgtgggacattcactgtgcatagacacgcagaaacctttgaaatcgtacaagaaaagataagtctttattttattttatttgaccagtaagtagctggccactttggtcagcaaaattgagtttacgtttaagtagtcaaattcatcttcttcttgtccagttttatctgaaaaaaaaacaaaacctgggtttggacgtttcaacaaaaactaaaccaaacggctaatcatggaaagacaacttgaagtaatgggacaaacatgtattgtggcttgagagagaggtatgtacgatttgaatgcacaaccacaagtttcaagaatggccacacatctctttcatttcgagttgtgcccatgttctagtttactaatttcgtacgaaaatatcatgtctgtcttgtcagcctgctcgcattgtcctaaaaataagccaatcattctaatataacaaatctaaatataacgttgtactaaaatatatcatatcttaatacgatgttggcttattttagagggagcaagtaataccaacctctgtttttgcaaaggagaaaaaagaagacattccatatgcaaaatatatgattatttgcacatgtccacttgaaaaaaaacttgctgcccactctgttttttgcaaagagaaacaataaccttcaccatatttaaaaaaatactacatgattaattaaattccctaatccactagaaatattttaaatattttttcttctgaggggataatatttttaaccatagttgacactctgttttgctctgtttttgcatgatgctctgtttttttcctatgcaggaatatgtagctgacctgaaggcgttgccgaaggcgttggagtccggcacgacgaagccgccgtcgagcacgagctccgccgcgttgtcgccgccgccgccgccggcgaccttccggtcggcgatagcatctgcaagcgaaccatgtcagaacttagaaccttaattagttccacgatccatccatccatccaggaacattgctgaaccttttcttcctcacggactggaatcaagaaatcaagagagagagagaaaaggatcatgagctcaccaaggtgaggctgctcaatggtgatggtcatctcgatctaatcactctttagacagatcgatg

SEQ ID NO: 3662 - DNA, 685 bp, Oryza sativa
cggcgtcgggcgagaagtgcgcctgtgacaactgatccagcaagaggaaagccgggaccggccgatcacgactcgcgaaccaggtgtgcagcgcgagatgtgccacgatgtggtagcccacatggttttcgccgctgccgatctcgcgcatggggaccggccgctcgggcgtgtccgcaacgatggtcagggcgcggggatccaggcgcagcggggagtccgagtactccaaatcgatctgcttggcatagtccgagaggtgccggttaacattggacaggcaggactccatcttcgcctggatggtgtcggtgctgacctccgcgttgagctccgactcgcgcgtttgcagttccttcaaccggccttgctgctcgctaacatccggcatctgcgggatgttctccatgtacaggctgatgcgcccgaggaccatggcgcgccgcgcttcggtgtccgtggccaactgcaggcgctggttggcacgtttgacggccgtgagcatgatgcggttgtcgtcgattcgacgtcgcacgtcggcgagtttcgtttcgacatcctggattgcggtcgtgatgcgaggcgtggccgaatccatcgcgccgctgcgctcgccgatgtagtcctgcgcggcccgcaagtcgccgatggagggcacctgcgatgcctccggggctgcaggaat

SEQ ID NO: 3663 - DNA, 807 bp, Oryza sativa
tctatccggattgatgaccttctgcgaaattgcgttcatgaatgcatatagctttgttattgttgcccggacattgtctggaaggataccccttattacaactggtagcagttgtgtcatcaacacgtgacagtcatgagactttaggtttgtgaacttcttctccttcgtgcttattattcgcttgatattcgtggagtatctagatggtacctttatgctctccaagcattcaaacatactttccttctctgccttgctaagagtgtagctggctggactcaagtaatggcttcctttctcctttagttctgggtgaaggtcgccgcgttgttccatatgctttagatcattacgtgcttccagtgtatctttcgactttccatatacacctaggaagccaagaaggtttacgcaaaggttcttagtgaggtgcatcacatcgattgcgtggcagacgtccaagaattcccaatagggtaactccacaaatatagagttctttttccacatcaccgcgtgaccatcttcgctctctgtaggctggcttccaggcccctttccgaacactactttaaaatctttaaccatagcaaacactgttttcccactacgatatttaggcttcgtacagtggtccgccttatgttcaaagtgcttgcctttcttccgtaccgggtgggttgcagcaaggaatcgacaatgacccatgtacacaaccttcctacaatgcttaagatacgtactttctgtttcatccatacagtgagtgcaagccttataccccttgttggactgaccggaaag

SEQ ID NO: 3664 - DNA, 572 bp, Oryza sativa
tccaagatacggatcggtttctccacataggtcaaatcctcttggacttctatctattcaagattagcttcttcggtaggtacccttaaacacttcttcaattgcgacacatggaacacattatggactcctgccaaagattgaggtaactctaactgataagcaacctctcctcttctactgacaatcttataaggtcccacaaaacgcggtgccaattttcctttggtctgaaaacgatgaactcctcgtagaggcgtgacacgaagatacacataatctccttcttcaaaactcaaatctctgcggcgattgtcggcataactcttatgacgagattgagccactcgcaatctttcctgaatgatctttaccttttcttctgcttcccttaggatatctgtcccgaaaacctgacgttctcccgtttgatcccacaaaagcggagtgcggcacttccgaccatacagtgcttcgtaaggagccatctgtagactagcttgataactgttgttgtacgaaaattctgcatagggtagattcttatcccaacttccaccgaaatctaaagc

SEQ ID NO: 3665 - DNA, 2712 bp, Oryza sativa
tgagccgctccttcaaatgtttgctgagtatcatttacagtgagaacagaatatagcttaaaaagaaatgaagcgtataggtgcataccagactgagtgcagtggttccaagaagaagcagataaagtttgccctgaagaaaagcaattcagctatcagatgaaagtacacgcacctcagtgctcacaagacaacatatattatcataacagaacagttaaactattgactactccaaaagcaagctagagcaaaattagtcagaagctagctagaactgagtgtaaccatgagagtataaaacaacattgacaggcaggaagctttggagcaacacatgataggaacaaaatatggagaaataacctcaatcagatggatgcttgaagcacggcttagaagaacaaaagcaaactctcctatttgtgcaagagacatgccaacctacaaggaaaataacatgagatcagtgtaactgcatgagcaataacagaagggagcacatgtaaagcaatcaagacttacaagaagagatgttttgttgctatagccaaaccctttaacgacaacagcaacaataaacgtctttacagttatcaccaaaatcacagctgcaaggagtatatcgacatggttccaaaggaaatggacattaattagcatcccaatgctggcaaggaaaagagcagcgaagaagtttcgaataggttcaatctgcagaaacaacaaacctgaaataagagaacatataatgaatcattaactacatgaatctagctaaaactttgactaaagcagtaaaagaaacataaaacaaaaaaaaagtgcattgtcattcaaattgtcacagaactgacaaacttcacccaaaaaaaaaagcatataatttcacggcaaggaattacttgttcaagtgtgtgttgtgcaagatcagttgttgatatcattactccagctgcgaacgaacccaactcaagactcaagcccaacttatcactgcactgcatcatagaaggccgcacatgagtaaacataagttttaggataccgatagaagagagcaaatagaactgttaaaaggataaacataactacattttcttgcaagaaaactgtgcatgagccataacagtaaagaaagagttgctgaaaactgaagagcaaaacttacaaagattagtgcagaaacttggaacagaagaaagatagaggcaaagcactagagtctgcactacacattcactataatacatgctataaatcaatctagaatagtgtaaaagatcaagtttagcaaaattgttactttcacaatttttctttgaataaatttaatgtttagcatcctttaccggatccagttagagtgtcacaacttttggccaggtttagtacatgtaacagttatctgcactactccagtcatccagtgtttaaagaaaaatagtttcccattactgaacaattgcattcgatactaacatacgagcagttaaagaaactcacccaagcaaacaacaagcagaatgcaacagctgccaactggtacagttcatttgtctgcaagaaatgcagaaatgttaatgtaggataacatgatgatctgaaccagaactaaattaaatgcaaattaaatgctcaacaaaactattcatgtagtgcctgtcgattatattcacctgagatgaaagacttatcatcagcttaagaaaccaaggcacaccagttcgggagaggatggaaaggattgtaaggaatgttatcaataccaccaacctgagaatgtcagaaattgtgacaaaagaatttaatccaacacctgattatattatggaacaacttcacagacaataggaagttcaaatatacataggacaacatgatgtcattatgaagatataaggcaaataaacttttgtgctgtcatgatgtaaaggcagggtagcactgctattttaagtaccaccatttagaccttgatgtggcatgaatttactgcaggagacatgattctagtgtacagattattgtagtggtaaaaaattatatgtaaataaaagtttcaagccaaaaacacactacacttacgacttggccattgatgcaactccttgaagaagaccagaagcgccactcagaattggaagaagtgcaaaaagaagaccaacagcacagtcctgagacaaaggaatgtcaaatcaccaatacaaggaaagtagtgaagctcagataaagaaagaataatcagtccactcgttcgattcttaagaagaagcaagcaaaacgtgcaactttacgaattcatctccccaaacaactcaacaaatttagaagatggtatccatttctttcatacctgcaatatgagtgtgccaaccgtaacttggccatgaagggcattgatgctatttctttccatcagaaatttcaaaacctacatagaaaatattttcccagaaaagttaagcaaaaggagatggaaatgggatttacaacacgaacataaccatattgcaagttatacgacattcaggaaacagttggcacatgagtcaagcaccatctacgaggtaacaacgtgctaaattgaaaaccatttggcatctatcgtctatgaaaggggtaatggttccactacgaaccaagacgaacagttgatttacaacaaaagctgcttgagaggatgtgtagcaaaacactaaaagataagag

SEQ ID NO: 3666 - DNA, 685 bp, Oryza sativa
tgacctgctcataagtataagtgtgtaagttactgcaaacattttttaaaaatgttctgtggccttctctattgaaagcaacttactgtagttttaccttgagatcttgcaggtcaatttgtccctcctgtggccatgaacttggagccctattctctggtataatggctggaggctctggtggaaggtgcatatactgctttattctctcaactgaaataatatagttttccatgtaggagtagaactttgtcaggaaaacctgaactgctgtcagcgacaaagcaaaggagaggctgagacccgcaaagcctggaaaagttaacattggaagtgttatacatccttgttggatgtagaggccgggttttaattaatccattatctaaaaaaaaaaactggaagcgttcattgttcagcatactgaaaataccattgtaagatgaacatgttaaggtgtaatggcttatgtacatacatacctggtgagactgctcctggaggagccaaaacaaggagcagtgctgctgttagtagtgtcaggctctgcagtgcttctactcttatgagaacccactcttgcgccgcaactgtgtggaagaacaatgtcgcgtcggtatcgataagaagtaggttattgcggatgaacctgtctgtttccccaaaagacctgatggtcaccaca

SEQ ID NO: 3667 - DNA, 1817 bp, Oryza sativa
aaacctaattacaataatccgcaaatctccatataacagcattaaacttcggatgatcatatcttggtcatacgagctctgaatcgacccgttcaagtctcctaatgtttgtataacctaaagaaccctgtgctttcttcttatgtattgttattgcttctttttaggcttgtagctttgcttgtgtgcttcgcgtagtcttcgtcgttccggaggttcccgaagcgtggttcgcggccgtcgccgaaggttcggaaggccgttctctctgagcaaggcaagtcacatcatcctttagcatattgaatcccagtttataaaattattttgatttaaattaatgcattatcgtttaattcccgcgttatcactgttttatctagccatgcctatttacctttgttatgaccttatcattgttgttattgttactattaccttgttcaccctagaataaacaaaaccccaactagtgggtactctattcctggttccactagtatgaatttaggtagatgcttcgctgattaataggacaacattaggtggtttttataactttagactttgggaattctcatatcatttggacactatggaatggttggcttatggtggaattggacatacccctctcttcctctttcaaagcccctaaaacctgtttttcggtggggtttgggtgcatgccagttgtgggaagtagcaccccggccactataaggattaagctcgggcctctgttgcaaagcactaccgtacttccacatgtctagtgggtaaggcttagtttgtggctcagtctggttataaacaaaagtacacggatggagatggacgaagtcgggggtcgatggacatctctaggacaaatgaaggctacacgagctgcggcccggtagtcgagatgtcatggcacagggctggtgtcctgctgctaggggctcaatcctgcctacctgtcccggaggtttcggccgtaggtggggttgggtcggtactcttgtttatggctaggatgggttgggaactatgtcacgtcttccgtccgtataccgtggtggtatgtggcatgtggttacacgtgaggaagatgtgtcttgtgggtaaagatgtacacctctgatcagagtataatctattcgaatagccgcgccctcggttatgggcaagccgagcaatgtacccaagttagtgttttaattcttaaaatttgcttaacaactaaaatgtggaatggttggcctgggttggcttgggacgagctgggacctagggtcgggttgccagttcggtctgaatcatcgtaggccttgggttaaggcaggttcgtgagggttcacgaccttgattaataatactgtgtagctctaggatcgtctttttaaaatggctttgggcaactaagtgacttttaaatgctgtttactgcaaaacttaacccttattattaaccccttgtacccccttgcattaatcatgcatctgccggtgtgacttgctgagtactgtggttgtactcattcttgctcaatctttccccccttcagtaagagaagcttgggagaagaagtcttaggtggagtcctggcttataccccagttgagcgcctgtgaagatggagccgtaggcccgcaagtccgctgctgtttatttttgtttgtcaggcctgaggtgcctttgtaataatgtaaatattatcgatataataaagatgtgtcttttatatcatgtttgtgtggtgtaccccggcttttcctgggacggggattaatacactagcgttcgggaaaaggcaattttctcggtcgcgaca

SEQ ID NO: 3668 - DNA, 753 bp, Oryza sativa
taattatataatatatagtgtatataacataaaattgagcataagtgcacacattgatagaattgatcatcacgtgaaattgtttaacatatagaaatactaattgataaacatatcaaagtgccaacatatggaatataaaaatgatagaaaatgataaattgggaagaaatcttacaatttagagattaacttttcgacgcttgatattttgaaaataatcgatgatgtccttgtccttagcttgcaaaaagaattccctttcaatgaatgtaaccaaacaatcattcaagtatttctgtcccatcttggttctcaacttgtttttgatgtagttcattgaagaaaagaccctctcaacaccagcagttgcaacagggagaactagaaccaatttgagaagtctataaacaagttcataccgacgaaccctctctgttttgacaagcatcatggatagttctgctagacctttcaaattagtgaatttctcatctttggtcacatcactaatatagcggttgagttgaaaagaaagctggttcatttcttcgaaatcaaaatcatgaggataaaactcagcaagcttaactaagctctcaacattaaaagctgaaaatcctttggatggattgaatgatgccatacatctaaggagttctgtgtttacctcatcaaacctgttattcaactcttgaagttgtctatcaatgacacccaaaaacatatcagcatgaaaccgatggtaattaa

SEQ ID NO: 3669 - DNA, 801 bp, Oryza sativa
cacttgttctagtaaaataacacggcatcgcatgccgagatgttgaggttcacaaagacgtcgtggttggtgaagtagcaaaacttgcgaagtagcagcaatagagtttgccggtgccgaagataataaagatgaagtcgctccaccatgatgacaaagttgcattgccgtgatgaagtgaacacgagttggcggcaacaaaagcaaaccggtagcgaagacgcgcagctgtgaagataaaagcaccagtcggcggcggcataaccagtcgacgatagaagacgatgatgtccatcagtagtggtagcggtataaaccagacgtagaggcgagggcactagtcagcagcagacgagacgaccggcgatgaagacgataagtccaatcaacactggcagaatcatgcagccatcgaagtgaagaaaccagtcggcagcagacgtagacagcttgcgttgaaggtgatgacgcctatttgtagtggcggcaacgtggccagccgtgaagacgatagcaccagctggcgtcatacgaggcggccgatcggtgaagatgtagatgtccaacaacggcggcataataagccagccgtgcaggcggagacacggcggcataataggccagccgtgcaggcggagacaccagtcggcagcggcggaggcaagccagcggtgaagacgtagacgcccaacaacggcggcataataggccagccgtgcaggcggagacaccagtcggcggcagcggaggcaagccggtcggtgaagatgtagacgcccaacaacggcggcataataggcc

SEQ ID NO: 3670 - DNA, 1172 bp, Oryza sativa
ttgattcatctcatccgtgtgggtttttctagtagatctcgaatgacggcattccccgttagttttttttttttttttgactttgctcggatgaaatttgctcgttttgtttcctgttcttgcgattgcaagtcattagttgatgggatagtgaaatccctgacgcgcattggtcgtgtagggagctggatctgttccatgcgttgctgattggatagaggggattagagtttacgatttagggctttcctctgcaaaaactccttgccgcagcacaggaagcaggtctcctccaaccgctccacaggcggactgctcgtttcaatatggccttatatgcagatgacgctgtagtgttccttagaccagataaacaggaactccaaaaggtccaaatgataattcaaaatttcggcctcgcgataggcatggtgaccaatttatcgaaaagcgaagtctatgccattagatgtgacaccctcgacttacaggatattctctaccccttcccggcacagatgaaacacttcccttgtacctatctaggacttccactccacatcaggaaactcagaaaatcagatgttcaacctctcatcgataggttctcagctaggctcccaacatggaaaggaaagttactaaacaagactggccggacggttctgataaagtctaccctctccgccctcccgacctatcacctcactgttttcccccttagaaaatgggctgaaaaaaagatcgacaaaatttgtaggggcttcctctggacagggtcagaacagacacaggggggacactgcctagttaactggaagagagtctgtagaccataaaaacatgagaggccttggtataacaaacctcgaactttttggtcgctctttaagactccgctggctttggcaggaatggaccgccgtcaacaagccttggcagggatcgagtcttccttgtgatgaaacagacaagcagctgttcagagcttcgaccacgataacccttggaaatggcaacaaatcaaaattctggcatgacagatggttgaacggatcacccctgaaagaactttacccttccctctatcagttggccacgagaaagaacagatcagtggcataggagatacaagggaaccactggttgaaacagatgagacgaatgaatac

SEQ ID NO: 3671 - DNA, 764 bp, Oryza sativa
tgtgttaatatggagaattttagtcctttggttcgtggagagatattatgcgaaaatgagccagttgttaaaagtaaaaaaaaaaagggaaacttataaaactcggagctataactgggatcacatatttccgtcaaatctatgtatgctgcgatcatgaactgtaatgtttaaataaaaagagaattctgggggacttgaacattccactaaagatcaaggtctttacgtggtttcttcacaagaaagtaattctaacgaaagataacctggctaaaagaatctctccgggatacaacattgttctttctactatgcgcaagagacaatccaacatcttttttttagtgtcatgtcgctcagttgtttggagatgtgtgtttttttgcttttaatatccctccaccccgtaacgccaaaaacattttcggtaattagcttagaggggtatctaggtccattaagaagatgattataattggagctagtgttgtatgttagtcaatttggcgttgtcgtaatgataaagtttttaatgataaacaattatctaaccccatgcagattatcttcatgtctccacttctggtctatgatgctaccataggaggagcaggatactatgcacaatgatgctacactcttggaatcggtagccaaggatctcttattccactatgggtggcgtagtttcattagaaatgctagctatttttttttgtgtagtttaaagctagtcaataataaaggaggagttggggatt

SEQ ID NO: 3672 - DNA, 645 bp, Oryza sativa
taacagataaggcgctcggtgaagaaaacaaagacgcccatcagtagaggcataataagccaaccgtgaaagcgaagacaccatgggcggtggcagaggcaagccagtggtgaaaacatagatgctcatcaatggcaatggcgaaatccatcaatcatgaagatgaagaaaatagtcagcgatgacaaacgcatccgatggtaatgatgattagcggcaatagagatagccggctatgatgacgaagttgcccattaatagcagtagagtgggctatgttgaagagatttgacaggatgttgatgaagatgacgatgtcggtgatccaggcaatagcgatgtagcaaccgatgataatgacgaagacgctcatcagtgtttgcatagtaggtcaaccgtgaagacgaaataacaagtcgacgatgaaagttggtgacgacaaaagcaaccgaagacgtagtcaccccttagcaacggcggagacgtcagggccgatgaagtaggggtgttgatgatgatgtcagtgacaataatccttcaaattgttgagaagatggcgaagctcaaatagttttcttgatgttagcgtgtgcataattgagattaatgcaacgcctcttgatttatgacgatagcagtagaact

SEQ ID NO: 3673 - DNA, 615 bp, Oryza sativa
gatcagtctcggtgagaaattcaacctggtgagtcacaagaactacagtcttctctgaaagtgctgtcattacacaatccagcaagaacattgccactgattagaacttttttttcatcagggagtgcatccatggatgcaggtcaaggagcacctcttacatagaacagaaccgcagcggtgtgcgcatcgaccgcgctgaaaggatcatctaggaggtacacatctgcatcactgtacacggctctggccagctgaatcctctgcttctgaccaccgctcatgttgattcctctctggccgatctctgtcaggtctccatggtcgaagttctcgaagggcttcccgaagaggatgttgtcgcgaacagtgccactctatccatgagttctgggaaacatacgccactgtgccatacaactccacctgaaaattgattgtagttttgtcatgttcatattttagaaaacatagatttgtcattgtcatttttttttttgtatatgaacatgacaagacaatcttgtgttttctcctttcatggtaaaatgaaaagaaaggagataaatatagagtcgaagattatcttgagtcttttttcaggggaaagtagaa

SEQ ID NO: 3674 - DNA, 511 bp, Oryza sativa
aaatttcgtgaccgggtttttcttggcgcggttgcagcctgcagatttgatagattggcagacaggtgtggattacgagggggaatcgagcgaggaggaagatgtcgttcaggagcctgatccaggagatgagggacgagttcgggagcatctcgcggcacagcctgcggtcgcggtcccaccgcggcggcggcggcgcgccccgggtgaccgcggtggggccggcgtaggcagccgcgatgcagcagagctgctgggcgcagctgccgcccgagctgctccgggaggtgctggtgaggatcgaggagtcggaggtgtggtggccgtcgcggaggaacgtggtggcgtgcgccggcgtctgccggagctggagggggatcaccaaggagatcgtccgcgtcccggaggcgtccggcaagctcaccttccccatctcgctcaagcaggttcgcgctctcgtttcattctgaaattaccggttacgatgtcgaactgttagtaatttgattgg

SEQ ID NO: 3675 - DNA, 523 bp, Oryza sativa
gatccaaatgaagaaatgggagtttgatggtttccctcaaagcatctaaagtctgtccagctcgagcaagcctatagatatggagaatagcttcaagctgtctcagtacagtttgttgctcagatatgaggtccttgtcttgaacactgtaagaacgtttccaataaattgatcaaaacacagctttaaaaagcataaaggattaatgctcaacttgtgaaaaaacagaagaggataataacctggcttccgaatatctggcagtttccataatttcattaccagaatgaattagagcagcagcacgactttcaccatctaacatactgcgtgccatggcacatattgcatccgacaggcacttatttattgtctgaagtgccatggcaaaagctccaactcttttatgaatttccactgactgagctcatgcagagcgtaaagtgatattagacggatatagaacaactcaacaaagagagtaagaacaaagtgcagaaaacatagacatcttcaaattcat

SEQ ID NO: 3676 - DNA, 556 bp, Oryza sativa
ttgcactgcatttttctgctttgccctctgcaatatcttctcttctattggatctttgcatataattctatacaccgttacctacaataccaatttgaaagaaaatacaaggaaatgagctaccacatatttcattccaaaattcaaatgatagtgttatataatttataaatatagataatggacaatgcgctaaaaagagttgagctattttgtgacgtgccagtgctatttaatactcctttcgtttccaaatgtttgacgttggttagttcagttttgagctaaccaacgtcaaaccaaaaaaaaaaaggaggggcatcactaaaaagagttgccataaaaggcagaaaaatgctccaaaagaaatacgtagctgaggagcacactataagctatagtactatgattagataaagtatttataactgaagcttcagttacctcctttgtctgaccaagtctgtgtgttctatccattgcttgctggtcttgtggtgggttccaatcaatttcataaaaaataactgtatcagcagcagtcaaattaatacct

SEQ ID NO: 3677 - DNA, 511 bp, Oryza sativa
tcgatgccgtaggcgtggaagaggccgtagccggacgccgactcgaagagcaagtacagcgccatctcgccggcggcgtcggcggcggcggcgggttgaggtttgggggcggcggcggaaggggggttagggttttaggggagcgaggggaggcggacaacggcgcgggggtggatgatttatggctcacgctgggttctccgcagccgttggatcgcgatcaagccattaggtgattattgccccttttttttctcatttctcttcctctttttcctttttgtttgatgagggtccttctttttccttattattgcatttttttttacaatgatttgaattattgatgagaaagtggttggttggatagtaacaaatagagtaattttcactttggtcaccttttattactactggtgttttgttttggaccacattttaactaatgtttttactttgatccgggtaattttgcatttatgttattttggaccacccttaacttcttttt

SEQ ID NO: 3678 - DNA, 732 bp, Oryza sativa
catagacaatcttgaaagctcttctacggcgtggattcaaagtgagccaaaatgcgtcacaaaaataagaacaagggttaaaacattaaaaaaataatcctgctatatgcaatgatttagagaggcaatgcacaatgatttagttctccttcaggctttagtcactttatacaaaaacacaaaaaagaccaaaaaggaaaaaagaaaaccaaaactattttatatataaaaggcccactacaagtaattacccactaggcccataaaggaccactacaagtcattacccattaggcccatcaaggcccatctaaaatttctagggtttcctcatcctcgatggggtttatccttcgagcacatatataatccgcacgccgccgcctccctctctgcttcgcactccattttccctctccccgctcgccgccgccgccgccgccagccaagctcgccgctcgccatgggtaagcctccccctcctctccctctctccggttcatctcgattagttttagctctcaatcccttccggatctgaccgtttcttggacaaatgtcagcccggatcaaggtgcacgagctccgggggaagaacaaggcggagctgcaggcccagctcaaggacctcaaggcggagctctccctcctccgcgtcgccaaggtcaccggcggcgcccccaacaagctctccaagatgtgcgcctccttcctccttctctctcgctcgtt

SEQ ID NO: 3679 - DNA, 543 bp, Oryza sativa
tcattcgatttataaggcatatgatgaggtgagacttatacctacgaaaataggtaagagattaatctggttgacataacttggcaagaatctaaaaagagaatctggcttgaaactaaaacttcaaagaatggaagtgttttccattataacaagaaatgctatgagaaaaaaaaaaacagtgatggaactggcgttcagactaacagaacctcatttaatcatgagaatagtatcatgatgaggcatctcaatgttcaattactcggggcatagatagaaatagaagagccgaataggtgatcaaagtatgagtgataattgtgacgtacctgatccaacagatcatgagcttctttaaggattttagatctaaggcaagatataagctcctgccttcgccaacctataaaaatgcgttccccaacaatgcatctccttatttttgctttactgcgagctgaccatcttttatatgcttctactttgaagaactgtccataatatgaggaaagctcatccccaacagtcttactacctaca

SEQ ID NO: 3680 - DNA, 571 bp, Oryza sativa
tgcaccacctactctgtacatcttcccaaacaccggggtatcctcgttccatactcccaaactgcaactcttctatcgctcgcagaatgccagcgtgcctatcatgtatcaggcacacatttggcctcataccaacaacttttgttttaaccaatttcaggaaccagtaccagctgtcggtattctcactctcaacaaaagcaaatgccaagggcaatatctgattgttcccatctacccctattgctgttagtatctggccccgatactttcctgtcaagaatgtcccatcaatgcagagaacaggacgacagttcacgaatgccatcttgcatgcatgtagagctaagaacgccctttgcagcacactcttgctaggatgttcaattgaggggaatttcttcacttcgtaagagctcccagggtttctttcctcgataacaccaagcaggcgtggcaaattgttatacgaggcttcgtaagttccaaatctcatctctattattttctgtttggccctccaggccttggcatagctaatagtatacttgtatgtctcttcgatgtgtcg

SEQ ID NO: 3681 - DNA, 691 bp, Oryza sativa
tttttccagcccaaataattttttcagcccacaaagctcaactgatattttttcagcccatacaattcagcccagatactatatttcagcacatacaaaatcagattcaaatgaattaacattccacaaatgattgcaatgtcacatgcatttcacattccagaagtcttgaaatgcaatatcattacatccatccaccaattcagtacatatccaaactctcaaatttcatattcctgctactgcgagagcaacagcagcacatctgcaatagcatcacagcagcagtagcgcaatggccaaaagcacagcagcaacagcacaacggccagaagcacagcagcacctaaataacatcccacaagcacaatggtcgcaagttcagtgtcaccaaaatatcatctggaacctaattgagtaggagtgcttactattcagcatctgatgatgcaaaattgctgccaaacaattgagtagtttcttattgtacttgaattacatgtaccccagtggcataatgtatctatgaatcctaaatacatgataagcaaaatttagtagactcaagtaaacccccgcggggcattgcatttacgttagaaaacattggccgcagtttcattgatagaaacagacagagttgtccgaagtccagtgcaaaaaagaacaagtaccttacggcatctgactt

SEQ ID NO: 3682 - DNA, 1459 bp, Oryza sativa
gcgtttgttcttatcttacccagaggccgcggcggtggcggcggatgcggttgggcgacgggggatgaaggagattagggcggggtcattgagggcggcgacctggaagttgagggcggcgtcgggtggtggtggcggtggtgcgcaggggcagatcctcgcgacgactctgacgccgccgccgccgccgccgggttcctgcttctgctgctgctccattcccagaattttgttttttcttttgtttttggggttgtggagatcgatctgggggatgggaggagatttgagaggagcgggggggtggggggaggagaggaggagcgtttctttcctctttttgaattgggggaggctgcggaagcggcggaacggtcgaatcgagtagagtcgtgtaggggaaggaggggggaggaggagcatagtgtgcgccggtgcgtctagcgttagtgggccaggcccatgttaaagcccatgccatctctcccccagtcctcgcaatggaaaagtacaccgaaggtccctcaacttgtcatcgagatacaaaatcgtcccccaaccgtaaaactagatatgacgcatcatccaacttacaaaaccagtgcaaactaggtccctcggtgattttgaccccggttttgtccgaacgtggcgggtgaatcagcgtgggccccatgtgtcatgatgccaggtcagcaggccggcctctcccttcctctcctttcctcgtctctttctcacaaacacacacaccctcctctgtggactgggcaggccagccagcggtggggagaaggtcgtcagagcgaggaggtccgacaggcggccgacgatgcggtggcggagacacgagagaagaggagggtggcggcagggcgaggcggtgtcggcgggcgagcgcggtggcggagaggcgacggcgcctaggcacctccacgaccaccccttcaccgcctgcgtgttgtaccgcctcgcccgcgcgcgcctcttcccactcgtgcccccgctcctcgccgcattgcactcccacggcggcccactccggcccaccgtgtttgcccctgtcatcaaccacctcggcgccgcttctcgccccgacgctgcagtcgtcgtcttccgcgccgtcccagccttctactcccactctgccgccacattccatttgttcctcaacgccctcgtttccaatggtcgcgcggatgccaccaaggacatgctcccgctcgccccgaagcgaggcgtccacctcaacgccgtgtcgtacaacatcatcctcaacctccttcccactgccggccagcctgcccagtccagagagaagagtgagagagtgaggaggaaggagaggaacgaaggggctgcccaactccactccgccggccgccgctcctctcccctggccaccattcctctgccttgtgggcgcggccgacgggggagcccgcgcgctgcccgtccc

SEQ ID NO: 3683 - DNA, 642 bp, Oryza sativa
gctggcccgcctggctctccgccgtcgtcggcgaggccatctacggttggacccctcgccgcgccgactccttcgagaagatcgacaaggtacgagctccccccgccctcgcgctcgccattgtcgcgagctgagctcatcaacagcgcgcggtgttgtcggtggcgcagatcgggcaggggacgtacagcaacgtgtacaaggcgcgggacacggcgacgggcaagatcgtggcgctcaagaaggtgcggttcgacaacctggagcccgagagcgtccgcttcatggcccgcgagatcctcatcctccgccgcctccaccaccccaacgtcgtcaagctcgagggcctcgtcacctcccgcatgtcctgcagcctctacctcgtcttcgagtacatggagccagacctcgccggcctcgccgccagccccgacatcagcttcaccgagccacaggtctccccccgccaagatctttgtgcagcctcatgttccagcacgcaatgtcgtgcaattaattgaggttttccatggcatgctgacatgcggttaagtgctacatgccccagctgctgtccgggctggagcattgccacaacaatggagtgctgcaccgcgacatcaaggggtcgggctgcaggaa

SEQ ID NO: 3684 - DNA, 529 bp, Oryza sativa
caacatcagatgcttgcatcattccatatgaagggatacgaggttgctgaatcatagctggcatgatagaatcttttcatcataaaaaggaaacaatcaaggaaagaaagtactcctggcatattaatacctttggcatgagggaacatatagcgttttcctttctttcctgctgcaagtacaagacaggcatgacctgccgcagctcctatacaaagtgtatggatctgcaaatcaaaaggtaacttcattatcagaaaatgaaaaccagtaaaccacatgaacaaactcatgttcaacaacacaccctaattttctgaaaagataaacaacaggttttgacagttcaaccaaaccagtgctcaaacacatggcaagtttgaagttacagtcatttttttattgaataaatccataaagaaactagggcaagactattatctttgaaagatttcatccagcaaacaagcaaatagcatccaccaataactcctaacaaacataggaataagggcacctctgttcaggg

SEQ ID NO: 3685 - DNA, 659 bp, Oryza sativa
tttttttttgggaaaatcccagacataacctgtgtccatcgtgattctcatttaacttagcttctctggtgcctatataaacctctccatggtgtccatctgcagtgcacacacagaattaaatttaaccatgtcattttatttctcacacttgctttacttgtaaatttatttaattatacacatacctacttaaaaataccaaatatttcagcgaatttgtattttaattaattgcatatttttctaatctgtacgcttcacattgtaacacacaggcacttttgctagaccaaacaacacttttggtcaatatacacactccgtaatcacccggtgcaacgcacgggcacttttgctagtatatatatatatatatatatatatatatatatatatatatatatatatatatatatatatatatgtaatgaagttagcagcaggaaagggtaaacaacctcgagaacttgcatcatataattgttaaaactccttaagttgtccttttgtgcttcttgaatggatgagacgattgccatttcatgaagctgaaaacacatgacatgtttcaggatatattccatgaaattaggagaaaatgcatgtaaaagatgtatgacggtatgaagtgtgcacctgctgcaggtactcctcga

SEQ ID NO: 3686 - DNA, 627 bp, Oryza sativa
  unsure (1)..(627): unsure at all n locations
tttctgagctgactgaatttgggatgcattgcaaatttgcaatagagttggagggaaggataacttcttccactgcgaaaaatgtggtgagtcagtgtgatcctacatctctcgatactcggtactgaaatcccaagctattactatttactggtgagatggttgaatctgaatctctcaattccacttttaaatatctgttgaaacacaggatcatgctactcggtcagcctgcgcgacaagcactgctgcatcgagaactccatgaagaacaactgccccatctgttacgaggtgtgtgttctaatgtnnnnnnnnnnnnnnnnnnnnnnnncgctaccttctgcatactgttcatttaaaaaaaatgcagtctcttatgtacgaaactgtcgatcgtcatcacaaatgcagtatctgtttgactctctaagggagacgtccgtgctcagatgtgggcacacgatgcacctgcaatgcttccacgagatgctgaagcacgacaagtaatcgcccatgctgtgttgatctgtttccatgtggctctttctttctttgtttgtttctttactttgtgtgctagattagtcatctctttcgtgtgatcttgttcttcttgatgcctga

SEQ ID NO: 3687 - DNA, 673 bp, Oryza sativa
tttatgcttcgtttgctattattaatatgtatctaatttctcattattttgacgttgtgtgagtctgtcttatttaatcgctctatgcaaaatgatctatgcataaaatttcgctcttatttgattcccttatttgagtcctttattgctttatttaaatttggatttgagcatgcattgatcctactcctttgtcttctctagatggccggtcacccacccaaccaccgcggagaaggcatgatcgactttgttgcagagctggcacgcatgacactggtagtgggctaccccgacgcgccggagtacacgacgattccgccgctcagtggcgagcttcctcaccgtgtccgcttggaggtccatggttacgtggggacttgcctcgctaacatggcggtcgaggcgtcaggaggcacagcagatcacgcttgtcaggaggcagcctacctgatgatggccagactacgggagcgccacaactacattttccacgacacggcgtaccgctaccaccccagtcgagcccacggtgatggcgtcagctccttccgtccaacagctggcgagaacgacaccacctttggccacatgtgtgcggtgatgaggggtttggacaggatgcactcggatctgcacaaggcgaccaaggccttgaatgatgggaagctca

SEQ ID NO: 3688 - DNA, 731 bp, Oryza sativa
gaacgttagccaagcaatgtccttctctgcgcccggcatgagcttaatgtcatcttgcagaatactgaatttctgcctccctatgaccccgcagatagatctaaatcggctcaatattttccttggagatgtcggcaaccctacggcgtccaccgctgttatgtggaaccgttccttagggattttgttccctgtcctaggagtacgtgcccttgaggacccactagttgtcgtcgacatgagcctgcgcgtacgacgcttgatcgggcctaattcttttccttccgattgtgccaacacctgataaccttccctcgtgacgagacgctggaactccgataggatcggcatcggacatgtagattatggttgtattcttcttcatcgacgacgttgtcaactcctacaattcggcgctttccatccctcacgatgtgcatcttcttgtttgaagggtcttttatgtagaatatctactcgacctgtttcacaagtacaaatggttcatcggcgtatcccccttagatagatcaactaaagtgaaaccttccttctcggctttgacaccagtgcgtagattcacccaacggcagcagaacaaaggaaccttgaacttgacgtaatttaactcccagatctcctcaatgcggccgtagtatgtgtttgacccaacttgatcctggaatgcatctatacggacgccgctgttttgcactgtgcttttgtcatct

SEQ ID NO: 3689 - DNA, 4311 bp, Oryza sativa
cttggggttgaaaccacacaccccttgccactgtactatcaagcattatgaaaaaaaaaaaacataatgctaacctttacttctcatttcaacatacaagggtaactctcctgcttgctgatggttgataattccttatagctgacatgcttcttccttttatatattctttcactagttttagttactaacttgtggctcttgcattatcattgagatgtacaggtgctttattgttgttgacgacatatgggataagaaatcatgggaactgataaaatgtgcactgcaagatagtaattgtggaagtatagttgtcgcaactactcgtatttccgaagttgccatgcatgtcggtcatgtttacaaaatggagccactttctcttgatgactccaaaaaattgttgtatgcaagattagctggtgctcaaggcaagtgtctgaatataccaccagctgtggcatgtgaaaaaattttgaacaaatgtcatagtgtgccattagccataactacaatagctagtttgctggtgaacaaaccagaagaggattggtctgaggtgtacaattctattggttttggtcatgaaggcaataatgatgtagagaatactagaaggatattgtcttttagctactatgatctgccttcacatctaaaggcttgcctattgtatctaagcatattttctgaagatgttgagatcgataaaaatattttgatatggaaatggatagctgaaggttttgttcaagacgaacaagcagcaggggtagagttatttgagcttggagagggttgtttcaacgagctgataaacagaaacatgatcatgccagtggaggtacaatatcaagggtatcaatctaaggcacgctataatgaagggtatgtatatggttgccgtgtccacgatatgatgcttgatttgatctgttcattgtcgaaggaaaaaaattttgttaccctggtggacagctatgagcaagtggaacttccgctgagccatgctcgcaggttagccatgcagagtatgagtattaaagagataaaccgtcttcagctgcctaatatgggcatggagcaagtgaggtcctttttggctaatcgttgttatggtattagtttggcattctcagactttcgagtgttacgtatattagctctagaatattgtcagggcaaaattaatttgtcgcatttcaggagtttatatcacctgaggtacctggggctagtcaatgcggaaattacagagctccccaaggaagtgggagatctgatgtttctccagacattggatctacgagaaacttctatactggagctgccagaatctgtgggtctgctgacacaactgttatgcctatatgttgatcatcgtacatgggcgccagttgatctgatcgggaagctgacgtccctgcaagagctgtgcataaggcctgcttatgcgtacgacaggttctacgatgacaaggccaatggtatgagacagtttgtgaaggcgttgggcaggctgggagaattgagggtgctccagactcagattgatatattggatgatagcatggagaaagatttgctagagtctctagacaatctgcagaagatacggtccttggaaattttgggggcatcacgagggttgaacgtcgaatggactagaacaggattcatttcccctaggcatctccagcgcctgtatttggaatgccttgagttttctggactgcctgcatggattaactcgtcacttcttccaaacctctcctatctaaatatgacaatggaggttgtgcaagagcaggacatggaaacccttgggatgtttcctatactctgttacctaaaattatattcgcgttgtacaaagctagtaagctttaagcatacaagcaatgcaggctacttccagaagttgaaatccttcaagattgttggttcatcagtcaggtttgatctgagtggctgcgacatagaatcttctttcatgccaagccttgaaacctttgagactgatgtccatgtacgcttcctaaaagatgcgaacatgcttggtttcgacaagcttggcttggagaacctccctagttcgctaaagagaatcattgttgtaatctgctgtcgagatgccagtggtgcagaggttgaggaagcacaggcggcattggagcatgcaactgacagccatgccaacagtcctaaacttacaattatgagatatggagtacaaattaaacggcccttgtgaggtatgctgatgatatccctgattatgaggtatgtgttaatagcgtaatttggcttatggttaggtcattttagacaagccaaattatgtagaataacgggtgtaattgtctagaaatttgtttaagaaaatcaattcagtttatatgtgcagtaatatgtgatgcaccggaggtgtacgagttgctggggagctgcagcgtttggatcagcatggtgatgcatgtgctgcgctagctaccgtgctacgactgaggagttcctgctgtgcattctgtacatgctagactgatttgatcatatgaatgtggtattactctcttactccttcgcacgcacgggaggcttcattagaacggataccctcatctcaatcggacggtaagccccatctcaatcgggcacagcgtccgtcacagactagaagtcactgatgtgaagagttatctcaatcgggcaaatggccgtcacgaatgaatatatctcaatcgggccctaagtaaaacctgtcatcgatagctttgacccagacgaccaatcaaactatagcccgtcacagatgacctatctctattgggccacaactagcgcccgtcacagatgactactaacatttatcgggcctaaactagagctcgtcacagatgatactcatctcaatcgggcctaaactatagcccgtcacagatgactgatgacctcaatcgggcctaaaataaagcccgtcacagatgactactgacctcaatcgggcctaaactagagcccgtcacagatgactacctatgttacctagatacggggatacggatacggatacgcgatacgtcgatacggcattttttgaaaaacatggatacggggatacgtctatatatatatatataataaaaatataaatacttacttcaactcttgtaaatttggaaatatgcccatatacaaatacagacacacccacacatgtcaatgaaatgggataagtttgctgcctgcagcattaccagcctgcaactactacactaaaaaaaagaatgcacatgtactctatggaaagaaaagaaacaacagcaaaaagtatccggcagtatttgggctgtgtccagctgacaacggagacggaggcgctgggagctgcgtccatcagctgtggacgagcggcggcggcaccatacccgacggtggaggtgctatgtccactgacggccgcacaaccgacgacggagggggaagagccatgtccggcggcggcgccagcagcgccacgcccaacggcggaggagccgcagcgtccggcatcggcggcttttgaggtatggtgaataagattgagaagctcatacggtggttggcttggatctgtacttctcttgcgatttcaatggatcgaactgacatacgtgggattatggggatgcatcgaggcgtatccaggaagtatcggatttattttgattatttgaaaatcgcaaaaattatggatacgtacccgatacgtatccgtatctgacacggatacgcgagatttttgccgtatccaggtaacgctgataactactgaccacaatcggacttaaactagtgcccgtcacagatgaccttatctcaatcgggcatttagttatgacccgtcagagatatccaatatccccagctccccagcatcacccattcatatacatatgcattcacatacacagacatcaacatatttcacacaacgacacattcacagccagctcatatttcacatccattcaaatatttatcatatttcacctgcaaaaccgagttaatttgatcaaatatttatttagcaagccttaacataaacatatgaaatatatacataaatataaacatcacagttacatcatcacagttgcataataagtgttcatcattgcctaaacataaaagttcaacattgttcatcattttagtttaagcctaaacattcctttggggttaattatttcgcggaggatgaagctggctatctcctcgtgaacctcctcaaagctggtaggcagagacttggtgatagactactgt

SEQ ID NO: 3690 - DNA, 12360 bp, Oryza sativa
taccatggctgtgcgaccatatctcaatcgggcgaaacttcggcccgattgagattacttccttgtgacggcccgcaaattctagtcttgttatgggccgtcacagatggaaggatctatactagtgtttgtgtttgactaggcatgattagcgtgtgcggttgtgaagatagagatatattttctgtttctttttagtttgtttccttttgggtttaactttcctatttttgtgtgggatcggttcatgtgtacgacggcatgtatatatatgctggtcacggatgattagatggacccccgaacaaattatcaatctactgtttttcccgttatttacttttccgctattttttattttactttcatggctgagatatggcaacgctagaattcggttaatctttgccgttttgcgctgaaaaacggtcgtgcttctccataaaagcgaggaggttatcctttgctagtttgttcaaaaactagttgttcgtcatcacgtaagtacgatatctattttctttgctaatttgtgtgtaaaatagtcgcttgattccgcgaaagtgaattattcttgagaaatcggtttcactagccgactatcgattttggcgactctactgtttacaccgcaaatcattatgtgaactagtgttggccacgaaaaagcgtcaacagtatctggtgaatattctcaatctgaatttcattctcttattaagtgcactctggccagactgttctacttgtatgtactgtaaaactccgcagaaaggatgatatactgctatcatgttatccggactgcaagggaacgagaggtcatggtgaacttgtaccaaattatcaaatgaagtgatatgggccagagacgttttcgtgtgtgttgtttggagtttttgacatcaaatttgtaaataggatatgttatattgctgcacaccaaattgaaaatgtaagacacaaatcctaaaccttcactccgtttgagtttgtaaatatggctgcaagctagggctgccaattttatccatacccatttcaaaattagcttacccataaaataggtattattcagtggctatgggcaatactcatgtggatcccacatgtaaaatttgctcaaaagtttttggtattccaaccattcatcctccggttggtttagttttaaacttatgggtgcaagatgatcaaagataacttgccttgctcgagatcttaaccttcctccaaatccatgcactgcgagtcttcaggctttgaagctacacgtgaaacaagacgactcaacaaaaggccaaaagaaagccctattcatgatcaaaatggctttccctcaacagagcgttgatctcgttaagatgttgtgtagaagtacgaacaagatccatagccccctgcaaagtcgagtctagtgggttgagattgcttggagcacctccgtcgataacgttcacattgcgtggagtattggatgccgaagattcttgatcctccacactgtgtagaactgagggttcattggcggcaatgccaatgaatcccacgaatcgatttggagacccttccgtgctctgttcctctgcaatgtgtcgagcttgaactcgtcgttgttggatctgagggctcgaagatttagttgcgtcaagaaagactttgcagcgactttgcaacctgaaagctcatgtttttcttgacttctcgatcggacaccaggtagtccttgttggtgaagtacgctaaatgtttcacgccttgcaggcctcgagttcagccttcatgtgttgtaaaaccttgcagttcgttagggagtgattggttgtcttgtgaatgacacatcaagctgtagatctctaaggagttgtcctcgtgggtacttgattcctagtggataggtgggttttggccgcctgaggtcttctcccatatgttgtcatagtcggcagtctctcttctatcgggataggaagaacagccggagtgttgtcatttcttatagtcgtcgctgcgctgttctcgttcccgacagaaacggcggtcgcgtgcaccagcgctgcctccactcctcaacttctacggcatgggcaccacgacagttgatatcaactttgacacttctgatgaatttgttccgagatgggcggagttaagcagctcattgaaaccagataggccagcatctttaaggatccacacatagacaagaaactcgagatatctgaggtttgacatgacagccttttcttcactaaacatgataccatgcagatcaaaccggacatagcaaaagggtgtgttgaaaactctcaacttttgaaagtagccaccgttaggagtcttcgtgctgcttactatacctttgtattttgtatacatattcgaaggtaacgtagctctggtaaccccccccccccccccaaagggcttcaatgtcctgcccgtccaaaacatttattttcaattcgagatatgagaggtttggaagaagcgacaacttaatcaccacaggcattatatgaaacgtcaaggacgtcaaacacaaatatcggatgagttgacaggaagcgaatcctgcttcccacatgacgccttaagaccctgtttagatgggactaaaactttccctatcatatcggatgtttggacactaattataaatattaaacgtagactattaataaaacctatccataatcttggactaattcacgagacgaatctattgagcctaattaatccatgattagcctatgtgatgctacagtaaacattttctaattatggattaattaggcttaaaaattttgtctcgcgaattagctttcatttatataattagttttgtaagtagtatatatttaatactctaaattagtgtctactccctggatccaaacaccaccttactttcatcacgatcgtccaaaatcttcacggtctggatcttgtgaagattgcatagggaatccaaaaatgcagatgtctcatcctgtccatgaagacaaagatggttaattcgaaggatccttagttccctcagcttgccaagcaacttcacaaacagcaatgtatcaccaccgtaagaatacaccgacaactcctatagagatgtcactgggactgttatgaaaatagatacacaacggagacaaaaatttaacgtggaaaacccttacgggaaaaaaccacggatgtcgaccagcaatgatcgtgataggggagttggatacaaacgtaggagatacattgggctgtcgcaccctccctatgcggcttacaagggatatataactaggagccctaatagacaaagactcgaagtcctaatagaaaactaatcctataatgagcatcttttccatccttgaggaggtaccatgaggtacgaggtaccaatctaatctaaccgttgatttaacagaggtatgattgggctaacaaaaattaggtctctcttccacactgtcgtcgcccatcgagcccaccgccaccgtcgtcgcccatccatgccgctgtcgggcaccccaacaccgtcggccatcgaccgccgccgccgtcgcgcatcgagcccgtcgctgccgtcgagcatccagccgccgccgtcacgcatcgagcccttcgccgtcgtcgcccatcgaggttgccgccatcgtcacgcgtcacgcatccagccgccgttgtcgcccatcaaggttgccgccgccgtcacatgtcacgcatccagccgccaccgtcgcgcatccagccctccgccgccgccgccgccgtcacgcatcgtggccgccgccgtcagccatcgagcccgccacgcattgagcccaccgagttgctgtcacgcctctcgccggtctcgccgcaaatcctcaatctcactgctctccccgatttttccccgtcaaacagtaaaggacagaaatacctttccaccaatgatactgcttgaaagaggaggtgcagtaccatgaggtacggacgatttctgaccgttggatgatgctagatcaacgatcaggatttggtactgcacaacctcaaggacagtaaaaaacctctcctataatacaaagtactattagaaaactaatccgaatatactgtgggcctaaaattcggatcacatatttaactggaactataggcctggggatgtcgttgaccgtgtacctgctacgccttgcagccacctccaccaagagcctcctgttcatcttctggatgtcaccggcgatcttgcggcgagcgttgctctgctcgaacagtttcctaaccttcttcctaagccgtcggagcatgtgcgggacagccactggttccatggcgtcgacgcgcacaaggaaggtccatgtcgtacgacgcctccctgaggtcgtgcgcccacagctcgacagtcccgtcgagctgctccggtggcacctcgccgaccatgcggaggacggcgtgcacatcctcgagctcacgtgagagagactggatcttcttccttatgcccgtgtgcaggtcgtactcgtccttgagcatctggccgagcttggggagcagcctacccatcgccttcatcagatccatgattgcaattgcaagcagagctagcaggttaagctgatgttaattagaaacaacatatgatgagctgccaagcgtaaattgttctttatttgtgtgaaaactgtcatttatatatccgaacgaccaactataaatgaaaagctgaaattttttatctcaagtctctgacaactcccaactagctagattaatacagcagttcaccttcctgcccagtgacaaaactttcagttggaacttggaagcccacaagccccaactcccatgtactgataaccagggtttaatgtttcggtttgctgatttgtatcaggggtggccgaaaatttaaaaatttcggtccgaagatttagaaatttcggtctgaaaatttatgaatttttaaataaaatttgactgaatttaaacaaaatattaccaaattcacgagaaatgaaaaaaataaaaatttcggctgaaattatatcgtatcgggcggtccgatagaaccgaaatttccatccgaaattgtgaaccctgctgataacaatattcagaaattccaggccttacagctacatatccgaacacattcatatcaagaaatcattccaaattttaaccaaaagacctacttttttttgccaaggtgatttaatggttgccaaggcgcagagcggcgggggtggagctactgcaactacaaggacagattgggatggaggggatcgatcattgaggacataatcaggagatggaaccacggaaagtgaaagagggtggtatgcctgcttggttactccggggtccgggctttcccttcactttttttttttttacagattgattcctttgcagaacaaaaagaaatcatgcagaccgtttatcaacacgttttccacggatgagtgactttttgtcacaaggagtgacgtcttctcggtgtgcaaccaacatgtttaaactttgataatcaaaactttttgaataattattccaaaataaactttttgaataatttcggttcaacattttaaaatggtattgttaaatttgtcttaaaaaaatagtataactttggctatgtatcttgacatttctttatccatgtatataaaggtaaaagttgttatattttagaatgatggagcagtaataaataatataacatatctagcttactgtgtcaatatttaaaacatgactgatttggggtccattgagagtactgtactgtttcaatcatttgtaaggctatgtttagatctaggtgtgaaaagttttgacgtatcacatcggatatatggatagatatttgaagtattaaatatagactaataacaaaactaattacagaatccgcctgtaaactgtgggacgaatttattaagcctaattaatccattattagcaaatgtttactatagcaacacattgtcagatcatggagcaattaagcttaaacgattcgtctcgtaatttacacgcaatctgtgtaattagttgtttttgtctatatttaatactccatacatgtgtttaaatattcaatgtgatagggtaaaaaattttgccagtagatctaaacatgccctaacaccctatcatgctgtcggtgactcggttcagtcattgcagaaaaagcttgtcatgccctcaataattgcctggaatttacccaccggcaggaagagctgttcacacttcacatcacacttgacccatgcaacaagttgataaaaaaattaaattcatccgcaaggatcctcagaaggagggattggaaggtcctctctcgcgtcgccctccctaggcggcacgagcggcgacgcctcgtcgccaccttcctccccgcctccctcctcgtcttgcctcgccgccgcctgagcgggcgtcggcaaagccacgcggccatgaaggatggcggaggcggagcctcgtctcgcccatcccacgctcggcggccgggggaggctgtctagggcagcggcgatggtggctagatccgggccgagtctggctggatctggctggggagtggcttgcggcgggggctgtagtagcagtggcgacacctggtggcgaatatggcggcgacggcagcggagccccgtccaaatccacaccaccccggccggatctgggcgggtggtgactgacggcggggatgagtggtggtggcggtggtaggcgaccgtggtggccgtggctgtgaagtttcggtggcaggccgtcgcggaggcagcaagtggcggcggggtaggaggcatgggcatcggagcggtggagggcaacggtgttgctgaaaaacacgaggcctgggagatctgcttaactccagtgcaggtccaaactcgccttcgggtatgctagcgtgccagttgatttgatcctgcaatcaacaagaaataacgacaaaggaaccgtggttaaatccataaacaatagccgatcggctaaggggctgatgacatatcatttatctttgagccgatgacatatgtaggtcgatcggcggtcataaacaagtaaaaagggactaaatctactcaatcggctgtagatattaacaatatgtattccttatatcgatatatacttaaatcaagtgattgggatagatcggtcgccatgccgagacagtataaatcacttagattgaaatatatattaataataggaatagatatgttcatagcatagccgattagatagatctagcgtgtatcggctaatactccgatacaactctatattaagatattaaagcaagtagaatatatcaaacaaaagtctaatatacttaaatgctacaagatcttaatataaagggcagatttaacatgtcagtaaagcatataaagcaaatatagttaaatcaggtaagatcggctgaaaccccgatactaccctaatcggcatccaagaagcagactagagattgagattctaatcacgactcataagatcaaacaactgatgcagctaaaagtatgaaaagaaggacaatatctaaacaatcaagccattggaagtttcatagagtggtggataacatatataatctaagccaacatcgatatttaaccttatcggctggcctctatcaatagatgctagccgattgtaggttagatagcgatattgtcagagattatataagatatatgataactcgacgaattacataaacaagattagagtatcataaagatggaagcactaatcccgagaatgcaagccgtcataacaagttttacctcttgttgaagatcgaaaccgatgcagctcaacccgaaagcaagaactcgtcgaaataaaactaaagcaaaaagggtggcgatgcgccgagattgtattgaacgtgtgtgttaattgattacatggggttcggggtctatttatacccaaaaattacaaactacgtccatatcggacacgactcttatctctaacaaactctaagataccataagtctttgcggcagacttttgcccaaacatatctctaaggaaattatataaaatatcctaattaatagatacaattgccttttcaggactctatccatgcgtggcaatcatcttgaagcatatcaactcaacccgatgtcgtacaccaagtcgtgatgtcggaatcggctgtatcacttaacccagtctgactcggacttagccgattccaatcgtagccgatccggactccagccgattcctactctgtttccgtaaagatcttcatctttgatttcgcttcaatctaatcttcatctccgatgctgatattaccaaattttgtcattgacaaacggctcgcagcaagggcgagcgtccaggtggcggcggaggccgacgtgggcatgtaggcggcaatggaggccgatgaggggcgaccgacgcgtgcaggggcggcggaggacggcaaggcacagccggcacatgcaggcaacggtggaggacgacaaggcagcgcgtgcaggtggcagcggaggctgccggctgtgccacagtggtcgtgaaagttggcacggcacgaggaggtgtggtcggtgacggcggaagccagtacggcgcaaggaggcacgacaggtggtggcagtggcttgccagctatccggtggcggcgagtgggaggcctacatggaggcagtggaggctggccaactaggggcgttggtgcagcgatgttcacgtactgacggtgaagggttggtagttggagcaatggagaacagcttttgatcagcaggcggtggacgacgggtgaaaaccaagcccggccttggccgggccggcaatggtggcgttcgagcctcctgagggcgttgccgtgccgtctcaccccctctagtgtggctgccgggtgaaagccagtcttggttctctttaagaccttgatagacggcggcggcggttctttcgtcgctactttccttggagacgtcttctaggcacccccttgccaaaacctcccaagcaatgggtgcaatctcgcactagagtcttatcctcttgtgtcggcgtcctagcttccgcaagttggccacgtcgaagggcctaggggggagagcggttccattattctctctcatgctctctccctcattcccaagtatttggatagagcatagttatgtgttagtggtaagggttgggttttgagcgatctcggatgttttccgttgttggcttagcgccggtcggtcccgcttggcggcgaccggtctggggctagccttctcctgggtctgtgtgttggcgttgtcagtgtgtagatggtggtatactttttttttttctgattacgacctcctagggttgtaatcttgtatttttctcctgctatacaatagaatttcgcactgtctagtgcgagtctaaaaaaaagggactggaaaccccttcctacagcatgcaaaacaaagcatggattaacgaataactaattatgtaaatattcgctttaaaattataaaatagattaatgtgattatttaaaacaaatttatattaaaaatatatcgtttaacggttcgaaaagcgtatgtgtagaaaacaagagagtcgagattggaaagatagagtaaagagcacactctaactggggagtagaggtatatatataaatagacatgttgcaaattgtacagtaaccgtgctaactagtctggtaccatttcattctgttcaaaaaatagtctggtaccatttctagggacacattttaatcaagactgcgcagcaatcgtgccaactagccatcaatcggaaataagattgagcttacaagtacattttattacaggttgcagagtaaaatttgcggtgttctcaaataaaatggaagtcaaaatggtgttctgatcaggattacatcaaatgttcttcggctcgatctgcagtgcagcggctccctgttctgctcaagacagtactgagactcctgtgctaccactttgacaatcttgactcaaaacaacatggtagaatttcttcagacctagagatggtattgcagaagaggcgttgaaccaaattaatgggattcacagtaaccaactagggattagaatcagataggcaacctggggtgcatacctgttggtgttggccagacaacaccatcttatcttcaccatattttaccagttcaagtgtcgggcggtttgcgtggaagtcgactgcatatctcgcagccgcctctgctttctccacctcctcaagacatgcattttcacagttgatggagacactgaatttctttacgcatggattacgctggagcatctgtccgaggacaaaacgaagatcgtcgtcctttctctcatgcgcattgagattttcgacaacaactttaggaaagaagctgctaggctgggaaggagaagcaagtggccatcaagaaagaagaagaaaactaattaatatagagaagaatagatgatacacagctcaatcaccaaaaatgggagccagcggtcactgaaagttccaagaagtgttttataaatataatgttcttttactaacggtataaacgaatttaaaccggtatttatttatactgccacaccaagtactagtcgaatactctttttctaccagtactagaagtcataaaccaacagttgagacgtcttgtactgttgataataatagtagtgcgtagtataacagtaccaatagagaccatcggaaaaagtccgattgattaatcagcccatcatttcgcttattcgtggaataagtcaaacgctatatttgcaaaggaaaaataatatgtgcataaaacgtttatataagtgttcttagcgatctaaaaacagaggctaattaaaataaatttcaatgaaaaaacctcgaaataagctctaattttaaacttaaaaatttaaattttagctgataagtataaacataaacgaaaagatgaggcccatttgtgtgagcgtacctcctcgtgagggggaagcatttctccctccgaaaacttatggatttgaagggttggacggttgggatggatggcggctgcgtgtgccaacgccgcctccgcttcctcgacttccatggcacgagcaccacgacattggatgttaacttggacttgttggagcgaacttcttccaagatgagcgaagctaaacagcttgtcaaatccaagtatgtcggtatcttttaggatccgcacataaacacaaaaactgagagttttgacgtttggcatgacagctttttcgtctttgctgcacatgatgccatgctgatcaaaccggacatacaagtagggtgtgttcaaaaatctcaactcttggaagcaggcatcaccagcaccggcaatcttcccgatgcttactatcctgtcgcagtgtataaacagatggaggtatcgtagttttggtaacctcccaagggtttcaaggtctagctcttccaaaaaattcactctcaattcaagataagagaggtttggaagaagcgaccaattaatccactctggcattctatgaaacctcaaagacaccaagcagaggtatcggaggcattgaggggaagtgaatcctgcatcccacgtgacaccctcatttggattaagatttaggtcatgtccaaagtttggatcttgtgcagattgcatagggactccagcagtgctgatgtctcgccctgtccatcaagcttaaggtttttagcatgcagcaccctcagttccctcagcttgcctaggaccttcacgaactggaacgtatcatcactataaggccacaaatacagctcctgtaaggacgtcagcttctcgatcacaccaggcgacacccttacatcaatatcaacacgtagggacagcaattttgttagcaggcccactgactctggcagctcgtgtatgttagattccttcagatgaagtacttgtagaaacctcaaatttctgaattgctctatgagaggaatagaatcaatacaatctagatggaggaacctaaggtgaagtaaatttctaacatgctgcaggttaattttaccatcaatgttccaccaacggccttgcttttgtatttctagtacacgtaaaacttggaagctcggtaattgcatgttcttatcaaagcactcagtcataataagggaccttgtttgcttcacacccatattagccaactgattcctgttctcttcaaaactccaatgttgtagagctaatctacgggcatttttccatgaaagttcatgttccttactgccatctactacagtgacaaagttttcttcacctgacaataagaggatcagatcaagtaccatgtcatg

SEQ ID NO: 3691 - DNA, 23167 bp, Oryza sativa
acatttaaatacgggagggagtgtttattagcactaactaatcttgtgattaacactcatcacataattagtgtcagcgcgtgtgggcgtcgcacacgggctaattaaattcttttttctctctcacccaaacagagaactcgcgaaaaaaaaaacatcgaactacctatttctacgcgcgcgcgacttgatctttctgcgcgtgcgcgcgtattagaagcccccacatatatatatatatatatatatatatatatatatatatatatatatatatatatatatatatatatatatatatatttccagtaatttaattacaatgtatcactgacacatggaaaacacgaataccaaccttacaataataagtggtgctacaatacatagcatatatcctagacaatgtccgatatcatactccctccgttttgagatgagcacatatttgaccgtttgtcttattcaaaaacttttgtgaaatatgtaaaattatatgcctacataaaaatatatttaacaatgaatcaaatgataggaaaagaattaataattacttaaattttttaaataagacgaacggtcaaatatgtttaaaaaagtaaacgacgtcaaacattttgaaacggagggagtatatatttgtccaggtttattggctagaattaggttttatttagggtggagggagctccacatatagatgacacttaggccttatttagttggagaaaagttttaggtttggttgtcacatcggatatacggacacatatttgaagtattaaacgtagtctaataacaaaacaaattacagaccccgctaggaaactgacgaatttattaagcctaattaatccatcattagcaaatatttactgtagcaccacattgtcaaatcatgacgcaatcaggcttaaaagattcgtctcataatttacatgcaatctgtgtaattgattttttttctacatttaatactctacgcatgtgtccaaatattcgatgtaacagtgtgaaaaattttgttttgggaattaaacagggcctaaatggttgtaatgtgggccgcttcctggctccagattgtaccctaatagtttagctttgatgtgtacatctcgtgccggaccattcgtcttctccttatcaccgtcgttagtatcagccgtcacctctatttgctgctgcaacaatcaaatcataggtaactaattactcttttcgattcatagtattgtcgtttgaccttttttcttgttaaacatatttaagtttaaccaagtttataggcaaatatagtagtatttgcaatacaaaacaaacatgttatcaaaatatatttaatgttaaatttaatatataaaactaatttagtgctgtagatgttgctttttttctactccatccatcccaaaatataaatttttttagcatagtgacaagtcaaatatttttaactttgactattaataaaaaaccaattaaaaaagatcaatcaagtaaaattgatgctactatatttattattaaacaatctatcagaatatgcaacttttttaaaaaatatcttacttttatagatattattagtcaaagtagcatcttgagtccaaatatgcttatattttagacaaaggaattataaatttagccaaatataaaaaacttttactaagaaaaaagtcaaactgacatgaaacatgagcgagtaactatatgaaacatgagcaactaattaagttgctcgtcaattacttcttcctcccatgtaaatatttggcttttaccccatagagtcagtcaaacttttatatttctggcatcgataatttctcaaacgcttactttacggacaaaacaatagtagcaaacatatactctttgtctaaaaaaatactattatatataattgcataaatttattgtattttgcaagcttgttctagtatatataacttaatttatgtatacacactactgttataatttatattaaatataattttgttatatttaatagaacgcatatgctatcgtatataatattatattctcatgatagtatatatatgagtaaatacattgcattgacttactggagcaccgtggttgtcgcaggatgacggaggagaggcaccggcggcagcgtcgccgccggagttctccttctggatcagctcgtcttctagggctccggcggcgtggtcggcggcggacttctcgcccgcggccgcgttgtgcttgagactgcggctaccgttgctgccgcccaggaatggagaagaacaggctagacgaatcgcgctgccggcgccagggacggggaggcggtgagcgtgagccgggcggcggcggcggcgagcgtgcacaagctgctgcttgccggcgccggcggccaccgtcgagacgtcgaggcgagcgagcgccgggcgggccgccatggatgagctagctagctagttcgctatggctgctcagcaactatgagaagcgctctatttatagcctgcctgcatgtcgttaaacaacaacgactagattaattaatttgcatgttgtatatatatgtttaacttgaaagtttggcaccgtaaaaagtaaattataggtcccggcctatatcttttcgtttagacatatttaaatgtatatataggtatcttaatggtaatctcgggtggtatatattactccctccgttccaaaatataatcatttctagctataaatctggacatccgtcccaaaatataagcattaaattctagctatgaaactggataaatatgtccaaattcaattgattatattttaggacggatggagttatatcaatagaagtacatggaccattgattatgagttctacgtactcccccgtaaaaaaaaagcccaacatttgataggatgggatatggattggatattttctaatataatgaatctgaaccgtctttgttgttctataaaacacatcccatgcatcatatcatatatagctaggttgtctttttatcgacagagggagtatgtactattgctaggaaaaaatattattcatgctattgatttgagttgaggtgtagtataaatagaataaactattggattataaaaaaagatgaatagttatcaatggattccattttaaaacatcgcatgattcaaatgtgacaggttccccttttagttgtactagcaattcatttatactacacaagtaactaaattttgaacgcgtggttagattatatcctagtctctccataaaaaaaactcaacttgaaaggggatgcgacataaaatgaatctggacaatcatttgtctagattcattgtattccccctcctaggttaggtattttttacggaggaagtacatcatatatagcctttttagactcgcacatttgttcaaatatcatcgtacatgtaatgttctattacgtcacaaatttattcgaattttatatgtcattccaaattaatttggagccctaaatcacttggctatgtcgaattttttattcaatgttcaccgaattttaattaaagttcgacatgatgattgaagtggtttatgaatctgaatgttggatgatatatataaatttccgctggggctaacatttcagcccaaaatgagattgcacaccggtttacctttaatttcttagcatatgattttcttttgccactactaatataatatagtgaatccacaccagagacgacacacaacagacttagcttgtttgaagtcaaatttttgtattatttgacacaagtttcatgttaaattaaacaatgcactattcaaacatattgatttgggcatatctatttgcaccgtgacctttcttcgtactacaccaattagaaggaactagtcggtaattaacccattagtacacagttttgctgtactatgtacctaattaagtcattcaatccgcagctagttttggtcacctatatctaactaacggtgatgtatgtaaaaatttgacggatctatttattagtctaatccaatcatagtgacatgaactcacaataattaattagcacttaaaatgtcatctaagttataacccaagcgagaccactcgtcttattaaaaaaaatttatgcaaataaaaaaaataaaaaattgtgcttaaagtactttggataataaagtaacaaaaaaaataataattccaaaaaaaaattaataagacgagtggttaaacagagcaaacaaaaactcaaaatcccttatattatgggatggagggagtaaaagatagcacatctaaattataatctggatgaaaaaaaaaccatttgggtagctttttgttctcggagaatctacagctaccataagctccccaaacaagtcccaaatccttacttaagcagggagattctgacagctgctgctcctctttcagaatttccaactcactcaaacaatccagattctaacctagattcactactaaaaaaatgatttttcatggcacttttcttttatattttcagataaactaaaaatagtgccgccagtgaaaataacgtttatttttaccaatgaaaaccacataatctttactggtagatgacatacgcatctaccagtgaaaatcgatgattaagttgtccaccggtgaaaatcaattttataaaaatatgtacttttacctaaatttttcataaaaagtcaaatgaaaataaagtttagttgaaaacttttatgtttgaggttatttagagttcaaaatattcgttttaagattcaaaatatattttacaaaatttcagatatatgattcaaataatctctaatggacacatgatccttgtcaaagttgagctcaacgagatctacaactttgtagttcatgacatgttttcatttggaattatttagagaggcaaataagtattttaagttttaaacaatggaaatcaaaacaattaatagcattctgaatatacaaaataagtgcttcatagttgagatggtaatgtaatatatatgtgtgtagagaaaggacttgagatcgaatactacaaaccacacatttgtgaatttaatcccaaaaatgcctaaattgtcaattaggatgtgtagttgtgttatagatacccgataaaaatcaaaatatttttttcattttattttcgcaccggaaaaatcaaaatgataaagtggaaatcaattttcgttggtgtatgtgttatgtcacatgtcagcaaaaatcattttcactggtggttggatgctgtcaatgaagatcattgattttcactgaccgttaaagttggcggaacgtctagctgccaagaaaaatatgttttagccaacagaaaaaaaatatgttttttagtagtgattttgagaattatagaatttataattgtatgaaccaggtaataatcgaaaagccagaagctgaacaactcagccttttcttgattctcaactagctagttgcttcccgaaatctgaagctcgactaaatagggcgtaaatttacctcaagcatgatacataatcaggcagaagtccaataccattcaacaagtccacttggcgttgcaagtgtgtaagcgtgttaactagctcaagtgtggagaagacactaagctcgctaataggcgatgaatcaaataatatatatatcttcgacgatgaacatgtcaacatgaccttatgtccttataaagttgcaagtgtagacctaatcttaattattagccaagtcaaccgaaaaataccaatgaaaacatttacattttaacttaaattacgaatcacaccctgccgactaatgaagacatgcttccacatcaacacgcgcgtggttacacacacaaagctacaaataatactaccagctagcttgctatagtgtgtgaactttgacaggcaattgctgatcgtgtcttagtcatgactcacttttacgactacgaatcatcttctcgtattagtctcctaaaacaggagttagagatgtcggacatgttttacagcaatacctcaaatgatattctgtgtgcttgtaaatatgcgaaaaaaaatattcaagatgcaattatttcacatatacatatataatactccctccgatttttcaatgttggttgcggttgattttaaacatatgttttaccattcatcttattaaaaatatatataattatcatttatttattgtgattttttatcattacaaataaattaagaccttaggtcattggtgcctgttccataaccgacacccttgagatgcattggctcaattcgagctgatgctttgagctaagaacttaatctcaaatcatcacaaatctaaccaaaactaaatctcaatccaatcaaaatcatcctaaaataaatcacaggacaagagacaatccaatcgaaaatcacaaaataaatcacacaggagatgacaggagagggaggggcgagcgagaggccacccacattaattaggtaaaaggtaatttagggttcaattattaggaatacacaatttgaaaataaaaataactgaaattcaaaatgaaaaacaaccagtattgacaggacgatgcatgtagaacgagactaataaaaattaagaataaaaagtaaaataaattccgaatttataaaaaatagaaaaactgagttcatgtacgaatacaattgtgaaataagagacattcataacgaaaaataagaaatattaaaaagaatactccatgtagaacacaataccagattaattaaaataaaaaaataaaataattttcaaaattagaaaaattaaaaaaataagagttcaagtattaatataatttataaatactaaaaatcagaatataaataaggaatataaatagaagagaccatttaagaatccaacacaaaattaattataataaaaataaaataaatgttgaaataagaaaaaaagagagagagttctagtaggaataaaatttagaaataaaaaaaccgtaataaaaataagtgatgaaagaacagtcgatgtagagtacaatacaagattatttaaaattcaggataaaaataaaataaatccccattttttagaataaaaaaaatgagagttaatgttggaatataattttaaaataataaaagttcataataaaaatatttaaaaagttcatatataacctaaatgtgaaaagtaacaataatgaggggacaacgggtaagccggaaaggagtagggttgcgacggttgatggcacatctaatctaaaaacaaatgctcaatgacaattaggtttgattttttttaaatcccaatgactattaataagagggcagcgggcacaacgtgacgaagtagggtcgcggttgacatgaggtcgataggacttctagagaataataaaagaaactcaataattatcatgttcgatttttaaaatctcaatgataataaaaggggatagaatgagctgtaaaagaagtgccatggtggctttggtgagacttctaaaagtacaaaaacagaacctaactataaaaagactacaaaggtctgatatttgaagattttatggagaatatggagaggataaattaatagatgttatgtcggaccgggcaagtaaataattaggcggcaattcggcaaaggtcctagggatgatgtttggtgtgacttttaaaaactgtaaaattagaaattccattaaaatcctaagacaacgcctaagacaacgggatgactggatgcatattttaaaaaaaaataaaaaatcgtgagtaaaaaaatgtagataatattatatggttgttagctgcgcaattgtgtgggccacccatctagctgcaataatattgtagtacataatccgattaattttttgttgaaaattagtaacaaaataatcgaaatgatatgtggtagttcaagctttcaaattggtccgattccgcgcgggagttcggacgaccacgacgacataataacagtagtagagagattaaacacgggataatcctccctaacacggctcctaatcggattcgattcaacgcgcgtcactagcatataatcacccgcccggattagcgacgcataattaatccgtctacgtaggattttgcacacgattaacatctagcattatcgccaacgatttgcgatttgatcgtcgtctcgtctcgatctccggcgaaatcaacctacggccatggcggcggcggccgccggcggcgacgcagaggaggagaagcagcagcagtcgccgtcgtcgtctacgttcgagaggctgcacggcgagctcgtcagggaggccggggagctcgcggcgtcgtgcggcgccgacgtcaccgtgctggccgtcccccccgcgcgctcctcctccttcgccggcggcggcgtcacccgcttcgtcggcggcggtggcggcgccgccgcggtgccccgaccggaggaggtcgcgagcatgggtcccgatgaggtcgtcgcgctcgacgagcggctgcgatcgctcaggctcctcgtgatgcggaggatcaaggcggaacaagagaaggcggcgacgaagccatgacgtgttaattagctaggttgattgtttgattctaggtgtatatattgtcacatgtcatgattaaatttgtgttgttccaatattaaaacaacaggtcaaaatttctacaagtaagaacatacttgtgtaattctccaaaaaaaaaaaaacatacttgtgtgtgtcaatgtgtcatacagcgtttaatctttcgatttgtacgtatcggaggtgccgatatttttttttagataatgtaatataatatctcggcctttgctcaaaaagaactacagccaattattataaagatccactccagaagagagtgtagttcaagacaaattgaacaccccaaacaagagaagagaggacccaaactgagaaaagcaaaacaaaatgtggagctagaaggcctcgtcaaggactaggactgaagtttgaagcccatgcatagaccaatgacaatatccttgcatgaagaggtttcttcaaagcggtgcccgcaaggaggatgcgacgtggatcgctgccaccgctcgttcggaaccgaagcaaagtttttacccggagaatatggtagggaaaggaaaggggtatgctaaaacaacgcctccaaggaggggaacaacgccaaacggcgtcgccgttgtcagccagccaaatggcttggcaaggctttcgcccacgattccatatgcaaacccacaccaccaatccgcacaagaaggatcgtcatcggtcaacaacattatcccttcagcgattcggccaaggcaccgcccacagttgttcccgccgtcgatggcgcgcccgcacccggactcctccttccccgccgccagaccccttccccgcctccacataccgccgccgccgacgacgcaccgtcagccggatgatagccttcaaccattgccgccataggtaccatcgtcgacagccgatatgatgagtacttcacttcatcggatacgcacgtggcttcacacgtttcaatgattgttttaagtccaagtccagttcggtctccagggaaagcactgactacaaacggactagtgtcttcatgccaactttgatttgggtgatcttggacttgatgaaaaaattatctcgctacctttcaaacgtatccggtctcatatccaaattcatttttgagtcaacggaaattgtcaaaacaagacagtgttgttgctaaaatagaacttgggccttggaacctgtaataaataagcctatctcggaagtttctattttcctctatctatgtacgccctctacaacatttgggttttatttagttgaatttcaccaagtgtcattcatcttgtctctagtcctcactcgattagtcgacgactacagattcagagccctcaatagttggtgtgttgatttgccgggtcgattagatctaccactttaatctcaactatttctttgtgcgtaatcacctatatgcaatatttagattgcatcttatctcgttattgtagtgttctcttatttgcattgcagggatcatcaaccgtgcgtcatagttggtacgacatcatttgtggtgtagtgattgcacggcgtcctggacttgttctgttggttggtagccacatcgcaaacgtcgcactcgatcaaagcgagagttatcccctcaccagaaaatcgggccacgagatagatcgtcatcacgatataccgaaaatttaaacaaattttaatcaaacttaaacaaaatgttgctaaatttacaaaaagaaagtgaaaaaattaaaaatgtccggttttttttttgacccgaatgggtgggcacgacagctgtgtctagtgcgagtatataagcataaatgtaatagggagaggtatcgaatttgaaaacacaaaactattccctagctaattaatacatctcagttcttttcacttcttttcaaatcaatctactaactatgtcctataataattatatttctattatttgaatttgttacaaaatacttatcacaataaagtactaatggtttcattaatcacttctcatttaagtttctctctattttatccttaattatccttccacccttatctatacagtatttaataagggtattatatgtagtttttttggttaaatcttaatatatactaaacaacctacaattaccatttatataagacggagatagtgaattccttcctcggtacattagctgctttctattcggtttacctgctcaactgggcctgtagaaatacggcccataaactcaccctcctcaatttccctcttacattttgcctaaatacgaccaaaaaatagtcaacactatttttcttatgcaaatcttaatcaacactaaatcctaaccctaatcctactcggtttattagtctcaaactcaatgcttagtcatctcggattttaacgccaccaagctaatataatcaccagattagcggccgcttaatccgtaatcccgtctcgattttgaggtttttgttagcgatttggcgccactcgcgaaattagccgagcgatttcgatctcgtcgtgttctagaacgcacccggccatggcagcggccgccggcggcggaggcggaggcggcggagagagccagcagcagctgttcgagaggctgcacggcgagctggtcagggaagctgaggacgtggcggcggcgtcgttcggcgccgacatcaccgtgctggccgtctccccgcgctccggcgagccgcgcgtcagccgcttccacggcggcggcggcggcgccggcggcgaggagttggagcgggcggtgggcgtcagcacggaggagatcgcgcgcatgggtcgggatgaggtggcggcgctgctggagaggctgcggctacttcggatggtcgtgctgcggaggatggtggtccagaggcagaggagacggcgactccggcggcagcggccggcggcgccgccgcggagcatcatggtcgtccagaaaagacgacggcggcggcagatctgctagctataggtcgtctgaaatggttgattatttggttctagtaggtgtattaattgtgccatgatctataattcattgtgtaaataacaacgattgatcgatattatgattgaatttgtgtgttagggcaagtacataggtagagtctctactttaattaaagactatcacgttacaatatttaagataatacggtctctaaccattaatgtaccaaaatacttttttactggtcacctttcctttattatactcaatgcaacgaaaaatttcctaataaatgctaagagtcgactctatgccgttgtcatgcgtagcaattatctttctatttccttcttcctctctctttcacgtcaccaaatatgtttgcatgataatagagagaccgctaataaagaccattatacatgccctggtcaaatcatcaggtctggtctcttctactccctccaattaatgcctccatttcatattataagatgttttagtctcatcatgttttagattcactgatatccatataaatttgaacatatatatatgaattacatatatgaatacatgaatgaatctaattttccacgcaaaaaaaaaagaatgaatctaatctaaaactaaaaccgttgtagaatgtgaaacagactcatggtgtatagcagtgtatgtgcgtatgcgtttcatgggttcctaatgacaaggcatatctaaccctcgttgggattggaaaaacaacggttgtggcactagctcgaagatgagaggattggccttaagggtgtaagtggatcaaccacaaatccattcaggctaaatatactcatttacttaatctataagtaggtttgtggctatcccttaactagtctggttgacaccatcaagatggatggcgtgtggtgctttggggtggggccggacaagtggcaagagtgaccaagctgaatgagagtggaattaggcatataaatagcaacatatataattcttagggcaatcctgggtcctgaccatttaaaactcaaaccatcgtagaatgtgaaacagagacctatgaatagcaagccaacatgcatgatagtaagttgaaagtagttttttttattattattatttggcgtgcattcctctttttttttttcgccgacgatggcgtggcctctgtctattacgaaaaaaaaaaataatgctagtgaaaattagccagcaagtagaaaatgctaccacgagtattcatcacccagtctctatggcaacattggctccactaccgatctctcgtgtattcttcgccccgttcgactttactcaagacgaagacacatataaccagaaatcccgccattagcacataattaactagtgtttttttgcgacataattaattgagtgttaattattctaaacttaaaaaaataatgtatctaatattttttagcaacttccatataaaaaagaagtttcacacgaaatacaccatttaaccgtttgaaaaacttgcaaactgaaattgagacaagatttgtatcttactcagaaaatatacgtatatgtattatcatccgcgtgtaatcataaaaaactaaaacaagttcatactatcgaatgaacaaaaatactacctcgtttcatattataagtcgttttctaagacaaacttctttatatttaagcaaatttatagaaaaatatagcaatattttcaacacaaaacaaaaaaatatcaaaagatgtgcaacattagatgtaatgaaataaattggtgctataaatgttactacattttatataaatttggtcaaactaaaaaaacctataatatgaaacttaaggagtagaaaagaccgaaattttacctcctatgcttttcgattttgctatatatttatcgataatttttttctaaaaaattgactgatgtaaatatagtgcaatcttaatgtatttacattgtaatttgcatgtaaatacaatgtagttttaaaccgttcgatttgctttaaaaatcgtgcaagggaggaaggcaaaaaatcacaacccactgttaacgaccaaagttggtaagatatgaaccaggttcgacaatagagtcgaagcggattcggcaatgagatggattcgaagaacagagtatgcatcggctgcgaaggcatcggctggagtgtgcatcggctgagatggatcggatagaagacagccgatacagccgatagagatgaagcaaccgattccgacagtagtggcttcaaggctgtttctagaatcaatcgacgtgcttcacaaggattaccacgatggagataaagctcttagataggcaattgtatctattaattaggatatcttatgtaatttccttagagatatgtttgggcaaaagtctgccgcaaagacttatggtatcttagagtttgttagagataagaatcgtgtccggcaaggacatattttgtatctcgggtataaatatgacccgaacccatgtaatcaaacaacacatgttcaataacaaattcggcgcatcgccacccttttattctattttgacgagttcttgctttcggattgagttgcatcgattcgatcttcaactagaggtaaacttgtcatggtggcttgcgttctcgggattagtgcttccatctttatgacactctaatcttgtttatgtaattcgtcgagttatcatatgtactatataatctttgttagtttcgttacataacttgtcatcggctggtttttactgttagaaagtagccgatagagttaaatctcgttattgatctagattatatcgtatgtctaccatctctcagagattttcatcatcttgtttagatcttacagttattttatatgcttaatgctgcattggttaagttcgatctattaagttttatctatagttgtgatatctagcttgttttatgatcatctatagagatagcatcggagtttcagccgatcttacctaatttagctattctaatatcatatgcttaattgttatgctaaatctgccctttatattaagatcttgttgctttaaagttatattaagttcttatttgatatatcttgcttgtttcgatatcttagtatagagtagtatcggagtactagccgatacatgctaaatctatctgatcggctatgctataaacatccatataatctttgctttaacgtatatttcgacttaagtgattcatactgtctcggcatgacggccgatctatcccaatcacttagtttaagtatacatcgaagtaaaaactgtatgttgttaatatctacagccgatcgagtagatttagttttattttatctattaatcattgccgatcgattccaacatgacatcggctcaaagataaatgatatgtcattggcacctagccgatcggctatcgtttatggatttaaccgcagtttttcttgtctttattcttattgattgcagaatcaaatcaacaggcacgctcacgaacctaaaggcgagattttggacttgcacaggagttaagcagatcttccaggccagtgtgtgtttttcacatcaacgcatatgtgagggtattcggtactattacttatgttttcactgaaatagcatgccacctagggaatttcaaaagttacgacatagttacatacaagttacaacgtaattagaacatgattgtacaaatttttcagttgaaatttaacgataactgtatagctagtccaaggtttaatatttcggtttagtgttttgtatcggtggtggccgaaataccgaaattttaaaaatttcgatccaaaactatatgaaattttgaataaaatttgaacaaaatattaccaaattcatgaaaaaatgaaaaaaaattcggctgaaataatatggtatggtgaagggtgggaggggggggtccgatagaaccgaattttcgaaatttcgatccgaaattgtgaaccctgagctagtcagtcccatcctttttcatgcaaagtgataagaatggcatgggcgcggcaaacgcgggcggtcccaagctccgggcgatcgacgagccgccaaaaccgcggggcggcagctcatgtctcgcctcgccgcgcacatgacattgataataacaccgtcgtcagcgctacccaaattcccccaaggcgccgcaacgttccccgacgccggccggccgcccacggccctcgcgcgcatgggcggcttcgctccccaccccgtcgtcgtccccaccgccgccatggacgggaccagcagcgttagcgcgcggacggcctcgtctctgtcgtcgtcgtcgtcgtcgctcgacgacggcggccgtggccggcctccgccggccgggtcgacgctggagctgccgtcgcggaagcactaccggtacccttcccggtcggcgaggctgttccagaagctgcgccgctcgctcccgctgctgacgctggcgccgcggtgcggccggatgcaggtcggctcggcgagcgaggtcgccgcggcggcggcgtccggcggaggaggaggaggagcagccgactcgcacctgatgtcgcacgtcgtgtcgtcgttctccggcgcggcgcggccgatgcggcgggtgacggggacgctgttcggccaccgcaagggccgcgtcgcgctggcgctgcaggagacgccgcgctgcctgcccaccctcgtcatcgagctcgcgatccagacgaacgcgctgctccgggagctcgccaaccccgccggcgcgcgcatcgtcctggagaccgagcgccgcgcgccatccacggacgccgccgccggcaagcaccggagggcgccgccgctgctggacgtggcggcgtggaccatgttctgcaacgggaggaagaccgggctcgcggtgcggcgggaggcgacggacgacgacctcgcggtgctggagacgctgcgccccgtctccatgggcgccggcgtgctccccgcctccaacaggtcgtcgtcgtcgtcgtctcagtcgccggagaagggggcggcggcggcggacgacgaggtggcctacatgcgcggctgcttcgaccacttcgtcggctcgcgcgactccgagtcgctctacatgatcgcgccccagggcggcggcaccggcccggagctcgccatcttcttcgtcaggctatgaccaccaccaccacctactcgccggctcgccggcgatgcaccgatcaatccatcgccaccgccatcgcgcgcgccatgcaaagcaagacgaagggcgcgtcgtgattcgtgcagccctcttgacggcctcgagattcgtgaggagcaggcgagccacctcgactccctacgtcagagatggcttagcttaaatttaatcatctgattaagcactaatcttgtgctcttagtgggtgattaggttgtgaggaggtcattgcataaatcgggtttaatggtggtgcccaacacctcattgcacacacaatctagtggagtacggagaaaattatattaattaattaagttgcttgcttttgctttcttctctctcgcgtttaattatcggatggtaattttgcataatttatttgtcagtgcaaagaatttgagaattacatataaactccattttggtttagattaactaaatttttgcaccaaaaaattgtacatatatatatatatgtcacatataatctctatctcttctctactattataaaaaattaaagatctttttgccgatattttgatacggcatccgtgtttgagtcggttcttaagttggttccttttagaaaaaaaatccgtgtttgagtcagattttaagttcgtttgcatttggaaataaaaaagagttgtataagaaatctcttttaaaaaaaatttgcatgctaacttgagatgaaagttggactcatgattgcagctcatgattttctaaaaaaaataatatccaagcgaattcccccagtgaatttcacactaagtgaactgtttctttacctctactattataaaatttgaaaatgtgtttgtcggtactttgatatgtcatccgtgtacgaatcaatttttaagttcattcgcttttggaaacacaaatacatattcgagtcggtttttaagttcgttcgcttttgaaaatacagaaggaatcgtataagaaatctctgtaaaaaactcatatgctaacttgaaatgatcggactcctaatagtagctcatgattttctaacaaaatatatatccagccgaatttaacaccgtaaatttcaccttaactaaaccatataacaacaataaaattaaaatagccttcacccgttgcaacgcacgagcatttttctataaaagataaaactgagaaaagctccatccgctcaaaacagaggaaaattgtatatatatgttgcataaaatataaatttgagaaatttggtaaaaaaaatctatatttttttacaggtccattaggtatttaggctaaaaattaacataattaaccaaaaattccacattttcctagccatgatccacggatactatatgttagttgagcaaataaaatgtactccatccatctcaaaatataaaagtatttttaaactttgacatggtcttcgagatactattttgaccaattatatctacaaaagttatatgttttaaataaaaaaattgcatattatgataatttgtttaataatatcaaaattacatgattaatctgttttattttttactattaatagtcaaaattttaaaaatttgacttgacgctattctaaaagtaattatattttaggagagatgtttaagccaaacgacatatttgtaaacgagaagtaatttgtgaataaaacttttatatatatattcttagcgacctaaaaacaaatgctacaaaataaacttcgatgagaaatcctcgaaatcagttaaaaatttaagattgaaaatttaaattttagctgataaacatatacataagaaaaatatggggcaatatggggccggtagtagtattgtgggtgtctaatcaatcaaatcgaaacgtctggatcgattcgtcattatggaggtagtgaaggtattaatcatgccacgtagacaaaaaaatgtgcaccaagtttggctccattgtcgaaaaaatatcaaaaataaatgtgcaccaagtttggctccattgtcgaaaaaatatcaaaaatccggcttcctttacacgcattaaagaatgcaattcgataccatgcatgtcttgtatacactgtttaatctgaactcaggaatacattcccaccgattcgaaatagtattatattcgattccaaactgaactgtgcaatttgaaattaattaataatccggataaaatttctacaccctatggtcaaaaccaaaagtacaattactataacgttaatattatctcttaaagtcaatgcaatactcattttagtcaaacatacatggcaccatcaaatttttgaaactttaagatatcaaatttagaaatactttgtatggaaacataaaacataaaaaaatatactacatccaactcaaatatatagttgacgtcctaaattatctatagttgaacttcaaaatgttatgtcgttaataatataaagttattatgatttaatatgtgaaaattaatattaataaatttatcatgaaaaattttgtccgagaagtgggaaccagggccaccggtctttgggcgcgcggggtgctgtgaggcccaccactcttagagtagggcaatcataaggacgcaggcagttgccccgaagtataggaaaagaataactagcccgagcaatgagccaaggccccgaggtcgatcttggggctggaggattgtcctagctacaccaccacaattaaggagatttgacccccacgttgcctctcggtgtcattctgcgctaatagcataatgatgtgtttcctgtggaaaaaacgtgggtgataggacgtggcatccttctcactcttgcccacaacggtcttgaaaaaggtaggggatagtgaatgtgctgctgggcgacgtgattgttgcttcacattgcccgctctgatttgttgtttgttttggcccccttcccagcatcagtagctgacatgtgggcccaatgatgatcaaagtgcaagcctcaatcatcctgcgccacggggtcggaagaaagggtaggcactcgcattggacaaggcttcaccagatggaccaacgcaagaccaaatgtgcccactccaatatgttgggcctcacctatgtttgtatgttttaagatatccctttgctattataaaaggaggaccaagccatcgaaaaaaggattcgaaatttagacaactcaagctcactctccaagaaccacaagaacaccctgcaagccaaatagctaagcaaaaatcatatcagtagggtattacgtttctgaacaatccaaagatgtatacatcgtttaatgttcattgtttccacacgtgattcttcgcactcgagctggaacacctataccctagcaaaaactccaaaaggagggtatctagccttcccactagaggagcccgtgctacgacatatatatttttatagttgtatttgtttaatattttttatgaatagttaaatatattgatagagcatatgtattggagattgtgccaacgtttaaaacgtaagtaggaaacaacgctaggtagtaacagtaaatgtagatttgtctttttaaaagatgatttcttatcctcgtgaacttagtaaaatttacaaacttattcagataaaaacaataataaaagctatattccaaagacccaaaaatatcaaatgccatgtattttcgaccgaatagtgaataaattaatattacgatatactatatacaaagaccgtgcgttggaatagagacgtgaaacagaatccactatagattgaggtgacaactatgtggggaatttatatattttctagatatatagcctttttagctgctggaaaccacagaagatgtgcttaaatatgcaaacaaatcttagtggaggtggttaattatatacttatatgctactgctatacattattgcgccagctggcccattatatatacgagctaggttgtgtggccattagattagcttagctagagtatatacttcaattaagctcgccatatatagctaagctagctagctccacagctgtgagagtgtgagctttctgctacagctagcttagctccggccgccggcgccgccgctcgccatggccaagctcgccgcgcagctcaaggacaagttctgcggcctcatcggccgcatcaccagctgtggccgcgccgcccacaaggacgccggtaagtatatatacttattgttaattctatcgcatcagattattttgtcgtgaattatttattttgttttttcgtgtttttaaaaatatgtttggttaaaaagttttttcttctgtatttgttgagatcccttgttgtaagctactatttgctaagtttatcttttctaaaagtatttaatttgtgtctaattattgtcgtgaattatttgtttggtgtttatgtgaatatgttttgctaaaaaaaacttttttcttatgtattgtttagatcccttgttgtaaggtactatttgttaagtttatctttttaaaaagtatttaatttgtgtctaatttaattatgtacataggaataattcatttcaatcgtcagctaaaattattataccatattcagtttgtcgtatgcttcaactcggccggggtaaaatttttacccgacgaagcgtgtgattactaattttgctatttactcggataattaattaattttgctgattgcatcatgtcttctttctttcagcagctggtgtaaaagagacccattcggcttcatctcaggtactctagctagctcgtttaatcacttagttacgatctcgatctgattaatttggtacgatcggttattgctgatttttccaagtttaactcggtcaattaattaagggcgattattttttcataatttacatatttttttagaaaataattgctgtttccgttggtcatttgcgcagcacacagagataaggtcaaggggacttccaccgtctgtgtcaggagggtccaagccccataccaattaacagcgacaaattaccattgatcaaaatcgatagatctctctgcttaataattaatcaacgtctactcgttctaatactgtgtggtaatgcacaattcattgtgcaatagctatatgaagcttttcttcttctactatctgtttgctgtattttgagaattttggtgttgaccagttcacaggtgtggtcttcagactaaattaacttgcgaactcggggcttattcggttaatccctttaccatgtgtgaaattaaccgagcaagttaatttacaccggggattttaccggggttaacccccggctacgaaatgtatacatgtatgtgtgtatgtttagtggggttgtacagaaaacggctggttgcctaagccctccaatctcttccttaattagcatcatatatagcatgtgtgtgcatcataataagtgtggtggagttgtatgtgccatgctgtttagataatgaaaacaataagtgtattgctattttatttttttttcggtgtaagctagctctttggtaaaatgtttttttagcagttaattttgtaagagtctcatgtccccatcgttggcttatttcctaataagccaaaacggcttattaggaaataaaaataaatttgtaggtgaaacttttataaatgtgcttttttacttaaaagccaatgttgaaaaagaaactacgttgaaaatatctcaaaatcaatctcaaaattaagcttaaaaatttaaaatttggctttttctttggctgattaggccatccgatgggagcctcaccgttaaataattgagattatgaattattgtgaataaaaattttgcaatgtgactagctgtctacctccttgtgcattgagaaaatatccaagccattcctgaaataaatttggcacatggaaagacggaaaggtcttgaatgtaacgaagaggaaactaggaagcacatgcaacatttgtgaatctctgcaggttttcgatgtgagaggagtttattttgccttctcaaattacaactttctccgtttctttttcctcctcttaattattaacctcatcccacttttcccaaatataatattgaatgagtagataaaacctagcggaatggatgtggacaaacctctctgtccagattcattatactaggtaggataacatcaagtcatatttgttattattcagattctttgtactaggtgatttaatcttagttactatatattgggacggatgaaagtagtattctcttttatgagtaaaatgcattggcggtccttaatcttgtagggttgtgtcatataggtccctaaactctcaaaatgcatattcaggtcccagaacttgttaaagtatatcatctagttcccaaatcgacacatctcctctacgatcctacgtggcgctgatgtagcatgtcacatggacgtga

SEQ ID NO: 3692 - DNA, 10316 bp, Oryza sativa
tgatgttacatgaaggaaatgatatttctatgaactatgggcattgaggaactacttaaattggaataagtcaagcagcatttacttgataaaaaggttgattcggtcctttggacaagttttccacatttgctgtctccatccatgacttggattcacagcacacatgatccatgccacaaatcacagctctatatccttcagcaggtgatgtaaaattaagaagataaactaaagcatgttcactgaagtttaatatttgatacaaagtgtgctttaacacatgcaaatgttacatttaaggataatgacaattatgaaaaattaacttcttatataaagtttgaaaagaaatttgtagtagttatccattttctggatagcttcagaaataatgtgtaaacaataatacgaagtgggtagtatagcagtagtactcaccgtgtaccttatggcgtactttctgccctagtcgaaatgcatatttcacattttgatatgcaagggccttagcggagactgccagagactctgtctacatgatgtttgaagttaatatgttatttacacattaccatcacatggccggtgcactacagttttgctgtacctcaagtttagcaatttcatcacgcagtgcagctgccaaagcatagttttcactgtcaacggccttttgcaaatccgcactgaaacaaatggataaagctaagtgacctctcaaatgaaccaatgctacataacactagaacgtcatggagaaatggaaactattaacataccgcacgcgtaaaaggtttatagctttgtcctgagcttcagtctttgatgagcctcttttagcttcacgttgcctaattatcactgtttcaatctagaggaggatattttctttagcaagtctcatacaatgaattcatttatcttcaagtgaagtcatttggtacctctgtgagtttttccctcaattgttttgccacatcaaattgctctatattcaatgcatactagtaagaaccaagaaattcaatagttaggctggacgtgcataggtaagtatcaaacagttgcatgaaccagtgactagcaactaagaatgatgcaatgatcatgatagtagatttagttagccgattgctactagtctagggaattgatccgtgaaaaaagaatagctgccggctggattggtaactttattcgctttagaaaatgatggtaaggaagcaacaactcacctgtatccgggtttgtaggtccaattggaagtagaagattaagatgtcttcgttagcagactcactgcgttccatccttgcattactactgctacggccatctcctccaaatagccatctagcattagttctcaccgtagtacccatttgccttctattggtcctcatatgtagttttttcacacaccaacgccacgagtacgctccacaggttactgaatttattttgtaaaacagcctcagatcatccactgcaagacaagctggtctaaagcatgatccatgggccgaggaaattgaaccacatgcaaaaatgccttgcattgtattagtctgagacttgaccagttcaattcccacaactgatgcagtccaatcaccacactgacagttgcaatcagcaagtcagtgggatccccaactgcgcagagatcaagaacattttgcttaaaactagtacaaaatgcactgggtaactgagaaaggctttgaattgtggcatctaaatgattacaaactactattaactaacaaactaacaagcagtgcttggaatcctaccatatcgtaaatgtgcaataaacattttactatcttctttttttgttcgtagatactgatcaatctattttgaattattaaaggtaaatcgcacctaacgtgatccaggcaagtaggcaaagaaaccatcaaactctttggaaataataaagtgctagtacacaccagtgcgtttcgtttcgagtaatatctatcagtgctctctattatcacgcaaaaaaaaaactcaaaaactaatgggttatacgggagaggtaaggggttttgcccgcaacagataaaatgctagaaaaagctacgaaaccaatcaaaggagccacagttcatcaccaacggaagaaacgaaaccaatccaagtcatttcagaaagaagaaatcactcaagtcctaatgggactccgggctacgccgaagaaacgaaaccaatccaaatcatttcagaaagaagaaatcactctcaagtcctaatgggactccgcgctacgccggccatgtagcgagcgtggcgcgcgcttcggtggaaggaggagtccgggaagcgtcgacgagaggcaaaggaggaaggaggaaggggccacgctcttctcggccataactaccactggctcaagtgtggcggtcgtcgacgcgataccggatagaatgtgtaacgcctggatcaggtgcagtcgttgcatcgactgcaggttaagcagttggggtgaaactagaccgtccaagaaccaacgaacgtctaggattctctaacctcgccttctcctcccgttcccttcaggtgaaggatttagttacaactaaggaaaaaaaaatgggacttttaactatttgccactcttacgagtggtgcttaacaatttgccactaggcccacatgtcatagacaaatgagagcccacatgtcatagacagcgagtggcaaatcattaattgccatatcccaaaagtggcaaatagttaaatttcccaaaaaaaatatccgtgcattgcaacagataaaaatgtttcatagtgataccaccgtaattaggaatcaagtaatgaattgaaacattaggatcactatacagtttaattaaaaaagttaatgaaaattttccttagttcttttccttagttttgggcctaaagtccattctttcattcctttttagtcctaatctagttcgctacctccctccactcagcacacctctcttcagtttagcccacaagttttgaaccaaacattaatggtaaaaaaaaattcagagattcagaagtaaaaaaatgtgaaagattacctagtgggcaagttttgaaccaaacattaattgtaaaaagaaaagaatcagagatttggatttcatagtaagtaaaaaaatgtgaaagattacctaatggcagcagctagtaaatcatttaaaaatatccgtgcattacaacggatgaatacaatttattttaataattaatttgtcacatggtaaatcatccgttttacttattgatacttaataaatattacaaattatgtgagtttggatgagtacaaatgatgtgagcttacatttttcgttctaatgcaactattctaagggtgtttggatgagattcagtaaccaaattacatccgctaaaaacaaaaatcaaaattaacaagttgaaagtaggtggaactgggcagaacacctgatgaggtgtgggaagggagggatgctcaccggcgagcgatgatgcggtggatgcaggaggacgccgggcgaggagacgaaattcgaggacgaggccgaggccggatgggatggattaggatgctcaccggtgagcgaatgcagcgggagcaggagaacggcggcgccacctctgctggcaggatggcaggcgagggcggcgggcgaggagatgggacggattggggagggaggcggaggtgcagggagcgctgttggtgcggcaaggcgtggcgagggatggacgcagggagcacgacgcgcaggcgcaggtagcagagcggaggcgcggagcggcggacggccactcgatctggattggagtttggagatggatgacaaggaaggggaagcgatatttttctcttcggtagacttttctattgacgcatgctgtcatggggcctttgtttatgggccatggaagtcctacagatttatctcgattttttttcttttttcttttttattgtttaaatatttacaaaaatattataccatccaaaatatttacacaaatagtcccttgccgctctctacaagggctgcaagagggtagtccgtccctcacatcaccctgtcgctctccccgagggcggcagggtctacttctgtaaatattttctccggcacaatatttctgtaaatattaaaaaataaaaaattaaaaatgaaaaaaatttgatttatctctacatgtaagcttgttaagcctcgcgagcaactcgtgagccagctcgagctggctcgttatgcctaacaagttgaaattgcagctcggcttgtttcaaaaccataacgagccgagttcagtcgagccaagctggtcacgagccacgagcttttcgtccagccctatgggtcatatgcacaggcccatgaagctggaattttttcatcacccaaaaaaagttcatctaatgtccccttatcgttgagttttaaacggtcctgaaccctctaatcttgtaaaaccggatcacttttgataccaaaggtagtattgtttttcggttttgttgacgtggtggctgagtcccacgtggaccccacaagtcaactggcaatcttcttccacctcactccccctctactcccatctcaacccaaacctcctaggcatccgccaatgggtggggagaagggtgtcggtcggcgaggaaaagctcgacggccgggagcgctcacatcatggacttgcgtgggcgagtggtgcagcgtgggtcccaactacaactgcaatgtcgtcttcacatgcacgcgcgcgtgctagggtttctgcctcgtcacgctggccaagctcctatccctcaagctcatagtcgccctcggagctgttcaaaagccgatgtgtttaggtgtcaccgagctccgcctctcgtccgcagaggagcacgcgcggttccgccgcattgtcttcgaggtcaactccatctgcaccacattgtggtcgcatcgtcctcgacgcatgtgcccttctccctgtcgttcgccactgccaagcttcttgttagctgccagccttctccccacccatcgccaggcgccgttgtcgggcttctacctactgccgccacccaacgaccaccacctttctccctactggtcaccggccaccacacacctctcccgcgattcagcgtccggcgtcctcttcatgtgcatgcatggacactcatggagttagtggtgctcgcgactatgctcaggcatcgcaacgtacttcatctcccaactgttggggatcctctcgccaatcccgatggtgtggctggcatgcgaccacgatgcggacgcggcgtagatgcgtggcaagctgccacgcaacgatgtggcagtgtaacccgaggggacgacacaggtccatgacgcaggttcgcgctcttcgccgtgcaggtccatgacgcagccgtcagtcgccactcttcttcccacctgttgtcggctgcctaggaggtttgggttgagacaggaagaaaggggagataggtgggagaagattatcggttgacatgtggaacccacatgggccccacgttgactcagccaccacgtcaccaaaactggggagcaatatttccttgggacctaatgtgacctgcttttataagattagggatatgttatatctggtattttagttcaaggacaattttgaaactcgatgacaaagaacctcaagtgaaccttttcctttcatgtctctcgtttcgatctctttcttttaagaatagcaaagatgctcgtgcgtttgcgataggaaatccaaattacatatgttatttttttcatgttcggtggcggagagttagatgatggatatttcgggcccttttttcatcaacctgagtgggtctcatgcacgtcatggatggaacatatgatgggtttcccttagagataatcaatacctgaaggtgtaattacttattggtgtggtataaagattttattttttgctgcaagggcacttatcactataaaaaatgattttcgcatttggctaaaatatctatgtaaaagaggagggatatttttgcatacggaccatttaagaggtcatgcggccccttaagattaccgcatggaaaaataggctcatttttacatgccgctctttaagagtaccacatgggaaaatggatttctgcatgcgagtctcttaatgagccatatgcgaaaatagagctcgatttttgcaaacgcaagtagttacggttcgcttgtaatctgggttctcgtatagaaaaatcattttttagtagtgtgaataatcatagtggcaagagctcaccaaattaagtcgttcttaggctatctaacacaagagaatatatcaaaaccatgactaccattttcaaaatgaggaaaaaaagcgaaagagcctatagcctagtggttacaagagcctccgtagcatctaaggtcctaggttcgactctccataggagcgaattttctaggatttaacggcgttgtgctttcagtggtaggcgacgtacccttcgatagcgaggcacctgtggtgacttcgtcaatctctccaggaagatttgccggcccagtctttgaagatgtttataggggtagggtttgcatgtgtgtgtttataggggtgagtacgcatgcgttatgagcgtctgcgttgtactaaaaaagaggaaaaaaaaagcaagaatagcacatcgatttgaaccagctacatccctttttcttataatcaggcaaagattagtacaattcagcaattcaagttggcgttccaagtgtaaacacgtcttaaaataaaaagaaatgggagagcgcactcgctaacagggatatgatataacacaaaaatatactccatccgtattttaattattttaatatatgacggccgttgacttgttatcaatgtttgaccattcgttttattcaaaaaaaagttatgtaattatcatttattttattatcacttgatttatcatcaaatattatttaagtatggcataaatatttttgtatttacacaaaaattttaaataagacgaatggtcaaatgttgttcgaaaagtcaacgacgttatacattaaaatacggagggagtactatcatgttcaaggcagtataaaaaaccatttttacatgcggccaatttcacatgcgaccagcacaaccgcaagcgaaaatctcaatttttgcatgcggtcaccaataccaactgcatgcggaaataaattcgacaaaaaaagatttcaaaaaaaaaacccaaacactagcctgccggctggccgcttcagccgctgcctgtccgctgttgccaatcccgaaggcgggagtggcagatccgcccgctgccgccgctcccgagagctgggacggtggacctgcctgtccccattgttgccgtccaccacctgccgatctacccgccgccgtcgctcccgagggtggaggcgacggatctgctcgcccccgccactgccgctactcccgtggtcgtgggcggtggatctgcccgcaaccaccaccactgccgctcgctctcgcttggtggtggagaggagaggaaagaggagaggagaagagaagagagagaggggggagaggaaaatattagaaggagagggatgagagaggtggtggaaaaaaattgaatttggtgaggagggaaagatagatgagggaaaaaatactatggagaataagaagatattttcgcatgtggactagttaagaggcccgcatgagaaaatatattttcacatgtggccccttaagaggacgcatgcgcaaatagacttatttttgcatgtggctccttaaaaggtctgcttacgaaaatagattttttatacgggtctcttaaggagtcggatgtaaaaatatcgatttttgtagatgtgaccagttaccgttcacctacaacctacaggggtaaaaaatagtttttttaagtagtgaggagttaggtttgacgcccttgtagtgtttgcaaggtttgtagacggtatttctcttcttttttagatgaatgtagacggtatctaacatttgttaattaagtcaacgaaaaaacaaataccaacatatatacatatgtttgctttctaagttgaatgtagtgtacacacttgctgacttggagaagttttcacatcaacgcgcacacggatgcgtacaactgcgatactaagctagtgtagtctttttttttttttgaaattctaagctagtgtagtcaaaactttgaccaacgattgtcgagtgaattggccatgacggataattttgtaaatctaacatgtgaagattgttgtttggcatataaagtgccacatatatacatttggttcatcttttatatataacaaaaagtttcattagtaaagaaaaactatatttgttttatcatctattttattattaatacatgaataacacgaggcatcactttcaccgtggagattagacatttccatattaaccagagaataagaaaaattagaattcaattagatatataatttaataataattgaaattcagaataaaaaataatcaatattaaaagaacgatgcatgtagaacaccaaacgagattaataaaattcataaaaaaataaagtccgcaattagaaaaataaaaaatagagttcaagtacaaataaagttgaaaaatatcttaaattcgtaataaaaataaaaaatattaaaagaatagtcacgaggaacgcattacgatattaattaaaattttaaataaaaaattaaattaaatttgaaattagggaaaaataaatgttcatgtaggaatataatttagaaataactaaaatcaaaataaaactaaggaatgtacaaagaagaaaccatttggaacacaacacaagattaattaaaatttaaaataaatgctgacattagaaaaaaaaagagagttcatataaaaatataatttagaaataattaaaattcaaaatgaaaaaaataaaaaagtcaatgtagaacacaatacaagattatttaaaattctaaataaaaatagggcatttaactatttgccacatttagatttagcgtttaaccattcactacccatatgccaatgccatgtggtttctcttgtgtctatgacaagtaagtctagtaacaaataattaattgtcacatttaaaagtggcaaatgattaaatatatcttaaaaaatagattccaaattttttaaaaagagaaaaaataaatgagatatcaagttttggaatacaatttagaataataaaagttcagaataaaaataaggaatattagtaaacaattcatcaaaaaacataaatattgcatatgataataaagaggggttatcaggcaaaacataaaagagtagggtcacggtggttgatgggacatctaatctaaatatactatcttcgtatcagaatgtagctatttctaacacagtaacttgtcccaaaatgaagctatgtctccacctatacctcatcctctcaaccaatcacaaccattctccttcacctactttcttttttcaaccaatcacacccttttcttcaattattctcatctactttcttaatactcgtgccaacctaaaaaatatctatattttgggatggggaagtatgtgattctgtggtgtggtccttgtaaacttttatgaatggtaaattcgcaatggtttgtttcaggggataacgggatatatgttgatatattgatatggtgtgtggatgatttgttatgtattatagagcatatgattttaaaagcatctgtttgttttatgcgggaaggggggattcacggggattaattcaccgtatgaggatggggatggtaaaagttttatccctatcatgattggttgggacagggtcggtgaaatttgaacctcacattggcgaggatgcagggagcaacctctgatggaaaatttcctgttgccatctctacccctagccctaagcgtgcctccttgacagaccccgtcatgatgtggtccccattagagacttagggtgtgcgttcgtttgaacaacaaatgagagtcttcgtgacttagggtcgtttgaacaacaaatgagagtcttcgatttctgtacacacatttcctgaactactaataatatgtttttagaaaagccataagaatgttgctctaaaaataatattaatttatttttaaaattttaaataattaatactaaattaatcatatgatagttgctcacattattttacatacttttttttctcctcttaaaccttctatttgtgcctaccataaggcacagggaggtgtca

SEQ ID NO: 3693 - DNA, 6976 bp, Oryza sativa
cccccccccccccccccccgagggggtcaggccacgtgggtgaccgcggctacccaagcctctagtcacgatacccccggccccatgtcaccgacaatatgtatatatatatatatgtatatatatgtatatacatgtatatgtatatatatgtatatacatgtatatgtatatagatgtatatacatgtatatatatatatatatacatgtatatatatatatatatatatatatatatagatatatatatgtatatatatatatatatatgtataatgtatatatacatacatatatatacatacatatatatatacacatatatacatacatatatatacatatacatacaaacatatatatacatacatatatatatggcaacatatcctatgcacacaggccctcacgtgtacacacgtgcacaccaactaaaaaatgtcaccaaaaaatctagaaaaaatcatacatatactttcaattgtattacacccagggttaaaatcttaacgtcaaattcattatattttagccgtaacaaaaaaacaaaaaaactgacagttttaaggttgcaattttgtcagaattttatcttttttgttattctctatgtagaatgaatttgaagatgcgactttgcacgtagatgtaatactattgaaagtacatgtatgaattttcctagaattttttgtgataatttttagttggtgtacacggtgtgtacacgcgagggcatgtgtgcataggatacgctccctatatatatatatagttagactattctatacccccctcccctcccaatttccccccaccccacgcgcctccccctccccacccgagtgctcctcgcgattcctcctcccccccacccccggagcgctcactcctcctccctccttttttgagagaaaaaaaataaaggaaaaatttgccttcaatgggaatagaactcaagaccttcaactcaaattaacacatggcactaaccaataggctatttcttagttgtgatagagttttcttagtaaaacttatcttctcatacatcacgaaatatagtagcgcgtccggttactacaaatatataggttcttattacagccaagtgactagtattgctgggttaaagcctcacatactaaccatatacttgttactgcacaaaaatagaagtgttactacatgataggtgcatgttaccactttcaagtaactatgttactgcacgacaattgtagttttactatgtcatttttacgagatgaagatcgaataggtgggctatatgtaaagtctgtaggtggctttgagcgaggtctgattgatgtatgagtgttttgaataattttatacatttggtaaaaccatgttactgcatgtatatgtccttgttattgcaaggtacacattctgttactgcatgtggaggattaaagttcaaaatgccaatttttgaaaagcaatatctcataagatatgtattattttttaaaaccgttttcacaatgatactatagttttactgcatgtggaggtttaaacttcaaaatgtatctacatactcctctcctcaagaaaccgttattcctccctcttctcaagaaaaccggttttctccctccaatatagtgttactgcatgcatgtatatgacgttactgcacttttaatagtaatattgtggtgaattgcagtaaatcaggaattgaaataaaaatatatgggttcaaagtctcagatgctaatcatatacttcttactgcacaaaagtaaaagtattactgcacagcatatacacgttaccacctgacatttacacattaccgcatgtttatgcggtaacactatccaagaactgtagtaaaacactttgttactatagaacatatagaacgttattgcacctttggcagtaacatcgtgatgaaattgtagtaaatcagaaatcaaaagaaaaatatgggttaaaagtctcacatgctaaatatacttgttaccgcacaaagtagaagtgttactacatggcaggtacacgttaccacatgtttatgcagtaacactatgatagattaattctagtaacacgctcggttactggaaaacacatagaccgttactgctctctagcactagtgtcactacacaattttaactagttgagcgttgtgtccgcataggggattgaccaagaataacctatggtagatttattctagcactatcaaagatgcaaatcaattctgttacatacggaattatagtaacatgcttggttactacaaaacacacaggttgttacgtcatgtaagaactattgttactacacaattttcacaagattaatgttacttctgcttaacgattccatagagatttacttgatggtttacctctctcccctcacccacccaacacgccctctattcgaatttttgtttattgtgaaagcatatgttactacaaaatatataggacgttattgtacttttgatagtaatatcatggtgaaattatagtaaactaggaatcgaaacaaaaatatatgggttaaaagtatacatgctaaccatatacttgttactgcacaaaagtgtaattgttactgcatggcaggtatacgttaccacaaagtttgtgtagtaacactattcaagaattacagtaagatgctttgttactgcaaaacttatagtatttaccacactttcacagtaacatcgtgatgagattgtagtaacgtacagcaggcagtagtaacacttatgatatagtattattacttgtggagagttgaatttcaaaagaccaatctttgaaggttcgttctacccttgccccacgagtaaagcgagccaattcccctctctccatgttattgtactttttttcttactatatatatcgttgcagtaacgatatcaagtaattacagtaatacactatgttattgtatattaatatatagtatagcctacttgttgactgtaaggctctttgcagccttctcttagcccgcccactcatataatagttagctgtttacaattaatacatggcccatttgtctctctcatagagtttcttggttcttatgtccaagccagctgtaagtttacagcccgcttctcctctcttctctcctccacctcagtatttagtcggcttacagcctgctattaactcttaagctaaaataaaccagtaacctgttttatttaacttatataaataagttcacaggttggccactatacccctatccccatgtacagattaggaagcaactactccctctgttcttagaaaaagcaactcatcttaggcatgtttagttctaaagttttagttctaaagtttttcttcaaacttttaactttttcatcacatcaaaaacttttctacacacacaaacttccaacttttccatcacattattccaatttcaactaaacttctaattttggtgtgaactaaacacagccttattactaggttgattttttttgacaaaaaaagtagtagtataaaacaacggaatctgctgcgttctaacctcaaggttcccaacctttctccctcgttttccgcgcgcacgcttttcgaaatgctaaacggtacgtttttttacaaaaagtttctttacgaaagttgctttaaaaaatcaaattaatctatttttttaaaaaaaatagctaatacttaattaatcacgtgctaatagactgctccgtttttcgtgcggaggggatgggttcccaacccagtagtagcctagtagctgtgcaagcactatactccatgtaaaagcatggcatcctgacgatatccggcgcttcaaacgtgagaaggttgtccttgtcacgacgacttggccagtcggtcgtgcaagtggggattctacgacgtctttgcactcccttccagtggcggatccaggatttcaacaaagggtattcaaagttgaaaaaaaattcttatagagctcaaaaggttggagtggcaaaatttaaagtacaaatactagcataacaatatagtagtaaactgataatgacatgtttaaaggtacaaacagtagcacaatggtaaaaatgtctaaattataaaatggtttgaatgaattacatgaaaactgaaacaaattacaatttaactttgcgggtagccatggcttggaagcgagaaatgatgtcatcatctgttacttgcacaaaaagatcacgctccagaaaggttactaaacaacattcaaatattgttctcccattctatttcttagcttgttcttgacataattcatggaagaaaacaccctctctacactagcagttgccacaggaagaattaagaccaatttgagaagcttgtaaacaaattcataagcggtgtgcttctttgttgcaacaagcatggtggaaagctcaaccagatttttcacatttttaaacctttcatctttacgaacaaaattgataaagagagtaagctgaaagggaagatgtaacaactctgtttctgtgaagtcctttggataaaactgagcaagctaaccaagttttccttgttataagcagcaaatgaatcgataggattgaaggatgccatgcaaagaagcaactccgtgtttagaaatcttaccacgggctagcaggcagcagcacgggtagcagtagcagaccagccgccaatgcctgaacgccatcgcgccgtcgccggctcgccgccaacgccgcaaatcggcaaatgccgtcgacgcctcgcgagttcgcgacctcggctgctcggcggcgctgcggccggcagcctcggtgtcggcgatggcgtcttggcgacctcggctcggcggcgtcacgccgaccacccaggcgcccaagcagcgagcgcccctcgcccgtcgccgtcggccgtcgcagccgcagcgtgcagaaggcagcagcgccgcccttgcgtctggtcctctggctgactgggattggggattgattttgattagggtttactcccgtttcgggccaatggacctatttgctgggccaaggtggtgagggagagggaatctacgggctggctgctactgataagtgggcttttcttcctttgggctgcacatactacacttattatgtatgattgtatatatatatatatatgcatcacatacctatatataattatttttttggaaaattctatgggtattcaggtgaatacccatgaattacattgcatccgcccctgctcccttcttctcaggcacggcagagttctagagagcggcatttcaacatcagcaacaccaacactcccgaagcttttttttttttttggttattttccccgagcgtcaaaaattctgtggtttgcagttttccacgtaagtatattccaactttccaatagatgtacgtcaaccctttgctttctctgcagctgcagagttgcaggtttgatgaatgcagcttatctacaaaattcccatcagagggaacacagttacagaagaacttggggaagtacagactgcaaatccacaaggatcttctttagaaccgtatatgtaaagggcttcatggattggccactatatgggtgttatcctcaatcgtgaatctgcaaggtcagatatcaatatatcaaatgcagattgcctcattgcagattgctgtggattgttcaggttccaggttagcccagtcaccagtcttcactgacattagcccgctgtagttacatcagatagtaacaagctgtcaagctcctccaccatttcggaactcagtcggtggtaaggcatcggaaatggcatcaaaacaactcttgctgcctacctgaatgtatcacgcagggacagataatattaattttgtggtccacttgccaattacacgaacgcctcattataagtgaaaaactcacctttcagctatccgtgctgccatcatcgtcatcttcatccccagaagcttcataacgtggctgatcatacttctcacgaagctgcttgataggaatgaagtccccagcagtgtcctcgccaaaaaacagaaattcaatataggggtgatcaaatcttccctgtaaataaagggggacaggcggacagcattagttcaatttgaccaaaaatgaaaaccaccaagcaaatgaagaactcaaactcactttctctggtatttcagcctctgcaagattttcttctgcaactgaaattatacagacataacatgtctcaaaatggcacatcatagacataaaacagtaagtgaagatggatttgatcatttgactactgaattagcctactatcttgccttcttctgccattttacacaaaacaagattgctcattaaaagttacagatctcaagatagaatttccaccagtggtcatgtctatcaaaatagtggaattattttgacatgagaatcagcacatagttgttcattttcactgagcaaaggtaatttataaactgagtagagaacctgctagtttatatttttcaggtcgagtaaaaatatagtgagctgtctctggtgatttttctgaacaatagcctgatgaggcttctttaataacagcataactaaagataaagtcgtaataaatctgagttagcatatggaaataaatgttttatgtgaaaatatagctcaaagtcaactgcctcataaactaagtgtaaacagtggaaaagaaaaatcaataccatatgcaacaaggagttctggatcagcatatacatcaacaaggacctgcaagatttcggcaatgaatcacagaggatcactaagcatctcaattctcaaaagactaaactatgcaaacacatcagtatgcatgggcaatatcatccaaaagtaagcattagttgcatagagaaacagtcaatcgcaggctaataaaattgcatcatgaacgtcctgattataccgaacaaatccaaaagggaggagaaaaaggcaatg

SEQ ID NO: 3694 - DNA, 2370 bp, Oryza sativa
aggtctaaaggttgaaatgatggatcaattaaattgtaaacatgattggattagaggaaagggtgactataatatcaaatgtgctttttgcatatattaccctagtcaagaaaatagagtgacttgtagtatatgtctaaaacaagcttgtgctgaatgtataaaagcaaataaacaaaaatggagaaaagaaatagaattagaatcagatgaaaagactttatctagtagagtacgagtgttagaaaatagactaaataaactagaagtagaattagagaacctaaaaaataattgcgatattaaggcattaccagagaataaggacatacaaaacaccgaatttaaagagcaattgataacattaaaagacagtaatactgctaaaataattcaactaagagaggccataactaattttggaaaaaaatatatagtaagattgcctttcaaagaaatattaggtataagaatccctgttaaaataaaattgacacccaaagtatcttataaaatattagcactagtagacaccgggtgtaaaaagaatattattcatgacaaatatttcataagatgtcctgaaatagttcacacaattgacgacaataaggcagaagtttccacagacatgtccggaataaagaaaattcataatcagttagcttataatatggaggtttacattaatgcaactaaatatataatagatgagattacaataagagatttgtcaatgattaatgatgacataataattggcctaaggttccttcaacaatcagtacaaaccacagtaatacatgagcaaggaattacttttatcccatatcaaaataatgttccatatatctcagaggtacgaaagcgtggtggagtctcccccaaactcgacaacttagaagtacccaatcttgagcctaaagaaagaattaatgaatatgagcttagtgagaatatagacaactattatatatcaaattccgaatatagacaactattatatatcaaattccaacatagagtgcataggactacaagcatttgcaccaaattggtatagagatattaagtctaaaagggatatagaaaaaaatattcaaagattagaagatatccaaattataggagaaattcctatgaaatattgggagaaaaatgctattgagtgtaaaattaatataatcaacccagaatatatcattaagactagcccaatagaagcaacttcaggacggagtatatatatgtgtgtgtatatgtatatatatatatatatatatatatatgtatatgtatatgtgtatgtatatatatgtgtatatatgtgtatgtatcaatatgtatatatatgtctatgtatctatatgtatatatatgtgtatttatatatatgtgtatgtatctatatgtatctatatgtatatatatatatatatatatatgtgtgacggagcgtggggctcctcaccgggagaccgcgcaggcccccctttgccggttcggccgggggcgctaagtgaggttctttgccctcgatctgaggaacgtcagcgagagaggaagtgcacaagacacgggcgacgtagacaagttcgggccgctgagaagcgtaacaccctactcctgtgttctggtggatctgtgtgtgaaggaatacagagagccggagagcgagagagagttcaggctctagaacccatccgccagagtcccaaccccccctccctttaggcctgggcctcctttttatctggtcaggggtcaccacatggcctctagctacctaagaagggaaacatgctttttacaatgagggctagtctacagccggaagtgacctctgataagcagagcacacgcctcctgccccactcgcccgctttccccgtggacgcccatttcaaccttcatttaatggccagcgacttccttgccatacttgcgctgaagcctggaatggatctgaccgggactgacataccaactccaggagttagcacgccggctccggctagggacgagagccaggaagctctcatcattccgacgggacggggcgaggcgtgtgacaggcctcctgttgccacctaacccgcgatctgaccggtctgtgaccggtcacacaccgcgaccggtcacggaccggataagcgcgcgctgcgccgcattaaatgcggcgtggcgcgctagtccaacccgctataaatgcggttaggtgagtcccgctgtgcttacctaacccacacacgtggcgccaaaaccacagggggtcggggcgccccagccctcggggccgaaacgggagcggcccgacccctcggggagacagagggaggggtggccacgtcaccctcgggcccgacgccc

SEQ ID NO: 3695 - DNA, 8373 bp, Oryza sativa
gtgatggattgcacatgcatgtgtaattacaatttagagtgattactaagaatatatataatggcactatatattcactttagtgtcatacatatatatactcgtgacacactagttatatatacgacgtctcatacactaccagaaactagattacttatgacggctaaaaaccgtcaggataaaacaaatgcacgtcagaaaaattgtttgtgatgtgtcaacgtcaggaaaattccgtcaggactagcttgtcagagaaaaataaatttaggtgacggaggcgcatcaggattaattttcctgacgtgtactcacgtcagggatacttttcctgacgttgatgtgagcagtcatcgatattcatctatcgctgatggtctcccctgtcacagttttgcagtggttttttctgatggttatgacagtcaggaaaatatatttccctgacagttagacaactagccgcaaatcatcaggagaaaacctaccagaacgtaagcatgaatcaaatatacacagtacaatagcaaaagtactcattttcagtattcatcatgatcacatacacacctccagttcaagttcaatatttcgtaacttatggatcaagtgatacacatagatccctcataacagtataatgtagttccagttcaccatttgaacataacacaaaagtgtcactttgtggagtttgcatggccaagatactatgtaagaaacttagtactaattttggagtcccacattctatcgaggtttagaaccataaatacaacctatccaaaagtattagtatgacacaactccacagtcagtatatccaaaagccttagcccatcttgcatgatctgttagtgaagtgagtggtagcatcatggagaggcaatcaagatgtgctagtattacaaccaccagagttgttgttcccaccgatgttgcttccatcattggcattcaaactgctagtattattggcattgcagttgttgtcgctgatgttattgccaccattgccagaggcggtgttatatccatcgctggtgttgttcccattgtcctcaactggctgtgagactacacgggaagaacttgttccctgcagcagttcgaaatgaagtttataagaattcagtccaattaaccagtactgaaaagtgaaaacgcatgccgatgcaactagaagaaacaataagtaatacacagtggtctatcaaagttcctatgcaattcttttgtactatattgaacaaatgttggagtaactataaccttctaaaccaattttctgttttgtgcaagatgcaagtcatctcaaattaaaataatatattttgtcttaccatctcaattatttgagaatgtgactacaaggccaactgttacaacaatcaacatgagcccaatccctcactgtaagtgctgcattgtctgttctcactctgacataccaatgcaaattagtttgctatttcaatagggcaaccaaattgtactggcacaatataaatattcagctagttcatctatgagtaaccgcagcagtataggagaaaatacttaggtaaataactaaaataattgaactccgcttacctgtgcaaatggatcttcctcttctactggacagtccaattcttgtggtacttgttcacccaacttttcataaagtgcctacatttaaaaagtagccaactgggtttagaaactaaaaactaaaactgagagtaaaactgagagtaaaagtattattgtaacttcataccaataacaacttgtcagttcgttcctgttttttgcgcatgtattgattctcccggagtagttgttcattttgtcgagccatattttggaaagcaattgaattggcaggtcgaacatttgttgatttggccacagccaaaatattagccttcctaacagctccattcgctatctgtacgcgaccatgtggcaagccaccattggtgctgtacaatacattctcatctaggtctctttgttgccaatcatctggatatttagccctaagacctgttaaataatcagtctacaaaaaggttggaatttagtaccaaacaaaacattccttcaatggaaagaatagaagcagaaaccataccacatgcttttgtgctttctggcttgggattggtccaatatttccatcattatctatatttttaaagccagtcttcattgcactaaaagtgtttagtgttgtagctttctcaggtccaaattttactccctaaaacataattggtttgatgagcaataccctatgaataaaactaatgaaaaaccatgctaaaaagatatggtaccatatattgttgtgtctctgtgaatggccgggaacctcctcggttttgggcaacatcctcagaattaaggcgtgcttgttggcctctctttctttttgccttgaactcttcagtacaccaataatctgcaatgtatgaaaatccattgtctctgcaccaatcaacggggccatccttatattcatcaacttcaagttcctttgggcgtgctaatgcatcatcaatctcctccccaattttatcatggtacaccttgacagaatcgacacaaagctgatacatcatttgcctcactgatttcgctgcataattttccaaaacacggtcagcctctaccttgtccgcctcactgacacagaatgcattctgcatgtaccaagttaatatatattagatagcaatttaattgcttgtcaatgtaatttgaaggacattttaacaatgacttacccaaaattcttgcttcaccttatctgcctttgtgactcctgagtcgtcttccttttcatagtaatcaaaccatgaggttgctggacggctgctgatgattacaccattctcatccttctcttcaataatgccagggtattctcgtttaagaataattcccatatgtgtaccatatttggggtctgatttcaatagagggtatgttacgtactcaaattgcctaaagaaaacacccatgtgagaattgttccattaagaggagaaaaacatagacaacacatgtacagagcttttgtatacatacacatattagatttgaagaacttgtatgctactcaatttatcacgtcacaaacatatcggctttgaacaatataaattctacagaacagaaataaagacagcctctaatttattggagcagttaacaaagtaataagcattagtagaaaatctgtagggttctagaaatgcagatacttactcatcaccccgaggtttcagcgcgatctttcgaccccgcggaggtacttttagtgcagttcttgagcccttcttcctccctcttttatttggtggcgcactgctcatgccacttccagcaatattggtggcttgggaggcattatcagtattgctactattaccagcacaaagtctttgggaggagttagcaccggagttactactgccacctccattaatcatttccgggactctgttttttgcattagtagcactagcattgctccttgtagagatgttcctgcattgttgctgtcttgcaagccgcttccgatcaatgccgttcatttcttgcaatgttatatccatttattagttttagaagagcaccatcggtccataaaaaaagaagaataatagcatatattttcatagcatggaatcattcaaacaaataataatccatcagtgcttaatataaaacctttataaagtacaaaatgaccttaggtacttaaagcttaaaaagtcatatgaaagttggcagctgcataaataaattaacagacacaaaatacaatagatatttcaatctcaatagcttaaactaaaaatcatttggatcataagctgggggctgtggcccttcatcttcttcatcattttctttttcttcttcttcttcttcttcttcttcttcttcctcttcttcatcttcattgtcatcttcatcgtaattatcttcagcctgcatttgcttttctaggaattctaagtcttttgcattggttatctcatccaaaataggtggagtcatatttcctaagtcagccccaaggtcaataataaaagtgccttccaatccatcttcttgatagaatgatacatcttgggtttgatcatcatttgggttggaatcattatttgtgttctcagctttctggacataaccccgtggattgacatgatgtacaacccaccattatgatagatcacgtcttgtagtgcatgggtaaggcaaataatatacttgtgtaacttgactagccatcacaaatggttcaaaagttgaaagcctagacgtgtgcttaatttcaactaaacccaaattgtcagtacgtcgaacaccggtagatgttgggtcaaaccaataacagtcaaacaaaaccaattcaaggttcatgctgccttcccaactaataataccatagtactctagcacatcattgttttcgccaacacaagacacacacaccccactattggttgttgttaaccctgatttcttgctctcatacttctctgaacgaaacctatatccattgatatcataaactccataagtggaaactgtacttcaaaaaccatatgacatttgacgcaaagcattgtgtatactagatgacttcatgcactgcaaatgacagatattagtggtagttttagttgattgcacattgaaggaaagacaatgtctcaagtggttagagtcatacttcagttctgaaccaatcaaagaaattaggcccatttcataatgccacgacaagattttcatccatttaatcgcaagtctcgcaactgattgggtgttggtgaaaactcgctcttccagtgttccctatcatatttactacattaataaatttaattataattatggcataaaaatatatgaatgactcatagtagatttgaaacgtacttgaagaaatcatccatttctggtgtgtttgtcaatatgtataaggtagcagccttgtactcttctattgtgagtgcatggcagccccgtgggctaatataccggccagagtactaaaatatttctaggttggatgtactatcaaattgtgagctaccatcatcatatcgaggcatcttgtttctagcagaccgaactttaggattgaaatagagtgaaagaaaattagatgtttcctcaactaggtaggcctcaacaatggaaccctcaactcgagctttatttcgcactttctttctaagtttttggataaacctacatggcaggaccaaatgcattagggtcaataaactctacaaaaacaagttaatgttttacttcttgtcttacctctcatatggataattccaacgaaattggacaggacctccaagtcgagcttcatagggaagatgtatgatgagatgttgcattggattaaagaaaccaggtgggaatattttttccaacttgcaaataagaacagctacattctcttctaaagagcggatggtatccttgtttagttcttttgcacataactgcctataaaaaaaactgagctctgccaaacacttccaaacactctctggaataaatccacggaatgcaacaagtagcaaacgttccatgaaagcatggtagtcatgactttttaggccaaaaatttttctttgtagtaggttaaccccacgcctaatattggcagcatatccatcaggaaactttagttcttgaaaccatttgagaattgttgttttgtcatccctatcaatacaaaatgatgcctctggtttatgccattttccattaccctctgacactaattgcagtaatggacgactacaaatttcaaccaaaactttccttgccttcacattatcctttgttttatcttgtatgtcaaagcatgtgttccatatagattcagctacatttttctcattgtgcatcaaatcaatattgtgccgcagcttcagcttatcaaagtatggaagttgccaaaaacagcttatatgagtccaatggtgtgttttaccaaagttttccgtatcatccacacacgcgtacatttcttctttaatttcttctcctgtcagaatccttggtggctcatcaagcataaatgtgttctttctaaatgcatttagttgagttctgaattcatgttcgttgggtagaaagcgtctatgacaatcaaaccaacaaggctttctaccattacggagctgaaaagattgagaatcacccatacaaattggacatgccaaacgaccatgggtgctccacccagcaaacatcccataggcaggaaagtcatggattgaccatagaaatattgccttcattgtaaagttttgcttgcgtgaagcatcccaggtttctaccccctcccataacttcagaagttcatcaactaaaggttgcattagaacacttatttttttccctggatgctctggtccagggatgacaagggtaaggaatgtgtactcgggcctcatacacacaccgggagggaaatttaagggagttataaatactggccagcaatagtatggagcagcacctaaactatatggagtaaacccatcagttgctaaagcaagacgaacatttcttggatcttgtgcaaaatcttgaaagtcctcatcaaattgttgccatgcctcgccatcacatgggtgaaccatgttaccagattgtgagcgactatgggactgcaataatcttgctatctcctcatgtgcatataacctttgtaatctatctttaataggcaggtagcgcaaaactttacgtggggttttgttttggccattctcataacgagaagtaccacagaaatcacacttctctttatgctcatcttccttgtaataaagcatgcagttgttgtaacaaacatcaattttaacatatggcataccaagaccttctagcaatttttttgaacggtaaaagtccaaaaccaacttagactcaggaggtaagaattcatggattatccctaaaacatcatcataatgtgcaactgacatgttatactgtgacttcatagctagcaaacgagctacagctgagagacatgaatgtgttgtattctcatggatcaattcatcagcactagcaaccatcctatagaatgctttagcataatgtgcaggttcttcactactttctggtggctgtgcactggctaagtcaaccaacatattatccatcctatcagattcaccaaatccctcatgatctattaatgaaggcccaggatcattgtcatttatcaccgatctctcaccatgtgatgtccatattccatagttctctttatatccgtatttgcacaagtgcaactctattgtatcccttttgtgcctaaaataattccgacattgggcgcatggacacttaatagtaccatctttaacaacttcttgcatagaaaatgcacggtttaagaactgtgttgtattatcaatccattcattagtgagagctttgccacgtgtccaaccactatacatccattcacgacttgtcattctgtggttaaaaacagattcaattcttaataaattattttaacgtgcatatatgtcactcttatttatcacaccataaataacatcatctacttgattaatcacgtcacaaaggatagcacaaaaagaaattatgtacaatataatcaacatttagaatgaaaaggttcatgtgaaggttgttattgttctatcacttactgcacaaaatatattacagtgaagtaagttgaaaatcctggttacctcggatttggtattgacaatgagacgatggtaagcaataacttgtcagcacttcagatgagttcgacacaatctgtaaatattagccaacattacagttccattttgcatagtaaaggtgaaactttcaagaaaaatatgtatgtcatgcttatactaagatgcaccaggatgatggtgtatcatcctttaagagaaaatcactctttttatgaagcttaaagtttattcactgcctacaagctcaattgtgctaaaattactattctctcataggaacataaatgttgtacagtccaaacaacaacaaaattactattatcacagaataaagcattcattgacaggaggatagtgacatgcttagagtgctgaagaaattaatacttacgaatagtgagggatttattcaaactagcagccaaaatttaaagatctttaggataaattccatgctaccagtataaagcttgtaatgaaattctagagaaaaaaaaaccagcagatccatgggagtattgcctcaaatcatacgaaaatccctaagaactgcaagctttatcagagttcgttaaaaataaacaaaaaagta

SEQ ID NO: 3696 - DNA, 1689 bp, Oryza sativa
agaagataagcatctccatggtgcgagccagctcgtgaaaatacagtatctagaagataagcttgaagcacagtcgagcctcccgagctcctataaaaggaggggtttgctcagctgagaagaacaacaacgaagacaccattcagagcaaagcttccaagcgcgctctcaccctccattccaccattcttagtagtagtgactttagcctaccttgcatagtatattgaagcaaggagttgtgtaataacgctgtgtaaggtaagaacagcttgcttgtacctaccttcgggtttcccgaaaagcaaaaccgtatgtaagcttatctgtttaatatgaagtaattttccttaagtattcctgcacgtttgttctagacaagtgtttatgctaaggaccctataggagaaacctcttccgttttttctcgtttttagcctgcatcttgcataggcgtctggagaatcggtatccgtagagaagtgttcccttcgggtggaactgcctggggagacgataaactcttggctagaacaagtgtgacttggaatatctttttaagttgcttctaaaaagatagataggtgaggcatacggtgagtaccgagtaggactttacatcatccgaagcaagcttctgaggctgtctaaataggattcgccaccctgcaaagatcctaaagttaaaatatctctcgaagtgaacagtattgaacagtaatttaaacagtaaactgaatagtgtttttgaatagtaatcagccgaataaacagtaaactgaatagtattcagccgaataaatagtgttttgaacagtgtttttttttgtctgaagcataagtgtggtatcagagccagtcattatagagaaatcaaattcagaagctaatattggaaagataattactaccaaagataatttgaatataaggtgtagattaaatcacattgaagaccatagttggcactctaacaatagtcaattaaatttaattgttgatctgatatataatttttatataaattgggataaaaagcaagaagatttagagcgaaggtttgaagatttgtttaaagaacgaaagcaatctgaagaacaatatttgcttgtcagtaataaattaaattcagtgctaaaagagctagaggattataagataaggcagaataagatattacaaaacagtgactatatcaaagaattattagaaataataaattctagtaaaggaaaagagatagtcttggcttcaacaggcataattacctcgtctcaagctattaattcagaaaaatggacctatctaggagtttgtttagaagaatagcaagcagagacgataaatctttaagttgtattgataaacaaaaaggtaaaaatgaagacatagatgagcttgaagatattgcagaagtagacaaacagctcgaaagatatcaaagagatactctgagggcaataagacctcaacaaatatattgcatgggatttttgagaataaaaatgggttatacagaatatctagagaagtagagttaagcgttttaacaaagccagttgagttaaaaattgtagccaaggaatttgaaaatggattaaagtattcagggtataaatatattcactaaggtatgtatataataggaatcaaaggtatgacaagaaagaaattaggagctaaagtttt

SEQ ID NO: 3697 - DNA, 13758 bp, Oryza sativa
agtagtccatcagcccttcttcacataacatcttgcctgtaatggttaggatgaagcctggtattcatctaaccagggctaacgtgtcatctctaagaggtaacacgctagctccggctggagacgcgtgcctagaggctctcgtcttgacgggacggggcgtggcgtgcgtcagaccgccagtcgccacctaaccgttgatctgaccggtctgtgactggtcacagaccggataaaagagcgcgctgcattgcgctgcatgcagcgtgacacgcttgaccaaaccgcaataaatgcggttaggtgagccctaccgtgttcacccaacctatgtacatagtgcaaaccccacaaggggtcggggcacctcggccctcggggccggggcaggagcaacccgaccccccctcggggaaatcaggaggagggcggacacctcaccctcgggcccgacgtccccgaaggtgccaggccacgtgggcgattccatctgcctcaagcctccgggcgcaatactcccggtcccatatcaccgacatattccatgttaaccgagcagacacaatcaattgtgtggagcaataagtcctccatgtagtttttgggaatggactagaaagataataatgcaattttcacgtaacaagcgaaaggtgattcttttaaaagatctttagtttccacgtgtgcctatatccaacacctattttattattatagtagcgtctactccacacataaatttacaactattcattatactattatacagatatcttttattccatatacaaatatatagctcttcattactatagaaatcgtatgctccatacacaaatataaaggacaagtgatagtatcgttatcaatatccttgtatttaacaacaaaaatagattattcaatcttacttctctcactcagttactaacttttacaaagttgtaattattgaactgctgctaatgttataaatcaatgatcatacagagtcgtgtactcatgtaaaaagacacctgactttgtctcaagcttaaaaatttgaagttgtagcccatatgttcatctatatctccttgaaaaaaataattcagcaatattattccttatagacaacaacaatataagtttcacatataaacaacaatataaattttataggtctataagtacttatcaatttctccctcgtcaattcgttaatcatatttctactaacctaaggtcctatttgattcagcttagaattattataatctggattattagaaataagctgaaacaaacatatagctatttgattcagcttatgattattataatctaaattattagaaataagttgaaacaaacagatagcttattatgatagattattataatttataagtaagattactataatatagtaatacactttaaagatgtttattttagattattgggtactaccagctaacaaacagcttataagtggacacatcctctttccatcccctacttctacagcacgcatcgcgtttacacgtaggtagccgtcggatccaatattttatccctaatcttcttatagcctgtatattctacatatgtatctgaccacaaacatttgttttgcacgaaacgtggcattaagaaatgaagatttttttctctctggaaagtcccagtaaacaggaccgacgacgattaacgctggaccctgaagaagaaggaagacgtgccatcgtcgtcacacgcgtacggcgtaccggcaccttcgatggcggccaccaagcccccgagctgctccacccgcctcagatctccggccaccaccgccgcctgcttcctcccggcgtccctccttctcttcctcctcctcctcctcctccgccgccctcccatgggctccttccctcccacaattccaggtataacactcaatcaatctcacatcacctcccttttttcttttcccaattcgtcatcttcttgccccttcgattctacctcttgtcgatttttgtttgagtcaaacaagtttgttcttttatttgtggatttttttttatctgttatgtttttttttttgtttcacttcaggtggctccgtgtcgtcgcggcgggcggagctgtacgggaggatggcgagggacctcgacgagcgcggcgcggcgttcttggacggcggcgagacgtcgcagtcgctcacgctgtcggagctcttcgacaccagggacggcgccgtcgtgcccatgctcaaggttattttctgcaaaatagctatagttatttgctctccactgtagtgattggcattgctgaaatgtcacaatcttttcttctttttttttcttgtcaggctgccaacccgccggtgcgcgcgaatgtgctctacctggatcctgagtttgcttccgtgatatcgtatgtattgaagttttatccgagctcctgttgtgtgaattgaattgttgctgaaatcgattttaatttagctgtagtagcaggacagagctggtagtgtagttttcttgttatgttttgggaagtgaggacagaatattggtgtattgattattcttgtgattgcaggaaggctgtgaaggaagtgtttcttccttattttaatcaaggtgaggttttgcttactagctctgcaacataatattattgaattacatgagtgactgcagtcgtcctaatctatgttcagtgtattcagttaaactatccgctggtattactcatgtgtctaaagaagaactatcggttcaattgcttgctgctatagattgcttggttaatctttcgtatctaaagctgcatctttgctgaagaacttgaccatttctgttgcttcttcgtttatctgaaagactgtaacccaaagctgtgctttttaaaagcctgaatttatacccttgctgaattgtccaatattaaagaaagcttgatcatgcatttgtgatgtgaagctgttctgtttctgaattgcctgctttttcttgatttctcggtttcttaacacttgaaactgtgcttggattatcatggtgaggttttatatatcttggttgatctcttttgccagctatctggttccaaaatatgagcatctaccacttcagtatgtttcacacgtcgcatcacctggaaccaattgtagcaactgaagatgaggtaaaaacatgccctggatgagtatgatgttcatgaaaatgcaatacaagtttttactgatgtatctgtgtgtaatactgttgagattgaagctgaagtggatgctgtaaaaagagtcaccgacgatgtttgtccacttaaaattatcttggatcaagtggttttgacatcaactggagtgcttcttggcctgtggcaggtgtgggcctttaaaaacaccttattctattgtacgctaatttcagcgaacatcctctagtatgcagagtttcagactgaactggtatttttcctttttgctgtttttaggttgaatctggtactgatcccgctgatatccgctcaagattgagagaagctcttcctcgtgcaccccaaaagcagcttgtaagagcaactcaaataaattatttgaaatttcactttctggaccaaatagagaattcctttctgcactaaatttaatgttcagagtctaggaagttcgaaattcaggacctactggctactgcagaatacaattattgattgctggttgttattgacctatcctacattttctatgaatctgttagtaaggtgttctttttcacttttggcagtatgatcctgttatgcttcacacctctttggcacgtattctgggacatccaaagctcccacaagaggtagcccgcatggaaatctgagttctaatttgttacttttaatattaatttcccttttagacactagaaagttgtcttctcttttcattcaaactgttgcctatcttgtgcaagatgcccataaaaagcggatataatatcttgctgcattatgcattacagtggatataatactttgagtttcaactgattatcaaccacttcaagaatattttgtttactgaaaacatacatggccaactactttccaaaaagcaaggcagccataagctgatgtttaaactcaaacaagatttatacttattgtaaacatgttttctgcatttacacttgtttggtatctcaaaaattgtctgctactctagtgtattatgttctttgttttttaattattcattctatctcatgtggcattgcttggtatgtttgctattctttgttgtagggtaatgcacagtctcttgatcatgtcaagttcttccatgacctggttgcacaggttaattcaaaaatccgtggcttccaggtaagagttcctgatttgtttaccaagcactatatttgcaactacctttatgcatgaactaaatatgtatatgtcaaccgctattcaggccacggtaaaagagctatggtttgtagaagagtatgatgtacttgcgctggcattgaacggaaagatgaaggtacggaggctccaattcggttgcaaagaaggtcaaggcaatggaaaaatatagagagaattaccgacgggaacagtgcaatatacttggagcacccaagggtaatgttgttcgaatggctcacctaaaacatcatccacgccgtcatttgatctgccgagctatacaatagatgtgttgggcgactgggaatgcgacaaagtgatgacagattgcaacacatacttgtgcagaaaatcgtatgcaaccatatgtatgtaatttctttcgctgtgaaggtatgccacattgtgttgtacctgtgatgttctctaattttttgtgtctatttatgctccattttctagcatatggagacagtgtaccaatagaaactccaaaatttgctgtacatttttaggggaagaaaggccattcaggaagacgagtcttcactttatatacagaattgttattcttcaggtgtaggaatacacaaatttctccataccattgggacctactaccacgaattacagcctcttaggatttgaacttttagttgagattatgcattctcaaatgcagcattcacaaaatcttgaatacgtaaatccgtgtcaacctggactcacaatggtagttaaaaaacgaactttcacaattgttggatctcaaaaacaacatgacgcccatgatctcaatcaggttaacaagacttgatatgagaactgaacttctcctttgtctgcgaaattcctacatttcaatgtagcatcgtagacatcggacatgaggcagcaccagcaggcagcagctgtgctaaacctatatagcaaacacagagaaggtaacaagcctagctatcattatgccaaagagtaatatcaaccgaacacccccaacatcacatggtcctatctctggagctggtaaacaccagcatgacaacacggcagataagaatatctcgaaaaacacatacaagcgcgggaaaactaaaaagggccaacttggtgttaaaaagaaaataaataaaacaaaaaacaatttacaagttgtattcttttatctatcgtccagcgagcttcgcagccttcgatggaccctctagtagctttggaacctctgatgaggcttctaattttttcaaaccatcttcacagtagttactaatatcaaagttggtcacagcatgggcaccacgaagctcgatggcagctaggtcataagcttcagctgcctctatctccgtttctgcaaattaagctcagtgactgatttgcttcaaacaagttcactttccacaatatttcaagtcacaaaagataaatgaggacaaatttaggtcactcaccaaaggtaccaagatagatgtctttggtgtctctactttctccaatcctaccaatccgtgcttgccatctaccatcctttcgcctgtttagtccaagggattaagttgcaaaattgaaatagaatattcagaatactttgtttaacatgattcacaaatcgttttctttcaactggagcaaaagggataagtaaataatgatttaattcatttgaccagataattatgggcttattctagcaatgcagagaatagcaccttgttacacccctatatgatgaagttcctcttgagaaacagctgctctgcctgtaataaacacgcagaacagttaaaagttaaaacaatcataacacaacggtgtcatatagtaatcactcaaatttatcactgaccttcttatgtacaccacaaattcatcttgggacatggtcttcatcctctcgatttctttctcataatcagaaacctggtatagaaataaaagctcttaatgccaaaaaataacaggtcccagaatatcacaaagaaacagacagttcttacattgaagttaagtttggtgtttggccctgcaccccaatatttaagggctgcaaggtcatgtgcccttgcagcattctcttcagtaacatagcttcctgtaatgccaaatatgaagttaattaaattataagtaagctaaatttatgcttcaaatgaattcattctgcaattaccacttgcctaggtacactgaatcaccagtagccaaaggtgccagattccccatgcacaaaatccaaagaagaatcaggtaagaaagaaattatgaagggaaagtgaagcataaggaagtgatagtctttcatagcaatgactatctctgtattgttcccttatccttgacctattctcaccatggtcatttaacaaattcaatgcccagagcttataggatgagccatggtcatctaacaaattcaatgcccagagcttggaggaagaagctaatgattgaatgtagctgtccaatgctatccctacctcctaagaagaaaaacagatatacttccttacataaataattaatcaacaatcctctaaatccaagggctacatgctccttactttccatatcgaaatacacatttcacaaattcaagcatcacattaatccttaaagtaaattaaaattacgaaaccacattttacaagtcgcttcattgaattcaactattaaatatatccatatgtgcaccctgcaacaaataaattgcatacggctatcaacaaccacctgttgtcaagcctctagctaaaaatctgtgatgatacgaaatgtaattggaataactcacagctgtttcgcatagctaccaagcgagcgtgtaccatctcggcactttccaaactaaactaaactaaactaaaccagtgctaatttcatggctacacagtgacaccaacaaggatgagagattttgcttgcagtgagcttagctaggatcatcaggcgtgcaccatctcggcactttccaaactaaactaaactaaaccagagctaatttcaatggctacatagtgataccaacaaggatgagagatcttgcttgcagcgagcttagctaggatcatcaggcgcatcacataccatgcttccccttgcgcttgcggccctcgacctggctgctgttgtcccagaggtgcgcctcgaacttgccgctccacttcaacctgcagccaatccaaaaattccaaacccaatcaagccaaaaaacagaaaaaaaattgagggagctaggattccgaagagagagctcccaaaacctcgtgacgccgtggtaccgcgacgaccgcggcgcggcgtacttgcgcatggtctccgccaccagcttccctcctcctcctcctcctcctccctccgccgccgcagccgctttcccatcatccccgccgccgtccgcgacggccagctgctcgtcgagcgccgcgatctcctcgccccccgccgcggccggctgctcctccgtctccggaggaggaggaggcgcggggtccgaggcggcgggttgcacggtggccatcgccgcgaggtgaatcttcttcttcttggatttctcctcggcgaaatcttcgagagctcgtcgcggcgcaaaccctagaagacggagcttggagaggactcggatgcgacgagctgcatgggcctaatttggatcagcccacacgggcccgcacgttcgcgagagctctgggccaaccttgtgggctccatctccatatgggccgtgtattgggcctagtttgggagaaaaggcctagggtttgggggctccttgtgtgcgccgtcgtgggagctttcgtcgccggcgagagtccttcctcccgcatttcatcgcctcaacgccggtcggcgagatctgagtctgaggtaaggccatctcaccccctgcagcttcattctttgacccttttttcagtatttttgttcttcccttttttggtttttagatcctgtttggttgaagggagtttttaggagggattgggagtttagagggatgaggctattaactgttttgtttggttgggagatgagaattttggtgggatggggatggggaattgaggaatgaacttcttcctttttaatacctgggtaggggcaggtaattgggagggaattcctcctttacttcgcctaaacaaatctcagccattcgttttcattaatgacctaatctctaactaaactccctcttaatttccaccacctctaccaaacaagagactggcatgaaaaatcaaattcctatcttaatctcactatcaattccctcgtgtaaactcccaatccccttcttatatgtctgatttaggtggagtaatgcatgttaattgtccagatctgatagagaaaatgatgttgttttagttgggtggtttggtctcctgtggatgtttttcttgcttcatgtttgttcagtaggagtatattattatgtgattatatattttgcaagatcttgttctttttcaagtttgtaggtctgagtatgtgttggatctgtcgtctcttgtggttggatgtatggtatatgtttgtgcttgttgcattccatgttttgatgcattataaatttgcaattcggatcctctgcattagaggtactaatgcagaggatgaacagtaccacgcattagaatcactgtggaccgtcggatcaagagtgaaaggaccagatttttgaatccacgccgaggtcgtggcggccgttgccgacgaacacgcgcgggagcggtggtggcccggcgaagccgtcgccgaggaggccgcggagctccgcccggaaggcggcgtgcatggacacgtcgcgctcgtcgacgcgcacgcggtggccgcgcaggatggcgcgcacggcgcggccgtcctcgaacgtccggcggacgccgcggaggctggtgaagtacaccaccaccacggcggatgccttcgtcacgcgctccggccgccgcgggggcggcggcgcgacgtcgagggcttcttcatcggccgccttggccgccttcttcttcttctctatcttctcgtggaactcgtcgacgcgcgcgcgcacgaagcccgtcacctccgggatgtcgcgagccgccggtgtgcccatgtcgtcgaacgccgccgccgccgccgccgcctcctcctcgctcgccttcggcgtcgtcggattctcccgctccggcgaccgcgagggctccgccgccacgatgccccggaggccggacatgattccctggtcaaaaccaggtaaagcccgcacctctgcctccttcgccgccgccggcggcgaggacgcgttgaaagacgcgcaccgtcgcgccggcgcggcgtcctcgagggcagccttgagcccacgcttagcatcctcttctccggggagcgcgcggaagtcgaagtcgacggagacatgggcgcccttcgccggcggctcttccagcggcaggctggagtacgcgtgcacggcgtcgtcgcggcggccgcggcagaaggcgagggaggtgagaaccaaggcggtgcgcgacggccgcaggctatgccgccggctctccgccgccggagccgccaccgccggtggcttcgccgcgccgccgcgcacgtccctcgagctcgagcaacccatcgccggagtcggagaagaagatgatgcacgtgcgcatgcgcttgccacgtgcgcacgcgtggttggctattatatagagcttggaagccattggatgtggagcgcttggtatttaaatatatttttttgtgaaatgaaactgaaattgaaatggaataaaagacaaatatggaaaatgagctggtaaatattatggagttgggtgaatgggttcagttttaattgctcaattagtcactagcaaatggataagtgtagtagtgtctatctatacagtggtacgggatgacgtggaaaattttgagaaaaaaaacaatttataatttgatgactatgagtttttcaggagcgggaaaaataagatgtcaaattgcttacagaaagtaaattagtatggctttatgtatatagctacagtattaaaactcacatttaaagcttttaatggtaataaagataactatgcgcagcaagagtctgtatgaggagaatttcatgatatatttttgcatgattccattgtagagaaatgaaaagaactgcatgttgtttagcgaagttattaaatgttagtgagagtatttactacacaaagtgaataaaacttgtaaaaaacactctaaaatttgatctgttctaaaccactgaaataaaatgttctgtaaacaaactaaaaaccttgaccaaaacaatgggggaaaacattttttgaaagaaaaataacaaggaaaaaaattaaaatagaataaaaggcagatatagaaaatgaactgtcaataacatggaatggatatgtattggttcatgtttatttgctcaattactactacaacgtccaaaaaaatgaatttctagctacgaatctggacacataggattggtcttttgttgggacggagggggtaagtggcatttaagaacaattaaattcccacgtaggtgtggtgagaggggatgtgatggaaatttatgaagaaattaatttatgattagatgactatgagttatttggaaggattagggatggcaattttgcctatgggtttggatatccacgaatacctagcccgatgggtacgggcgcgggtgcaattttttacatgtgggtacgtttgctcaagacctgaagatgtagtgggcagcaaccgggttttatttgttgtccatgggtaaatcagaaaaatatgtagtgcgaaccatatatgtagtgaaaaacttagaaactactgttggatctaaaatccacgtcaaccagagtaaaaattttactcccagatttaaccatgagtaaaaagtttactaggagtaaaatttttactcttagtgacgtagacaaatctcaagcgtccatttttaaatgcaacgatagcttgcaggtttccacttcatatgcacatattttcctggtaactcgtgcctgatgcaatacatatgtattagctgattttgggcatctcttaattctcacgccccttccccttgaccaatttgtgatgctagttggtgataacttgtgatgcaatttaaattaacgttgctaattgataatttggcaaattattgattttatttttctttgttaaattacctatctattgagatattattcatatgagacccaccgggaacccatcggacatgcctgtgcatatcaagtatgggtacatgcacggagttttgcccgctaaccctggtgggcaggtttgagtgggtgatgtcgggcattggatcgggcatggttttgccatctcttcttaggatggggaattcatgagaaataattggttaattttgtcttagaaaataaaatctcaagtagttaactagcaagctagaaagaccttctgcaagtagtgcttaaactttacaacagcatgctctgatttaaatatttaaggaaaatgtagatgattatatatgcagcaaaaaattgtatatatatgaggatatttgtatgagaaaaatattgcatgagttctttgtagaaaataaaaaaaaatccgtcaagagggaggttggacatttgaggttacatggctaggccacatgatctcaagcgacgatgaactcatatttgatataaaatatttttcagtctcaattataaccaaatgaaattatagtttttaaggtacatagctaacgtagcgaggtttatatggcatatctttaagagaaatatgggatatatatgtattcttagtattaaaattgtattactcatttgaaaaaaataaacggatggatatttaagttagagtgctacaaaatctcttccactatcttgcatactcctttgatttgcaaaggtgattttcagttagtttctaaccttttctggatacattttgaaattcacactgacggagcccgtggctcctcaccgggagaccgcgcaggcccccctttgccagttcggccgggggcttagggtgagatctcaagctctcgctgtgtgtggaaagatcgctcgcccggaagaaacacgagacacggcgatgtatacaggttcgggccgccgcgaagcgtaataccctactcctgtgtttttgtggatttgtgtatgaatgagctacaaagtgtctgcccacttctcccccgctctaggctctaaatctggcaagaatcaaccaatcccttctctatgggcaaggtcctccttttatatttcaaggggataccacatgcccccttccctttccaaactggacttttcttcttttcataaatggacggagatttgcacggtcgtcctccgatgggacggcacatacctacctccacttctgcctgaggcgggcacgtcgtgggaaggtggctgtgtgctgacgacatgagcagtgtcagaccggtcacaaatcggtcattcttgtcctccacacgtcggctcagcaacgtgcatgtttgcccttcttcaaacaacatcttgcttgtaatggttaggatgaagcctggcatatatcgatcggggctaacgtgtcatctctgggatgtaacacgctagctccagccggggacgagtgcctagaagctctcgtctagacaggatggggcgaagcatgcgtctgaccgcctgtcgccacctaacccgcgatttgaccggtctgtgactggtcacagaccggataatcgagagcactgcactgcacttcgtgcggcgtgacacgcttagccgaggcgcaataaatgcggttaggtgagccctgctgtgctcacctaacccatacacgtggagtacaaaacgcgaggggtcggggcgcctcggccctcgggggcgaggctggagtcacccgacccctccctcggggaaatcaggaggagggcggtcacctcaccctcgggcccgacgtccccgaaggtgccaggccacgtgggcggttgtgtctgcctcaagcctctagtcacgatactcccggtcccatatcaccgacacacacacttggctaaaactttattacagataatccttttctttaccaacatactacaaatattcctatcctatcatctgttgtggtgtaggggctcaatacctcgtttccaacattggtctcaaatgatggataagatgataacgaatcggggttgtgtatttatccatcaactggttatatatgttcatttctttactgtcattatcattattattgttccaagatatgtataacacttataaaccctgaactccctccctgtcctcccccccccctctctatctccttgtaatccattcatccctgaca

SEQ ID NO: 3698 - DNA, 2107 bp, Oryza sativa
gccagtcctccattggtttactggccaacaaactagcaattgtaatgatagctaatggcacaccacgacattttttcaaaattttgtcacatgcctcaactgatgggctatcaagacatttgccttcactgtcaactatcctggcatacaataatttttcacagtcatcacgagaaagtggctgcattttgtaaacatcaccaacatgtgtggcaacttcagaaatgcgagtggttgcgactactctacttccacacttacagtcttgcagagcgcatctgattaactcccatgatttcttatcccatatgtcatcaataacaatgaaacatctgtgcagccgcatgacagtgcaagagccatcaatttaataattgaaactagtagaaataacatattaaaacaagaaaagtggcaaccataaaaaaatatcataactactgaagctaaagaaagcattataactattgaaacttaagatcactcatataccaaaagtaaattgagaccagcattgggtgatcatcatattcttacctcattttctgaacaaaattctggagcttgtcgataagttgcctttcgtcaatatcatcacatcagaaactttgaagccaaaatcaatgagaatgtcccttaagactttctgtatgtcaggtactcgaccgactggaacaaaaaccccacaatcgaagtccggtttaagcttgtcatagactgctttggcgagagtggtcttgcccaatcctccgaatcccacaacggagacgatcttcatgttcctatcatccccaagggacagcatctttataaccttgtccactggcccatcaataccaacaagctctgttgatcttttgtacagagcctgtaggcgaggatcaatgctcgctggtcctgcaggcttggtgatgatgctatcaactgtgtatctagcacgccgggcttccacctcctggagtttcttgtcaatttctttgatcgcgccagcgatcttgcgacgatccttggtcctcttgaacagtctgctcatcttcttccggaggtgcctaagcacagaccggtcatcggtctcggagctgtcgatacgcaccaagaaggtgtcgacgatgtcctccatgtcataggacagctcccggacatcgcgtgcccagagcttcaccagctcatcaagctgctctggtgttacctcaccgactttgcggaggacggcgtgcacgctctcgagttcccgtgagagagacttgaccttctccttcatgcctgtctgcaggtcatactcgtccttgagcagctcacctagcttcgggagcaagctccccatcgcccctgtcaccagctccatgattcaagcttgatcaagcaggttgagttgatggataattgaacaatgctaatagtgtggtagtgtttttggtgttatcctctgctaattgtatggcagcttcctgtacctcatcttctcagacttctcaccccccccccccccctctcctttttcagtcacagccaagataaggatcttttaatgaaagaaatatttttttactcgaattttatatgaaatttcaactcgctccctaaaaagcacttcactcggttttatctgaacttcaaaactctcaaatctctaactcaatttcaactatcaagtaggagtatcaaccagaaacctgaagcatgtttagctctaatttctaacagcttccaactcaaacctcacaaagcccaactagactaatactagcagatcactttcacagtgagtgacaacaaaaatgtcccagctattggaagcccacaattccaactaggtaaaaaaaattttacagaaattccaaacgctcccatctaaagatcccaaatttcatcaaacaaaatcgcttgaaatgctaactcaagaggcccctagctaccttctgtcaaagggactcgtcattcatcgctaagcaatgagtctgtagccggagctgctccactccggcgattgagcagcggcgacggcggcgcatcggaaattgctccggcgactggatgcggcaatggtacttggagggggcggatcggcggaggaggagattggggggccacagaactacacaatagc

SEQ ID NO: 3699 - DNA, 1499 bp, Oryza sativa
agctagagtaaagaaagtaaagaagaacgaagatatggcagtagaaatttttaaaaaccaagaaaccaagatagaacagataaagaggaaagagcaagataagcatggcaaagaagagcaaaatctttgtaaaattttaagtgaagaagagcaatgggcaaagaatgaaagattatttcttgaaagttatgaagaagaaattaatctaataaatgagatggagaacatagaaaatgaaatagacaatgcagaacaatataatgattttataaacacattagatgaagtagggttacataatcttgataatgcaatggaagctatggaagtggacttaggaacaggaaagagaaaaagatatggagaaggtactgtgaaaaacgaaggagaaagagaaagaccagctagggcagcaggaaaatggcccccttatagagaagaattttcatataactatataccaggtcaatataggcatatgggtacaaagagaagagactttgagaagcctgttaaatttcaaaaccagaggagtgatggtgctatattaaatttagccgcacatgaccctattgattggcctaatattattagtatttggaaaggtttaatagttcaaaaatatatacaaaaccagcacaatataggaagtaaagttgaagatatgataacttacttagaaacatttttgataacttacttagaaacattttaggtgaatctgctaaggtctatgggaacaatgggttgaaaaaattcctcttattattaaaaattggaaaaaactggtagccatccgcataattttgcaaatgttatatctaacattattatagctgaagatccggaattaggttatacaactttgcaaaatgaaaggttaaaagaaatagaaaaattaacgttaacaagttggaaaggcataaaagaattctcccaacattatttatataatgctacaactgctaaacaaggatataacaggggtatagttgaacgttatttcaataaattacctgacccactaggaagtatgatatttgaagaatataaaaaggaaactgaaggagctgaaatcaacatctctcaagccataacttttgtgtttaagcaactaagaaaaatatgcacgggtatccaagcccaaagatctatgaaacactcggattacaatttctgcaataaaatagttcaaatacccttatcatatggagaagacaagcctagaagtaaaaggatttataaacatcaaaatagaaaccataataatattagaacaaagaaaaggtatttcttaagaagatcagataatagagcacccttcttacataaaagaaatgtaagaagatataatccaaagaaaacctatgacaaaacatgcagatgttttatatgcaactcgccagatcatttaagtagaacatgcccaaataaaaatcaaaagagatattctagtaaatatgaagaacaagagagggttctaattatagatagcgtaa

SEQ ID NO: 3700 - DNA, 982 bp, Oryza sativa
ccctcaatgactacaaaacacctggtacatatatccacacaacaatgaaagggaatagagttagtaattaaaactagtggaagaacatgtaaaagcaagcagaacacaacaaccgcagaaaaccatcaaccatattacagtagcatgagattttgttatatatataaacagaagtagtaaggaggaacgacatgaatctgcatcaaactgtagcatgcaataatttggagaaagttaattgttattgcattctctaccaataggcgccaaaggtttggtgattatattcctacctctttttttggaggaattcctggagtttgttgatgagttgcctttcgtccagcagctttagatttaagtcattgtatgactgcttgtcaagatccatgagaatatccctaaaaactttcctaatattaggattctgaccgaccggaatgaaagccccagaatcaaaacttggtttaagcttgtcgtagactgctttggcaagagtggtcttgccaagtcctccaaacccaaagatggataccatcttcggttttctaacggacacatcgatttcgatcttcctcttcttggtcggcaaatcaatatccaacatcttcatgagctcatccatgggcccctcaattccaacaagctctgccaatgttttgtacatactcaagagacgaggatcgacagttgctgggcctgcaggattgatggcaatattgtcgattgtgtacctcgcatgcctggtagccacctcctggagcttctcatcgatttctttcattgcgacaccgatttcatggctagccttgatcttgttgaactggttggtcatcttctccaagaaccatttgaaccagtgaacttcacttgcctcatggccgtcgacgcgcacaaggaaggagtcgatgatgtcctccatgtcatacgacgcctccctaaggtcgtgcgcccaaagcctcaactcatcgtcaagatgctc

SEQ ID NO: 3701 - DNA, 585 bp, Oryza sativa
acatccttaacaagatgggttttccctgacccaggctgaccatacactgcaatcacagaaagagctccatctttcgtcatatctttactctttagcgattcaatcagttcttcctttctttcggcatatcgcttagtatctatgttgttgacatgaggaccaaacattgatgatgaagaagctaatgaggtttccttgtccacttgaacccatcgttttttcattttggaaagatgctccagctccacctcaatttctttcagctgagcagtgaagcgatgtgaggccagtataacctgtactctcttggtaagtcgatattgtttgctctgtacaatataaacaatatattcgtccattatttgttcaacaaggcattctaagttccgtgcttccccaatccaactttgaagtacttgcttggtatcatatcttggttctatttgagccaagaagcaaaggatcatgcgaagttcactttctattcgcctcaatctaccttgaagttctgcttgcctaagaactaatatatcattactattaataatctcagatattactctggtaagagatctaattagaaag

SEQ ID NO: 3702 - DNA, 7229 bp, Oryza sativa
ctgtgcacgtttgcgaactagtctttctgaaccatccgcacaaccagagactccttcacccaatcagccttctcacctttgcccagcctaatggcctaatccgatgtgcttgctatagttgggatcatcactggcagcacaccatcatcagtgagctcctctccttttggctccacttctcttctagctttctggggcctgtaaatactgtccacctactgaatagcgaatgtgtaacaaattcaaaatatatcaattcagaactaattaataagcttaaaaaagaaccaaacttgtcccatcaaccaccactgcaaaagtgcaaacaccaccaaattggataggggcaattgtgttcttatccctactttcatatgcaattgtgattttaccctttttttatagggtttgtgattttaccctcaccttttcaaaatgaaactctgatttacccctactctattaaaaccacctaacggtgtcaatgaaactaaaaaaagacaggtataaccctgtacacttgcccctacttttctattagaatctgtgtattttccaaaaaaatatgatcgcacttggacaaattttgaaagaacttcgatatcattgataggatttcacagaactttcaccaggtgcgaaagatccatcgcattcaccagtaaaaaatcaccaaacaaacaagctcctcacaaagtagcacaagatcggaaaaaagaaaaagaaaataagaggcggctgcagcacgaccggagccgccgccttctagtgcgatgccgctgctgcgggctcgcacgtgccgccgaagctgcctcctgcttgcggctgccgtcggaggctcggagccgccgcctattcactcgctccgccgaagccgcggcttgctcactgcgcctacaccccctactcgctttgctgatgtgggcatctgctgctgctcgctgggcatcacagccttgcccagccgccggcctatctcgcctgtgcacagccgccggcggtgccactagggttaggctaatcaagtaatcagaatggggatcgggtgggatgaaaaaggcaatgcagggtgttgttctttgcactggggtataatggtccattgtttttctcttagtaatttcatctatattttttacactcttattttgggtccaccaaacggtcatccaatgtaggggcaaacgacagcttcgttcgaaaaaaataagggcaaaatcacaaaccctagaaaagaggggtaaaatcacaattagatatgaaagtaggggtaagaacacaattgccccaattggataatatcccaatacaggttttaatgacattcaagagacttattacgacaaatccaaagcgtcttataatataaaatgaatggagtaaattgtcaactctcctcaccagactaaaatgtccttaaaaatgttcttaaaaaatgataaaaatcccatttttaaaagaataaatcatgatgtttcccgtccaaagctgagagtctactctagatgagctcggtgtcgaacttgaggcagatgcccatggagaagagctcctggtagaggatcttggcgccataaggcacgctcaccctcaccacctcctccgccgacctgcagaacctgcagtacggccccctcaccttccggccgccgccgccgtcggcggcgacggcgggcgacacgacgacggcggcgcgctggcatcggcggcagacgtggaggcgcgacacgtcgctgaggaggaagaggcgctcgtggaggttggcggcggcgccgtgggcgaggaggcagtcgcgctccatctcgccgaacttgacgccgccgtaccggcggcggtcctccaccggctgccgcgtcagcgggtgcaccgggccggtgttccggaacttgaccttgtcctcggccatgtggtggagccgctggtagaacgtcggtccggtgaacaccggcgacgccgcacgctcgccggtgcggccgttgatcacgctctcccctccccacctggagaacccagccctgttcaaagaaacaagaattccaaagtttttcatcacattttcagttgcatctggttactgttgtagtttcatgaagagaattcggtgaaagttgtttgtttgggaatctggctaagagtaagaggggataaaaattgtaatgtttctagttctatctactttcatgaagagaaaacaatcaagttattgagaatccagccctgtccaagagagagagagagagagagaggaattttgttccccatattttcagttaagtttcgtgcatctgattactattgtagtttcatgaagatatttcggtgaaagttgattgtttgggaatctggctcagatcaagatggaataaaattcataacgtttctagttctatctattttcatgaagagaaatcaatcaagttattgagaatccagccctgtccaacaaaaagatccattgttttccccatatcttcagttatatttgacataattcagtagttcaatctagtactagtttcatgaagttcagttcaatttcacatattttcagttagaaacaataattcaatcaagttcatcatttgagaatccagcagtaatcaagatggaacaaaatttaacatttctagtttatctccaccttggaaatccagccctgacaaaataaaatccaagttttttcaccacattttcagttatatttcttacatttgattacttcactctagctagtttcttaaagggaattcagttaagttcatcaaaatggaacgaaaattggaacatactttcattaagagaactcaaccgagttcataatttgagaacccagagctgatcaaaatgcaacaaaatttggaacatttcaagttctatctactttcatgaagagaaatcagtcaattttattgatcattttgagcagccctgacaaaaaaactacaactcttttccccacgttttcagttgaatctcattcattttgctagttcattctgactaatttcataaagaaaatggggtcaagttcattaaaatagaacaaaaattaaaacacttctagttctctctacttttatgaagagaaatcactcaagttcattatttgagaacccgattttgatcaaaatgcaataaaatttcacatatttccagttccgtctactttcatgaagagaaatcaatcaagttccttgtttgagaacccgatcaaaatgcaacaaaattttgcacatttctagttctgtctactttttaatggagagaaattaatcaaatttattgtttgagaacctggcctggattaaaatgcaacaacatttggaacatttctagttcttctactttcatgaagagaaaccaatcaaatttactgatcattttgggcagaatgaattgcttacttgtgcagctgctctgtgatcacttccacagatggacttgtgaacggtgtcgcataccgggtggcaccgccgagggcgattcctttgcctagtgcagcttcaagaagttggccgggagtctgacgagttggaaagccatggggattgatcacaatgtcaggaactatgccttggtgagtaaaagggaagttctcctgggaatccaagaagccaatgactcctttctggccatgcatgctggcaaacttgtctccaatgcgtggcgagcgagtctgcagaggtaatcagatcaaaaaatttactaactttaacaagtgttcatcagttatcagatttacaagtagatcttttggaacacggggaataacagtactaatgttcatcacttgggtgttatggcagagtagacatgagaagatgaaaatgattgatgtgttatggtatggacacaatgaactctaatagaatgtcgattagtgtagaaaaaatcagttggccattcaactattccaatagtgtgtcatagagaactccactatcttgcaaatttataaatggttagtgcagattaattttgtaaagattgcatattcacctgtcttagagtaacaaacgcagaatttgtcccatcatcagtagctgaaagaacaaccttctccactattcctttttcagtatgtagcagcttgatgctatgatcttcaccagagtctgagacctttccaatgataatgtcattactctgaagacttgctccaatatatggtaagccatcaatatctaaactgtcaaccaggcctttcttgctaggagtttttccaaaattgatattttccttgtgttttaatcgtttggtgatctctttgttttctatcagtgctttatagctcttaaaatgttgtgttcgaaacatgccacgctctaaagaggccctattcaataccaaagaatcctcttggttaaatccctgatggacactgattgagactattgcattttggccattgaaatactctggtctggcaaagtcatgtttgcttccagatgtatagtctctcttaccaagacaatcagcagctacagttttgaacagaggtctctgtggataatagagctgatgggaatgtgtatcaactctaaagagaggattcgtagtggagtagccaatagcctgttgcgatatcttttcagcttgcattagaattctcttagcagtatcatggttggcaaagggaatgatactgcaactcaatcctagcaagaaagaagggtcaagttcacaatgagtatagaatgagaaattcttttcttcgtcccctgcaaagagatgcctaattccataagcacaccggatatcctcctcttcttcaacaccaatcagctcaattatattttgatccataagttcctggaaggagtatgatccattctttcgattcatgatgtttcgtagattttcgacaataagaagaggtcttagaatccttcctggatcggaaaatatacgaacttctttgttttgcttgtcccttttgatctccacctaatcaaagttaaaaccaaaatacattgtcagtactatctagttgtattaacatactgttgcatatttcacagaagaaatggaaacatagtactctaacgtgataaatatgctgtcatgcttacaacaagatatgggccaactatggcattcatcaaatatacttcttggctcagattagttaattttactaagtaacttaaaaaggattacatagtggaaatgaagtatgagaacagtattttattggaatggaaagttcatattaacaagcaagaatacaattcccttttcctttaccaaacattgtaggattattcttttttttttggcaaaagcataaagtcataaactcaaacaagaatgacacaaaagcggtccattaggatttctggaaaaataaatcagtggtgacaatgcgaaaaccataccccaagaaatgattatgagacagattatgccaatcatggactgcttttaaaggcaccttgtttaagtgtgcagatgtcatggtcggaattgtctatcaaaggaggcgaaggccggatggcgccacggatgtgatcgacagcggcaagggcgcaacagccggatcagcgccgtgatcctctcccgtgccggacgggaacagtaatcagatatttagtgagtttgttagggagtctgttaggattagttcctttctatttgcaattgttagttttggtttgtaagcctataagaggcacttaaactcaggaattaagtaagcaagattaatctactcctcatcatctgtttctctgttttctcaccttcttctccgaagtgcccatcctggggcgccgatcaaccaaattacctaagccacggccacccacccatcactcatatcccatacgatccctagccacccataacagcagaacaatatcagaattatggagagcacaaacaatcatgatatgtaaaatctctcacagagatgcttcaaggttgaattgagcataatagcttagcaggaaattttcaatcatcataaatgaaagcaaagcataatcatggattagtacacaatgcttcaaagtaaaaaaaaaaatccgttccagtgtagcagaatctggaaaagaaagaaacctgtgcatcaatttgcttcctgcgtctcatgctccttaagtgcaaaacaaactcgactgagtctgcacaaactccaaccaagtttccattcaagaagattctgtctttcccgctgatctcttgtagaagcagttcatccagtttcttcatcccacaagaaacaagtgcgtcaaccgagggctccctgccaaacaactaacgatagcagtaatggcaagatttttcacaaatccacacttttcaccatcaggagtggacaagaaacatagctttccccaatatgatggattcctaggaaaggatttggtaagtcagtttgcattaggatattgaaaacaaaaaaataaattataacaggaatgaatgattctatgtcgaaaggtacttacggatatctagcatctccagcctttccagcatatgcaacccattgtcgtgtcttcctcatgtcagacatcatttgaagaggatttgttctcctaagggttgcaacaatccctgaacacctctctcttttattaaatggatggcaccaggaaccagtggagaaggcacggttgagaccattggtaacaattgatgcatggacataacactcaagaggttgtaggtcaccatcaccactcaaatgtctctgcatgaccttgaccatacgtttctgggcatgcataatatgtacccatagctctctctggagcaattcacatgccaaatccagcctcttgttgcggaaatcatccctattatcactcttccgattgccagaggaagccaatagaagacatctcaccatgtatcccaagaagagtgctttgctcctattcccactaacatcaggaaacatatgcctaccaatatactcatcaaaggatccttttggtggaaactttgtattcctgatcaacttatcaatatattcactggctctcccttctctctgaaagccttcgcactgctcatgagattcagttatagtagctgatattatgttggccatggaagcatcacattcttgtatgtcaataatatcaaaagcttctttgtctgatgatacacctagtgcaaaaaacattatccagattggtatagttgcacccaaaaagtacaggttaatgacttttctgaaaccatcattagactgaacaggttttatagagatcttttct

SEQ ID NO: 3703 - DNA, 771 bp, Oryza sativa
aaaccagatttcgattgtggggcttttgttccggtcggtcggaatcctgacatgaaaaaagttttaagggacattctgattgatcttgacaagcaaaactatatgcattcaaatacaacgacgacattggatgaaaggcagctcatcaacggaatcaaggatctagtcgagaaaaagaggtgctgatatataattatatattcagttattcaatcaggtcgcaaagattggtgtgattgttagttttggtagctttagtatgcttactttatgcctaactagtgttatgtacacttgtaataattctactccctccaagtaataattccacaggtaaccttgcaaaaataaaataaaataaaaatccatagatgaccttttgccaaaaatatgttatgctccttccctccgaatttacaatttatacttaatcttgcacaaagaccaaggaggtattgaaatttgaaatgaggataactacgtttattatttctaaatgctagtctaaatggatgtgcctataaaacacaaagtaagactgtttgagtatggaaggaataacacacctaaaacaccttggaatatgaaataaaccctctaaaacaaggttgaaaggatacacacattcactttataagggttagctagaaattatcacattgagagatgaaaaactaccacaccggtaatatctacgcacaacaaaaaaaaaaagattgaagttttgttttactaggaattcgtcatctactcaattttttcattgcattt

SEQ ID NO: 3704 - DNA, 2269 bp, Oryza sativa
ttcctgcagcccatttgttcaaaattttgtcacatgccacagctggtggtcaagtaagacatttgccttcagcattagctattcttgtgtacaaaatttttttcagagtcatcacgagaaagtggctccattttataaaacacaacccacatgtgtggcaatttcaaaaatacgagtagttacaactactctacttccaagcttactatcctgcactgcacatctgattaattcccatgatttcctatcccatatgtcatcaataataacaaagaacctgcacatcacaatgatagcacaagagccataagttagtaactaaaactagtgaatgaacatgtcaacataaggaatgatcaaccatcaacaagaagcccaggggagttccccttaaatgatggaataagaagtggtcattagcgttacatttgtcccatagaattagccaaatgtgtttgtacaatccggtaattgtgcatcgtacttgtgtttcaatttaacaaccagcattaaatgcggcaggcagagcgcctgactggtcgctatgaccggtctgtgaccggccaagtgattgataggacgacggcaacatgcccacttgctgcccgtgtgtcaggcggcgtgtggcatgccacgccccatcccatcgatcatgatgaggagcttttctactcctcatcctatctggtaccggcctaactactccagctgtacccggatttgtattcccgatgcatgcatgcacccaaagtcctcatccattaaatagagaatgacgcgggcgtcccctgtgtcggccggcctgatgtgatgggccctatacagcagccgacgtgcgtgtggcttccaagtcaaggcacaagacacacatttaatgtaaagaatatttttccttttccctaggtagcttttcggacccatgtggtaacctcttgaagtataaaaggaggtccatgcctagtgagaagggagatcccggaggaaaaggcaatctctggaggccaactccagtttatactccagagattcagagactttctaagctcagaaaaatcatcatatataggagtaggatattacgctttgcagcggcccgaacctgtataaactccttttgtctcatcttcttgaggggctcgaccccctctacttcaccattccatccaaatcctcaattctcacctgctgcccccgaccgaactaacaaagggggcctcacagtcccccgcttgaggagttcaccttccgacaactgttgtgcttgtaagaattaaatcattataataagatctcacatgattatattttgatgaaaaattataaattatttttataatatatctaaattacttttagatttcactaaattacttcttagacatataaaaataaattaaataaaacataaaattaatttgcatatattatagaagaaacttaaaacaaaaagaaagtaacttgtcatgacattagaataaatccgttgtgggggtaactatgatatgttgattaaatctaatttctagagacttatgtttttacctccacaatagatttcttttaataccgtaacaagttactttactttttattttaagttacttctataatatatgtaaattactttcaggctttattaaatttacttttatgactaagaagtaatttaatgaaatctaaaagtaatttagatatattataaaagtaatttgtatttttttataaaaatataatcatgtgagatattgttataaagaattaattgttacaaacataatggtgtaatcggatcataaattagatgagtaatttaatagaaaattccataagaagaaaaaatacatgcacttttgggtgtacaagtaacaatagatatgagattgaggtagctggttataacaatacagagaacggtctcgttgtagacacgtccttgcgagtgagaattgaggagacggagtctaggaaagagaggctttccgctcactgcaactacctcctttttcattgtcacaactacgacaaaaactatggaaacatagagaggcaactcagaattaatttattttttaaaacttcatctattcttttgaacctcaaaaaagatagggagcttatgctttcattaagtaaaagagagttgaccaatagagaaaaaatgggtccaaaaaacttacaactacgcagcatacaactggtgaaaatcagtaaaaacccatgcatagaagcaaagaactaaaaatttcggcgtcacgactactgaatttca

SEQ ID NO: 3705 - DNA, 1019 bp, Oryza sativa
gtattttgcattgaaattaggtatgtccatgagacatgttaacaactcacttactccgtcccaaaaatgccaacctatgctagtataacaaatatgtccagatttattatattaataggggttaatgtgtttaggttggaagcactcaagatagatttaaatatcgagttttaaaatttcatgccaaaaatcataataaaaagttagaaaatattttctaacattgataacggtgtcatctgtgggtctacaaaattgcagcctaaatatatagcctatagaaaacaaaaatgttaggcatgagggagctgagttaaccattttcaatagtatatataagggtaaaataagaaaaaaattaatttaaggtgttcgatccaatgaaatagttagtttgaatagttagtttgagtggacttttttctttaagaaaatagttctatatttaataattctaagaaaattgggttgtcactaatttatgaaagtcctggaagcatcgaaggacctcattcttatgcttaagcatataaatccaagtcatacgagtatgacaatcaataaagatgacaaaccacttgaaaccactcacagaagtaacagggtatggtccccaaacatcagaatgtattaatatgaatggttcatagctatgaaggccaagcccaacatatgtagagcgagtatgtttaccaagctcacaagtatcacacaccagtctatgcatatccactctactaaagaggtctggatacaacttactcaaaaccccaaagatggatgtcctaactaacaatgaagcaaaccgatctccttctaaacatctccaaccaccgcagctagtaccagttcctcatgattgatgtaccacaacccatcacgcctgactccagtcccaatcctcctcccagtcccttctcctagaacagacaagaattctcatcaaatacaacaatgcacttgagttgatcaatagccgaacaaaccgagagaaggttaactggaaaggaaggaacatg

SEQ ID NO: 3706 - DNA, 613 bp, Oryza sativa
gaatagctctaaaccgaagtttaaattaacttgtacaaatactaatagacttggggacaagatgttgaggggaggatgctcgcttggtgcattcctcatcgaccggcaagactcgcctgctgatggcactggcacgctagagatgatctgccaggtgtgggcacagatgctgtgctgctgtggggaacaatgcagcacagattctcatgtcaagcagctcagcagtggcggtgagcttgttaccgtcactgcccttgtcgcaaaatacataggtcaagatgttgtcttggcactttcagatagattcacatagcgtttagcgaatggtaaatagtagggtaaaggtgcacacagcagcaaaattttgttgaagatatgtggacaccattaattatgttattggtgaagatggcatgattttaaatgctatttcaagacagctgaggtaatgcacatatgccttaggagtgtgcatacaggtcagtattccttaaactacagtatactgacttaccttatctatacttttttttttcatatgtgtttttaaactatggagggcaaaaagggaaatatttccaataaaacagtgtatttttttttttgttttcat

SEQ ID NO: 3707 - DNA, 558 bp, Oryza sativa
catttataataactaaatgctatcttaagcatctagtttgtacagttgaacttgtaacaatacatgaatgcataagagttcatatccaagcaccctcttcattgaaacatggtgttttggtgctatctgatattctgattattttcatgttatattgaattgtttataaccattaatgcatactatgaataataataataataatatgatctgacccgaggttatattctgattacaggttgttgatgctagtgcacgtgctctgagaatgatttatcaatcgaaactagctccaaagtttgatgtcaccaataatgagaaaaacatggaatttcttcttacccttttgaacagcgagaatgaaaatgtcacagagcttgctgccaatattatatctcactcttgtgatagcactacagaacaattagcactatgtgctgctggagttccgcagagacttgttaaccattttggaggctccatgaatctacgggatgcttgcttagattctttgactgcaatcataagaaataactgggaagttgcttcaagatttgc

SEQ ID NO: 3708 - DNA, 657 bp, Oryza sativa
ctgtgacgggtgtagtattatgaaccatcacaaaagagaccactcatctctaacgggtctttaactaacacacgtcacagataacgttatctctgacgggtggtagttatgacccgtcagtgatgagtgaaaattcaaatttttaaattttgcaaaaaaacctcggattgaaacatgtcttatataaaagttgtagctctcaatgatatccacaactttataactaacaacatttctattagagatcgtttacatccccgaacatgcattacaagtgatcagatctacttttaaaaacaaaattttgagttttttttcaaatgacatggatggatacatgccccgtatcaaagtcatagaactcaatcagatctacaacattataattgaaaatattttcatttcacaaaatttacatgtttataaagtgagatatattttgaaaaatgaaattttgaattcttcaaacaacatcggatgaagatattttctatgtaaaagttataaaacacgatgagatctataactatttagttgataatattttcatttgaagtcatttagggtgttaaatatatgttaaatgattcagaccagcatagactaaataataacattgggttagtagtcaatatgtgttgagtaagtgagtcggta

SEQ ID NO: 3709 - DNA, 704 bp, Oryza sativa
ccattgctcacatcatggatgaacaagaagatatcgagatcaagtactccaagtgctggaatctgattcggccacctactacactgctgacttcaaacggccaccgatctgcatacgacctccgttttcagcccgtgagtacttgatggaaagctctcggagcctctttccaacggatccagcctcatccccgaattccatctcgtgtggccggaatcacaggcacaaggtgctgcgtcacctataatgggcctatgggcttgtaacttcatttgggaccccagctcaggtggggcccatgtggggtgcgccccaaccaggtgaagcacgcccctaggcatccctaggtcatcctcccacccctatatatagctaggtaccccttcagggtttattgggttttgtttagatgaaagtttagccattgctacttccttgcagcgcgcgtgtcggctagaccatccgtctgcttgtattcgaaaccccaacttatcgtgtgtattcattcctatttgcaattcagattacttttatcttgttcttgcttgtttcttcgatttgcttacaggaataaggttgatctgcaccggcaagatcaacaacccacggagaggtgtatcgatcgcaaaggcgcaacacaacgtcttgtacggttgtagtcggatctcaacgtttctcccaaatcgtagttatctcaactcacc

SEQ ID NO: 3710 - DNA, 16107 bp, Oryza sativa
ttacaaaagattgatacattgtaagggggaggagaagatctgtttccaaacagagattacaaatcgatcatcttccgttaagttctctgcccaaagagttgcctcggtaatgcatcgttgtaggcaggctcttaggagactccagtgtgtttttctttaatttgtgctagcgtcatccatcctttcaacatccagattattgtcctagctcagctttctgttaatttcccactgtcaatatgcgtaattcctctagaacaactgcgttttcagcgaagaatttgaccagacgaactccaaaagacttggagttatcattggccaacttgaattgcaggctaactctcctcaaactgttcttcaagcatgcgaatgagtagtaactcaatccagggaggaatccatcgtcgtcatcgcaatgatctcgcaagaaatgatcgataaacgagtcaaaaaccaacctgagaatttcttcgaaagaaatgctgcactcgtttggagttcttggaggtgccgacgagattcagcttgagctcgcgaagcaccgggcagcaatggaggatgctcgcgaccgccgccgccgtcttgttccaggtgtcgtaagctccgtcgagctcgaggtgctcgatgttggggaacactctcacgaacgccatgtcgctgaggtggcgcgacgccggcgccttcagcttgagcaccttgatcgccatggtgaagttgtggatgaagtgtaggtagtcgtgtcgacagaaggcgtgggtgaagtggaggttcaccaatgccatgtccggcggcggcgccggcgagatctgcaggtcgaacggctgaacggcatcccccttgtatgtgaaggatcgcagcctcggcgcgtagatctccatggcgccggtggtgtcgcagttgatcagcacgagcacggtggccgccgggaagcggaggcgggtggaccagactgtccagacatcggagctgtggccatcggacacgaggtagacggactcgaggtgcacggtggcgagcactggcgcggcgtcgatgacgcggtggagatcgtcgatgttcgccgtacaatgcaatgccgcagccgtagcgtgtccagccacgggaaggcggtggcggcggcggcggcggaggccggcgtgaggttgcggcagttggtgaggtccagcacgcggagggttttcgacggaagggaggcgagcttgatgtcgtagatcctgacgctgccgctactgatcatggtattaatcttgtcgtgcccgaaagggtgcacggcgacggcgacgcggagctcctcgacgcggcgcgccgccgggtgggagaccacggcgtcgaccacgtcgtgatctctgagcaagttgtacatggaggtgcagtagccgctgtgatctccgtcgtcgacgtgtaaggtgagcctcgtgacgacgcggccggcggcggcgagcgccgcatcagcggcacggacgaaggcgtctctgccgccggcgccggggacgcgcgcggcgaggttgaccgcgccggatgagcgccagagcgcgccgaaccgccgcgagagcaagctggtggacgcggcctccacggcgttcgcgaagtggaggacgcggaggaggaggtcgtcggggagggcggacaggcggtcgccgccagcgccgattgccatgggtgtcgtcacctcgtcggcatgcaccgccggcgattctacacgacgcggcgacggagatcagatcgatcttgctgtcgaagatgacatgtatcgatcgggtaagtattgtggcggcgaatcggccgaataaatcgtccgcgtctacgttcagatcgctcgatcaccagatcgagctctggcacatctttcgcatccctaggtccacatatcgctcatgctcgcacttcgcggatcagaattaacaccagctgctttattaaagcggagctagcaccaaaacaagagtggtgcactatttttttcggacgcgcaaaaagattacatgttaatatattagaagaatagaggttttgttacaacgcaatcggccagacagacctatgctgtgagggagaaaaccactctaacaaccagctgcgaaaagagaaaaggactactacagaaagaaaaactactccaacaaacaaaagggagggggggagggggggtggtgccacactatgctctcagcaaatccccagaaacggcaatgcctgtggcagagcacggacagccttccgagtggatggaatcaatgacaacggggactgaggagagagcagagtcgaaaaccctggagttctgctccttttcacagcagccaaagagactaggaggaccaaggagttaaagctagagcgaagatactcgggccctagaagacagccaccagtccagaagcaaactgccgtgggaaggggagagggcagtccaaccatgaggcgacaacaaacggtgtcaagtctgctgagcgaacacgcaatcgaggaggatatggttcgctgtctcaagctcttaagcgcaaaaggggcaaagcagagtgactatcgatgcctcgcttatggagaagatgtaacatcctgatttttcgtttattttaaaaacctattttaaatacaatctttgaaagtcctaatacaacgaaatgactattcaataaattttaaaaagaattatgtgtaaaactagataattttgtggatgctagccgcgtaattacgtgggtcacccagctagtttgtttatgacttgagttttccatttaaagatgagagtgtatcatagcatgttcctccaacgagtagcagatctgctcgaaagcttgtgcgtgatcgtcggccaatgcgacgaacaggtcgacgccgccgccgtcgccgcccaccggcacgaggatcatcagcccctcgatgggcaggtccggcgacaggacggcggccggcggcccggtgccgaggtccatctcgtggaacctgaacccgagccagctgtccacctccaggtccgggcacagcgtctcccccggctccgccgccgtcgcggcgagctcctcgccgcgcgcgtccgccacctcgacgtagtcgacgaacgactggatgtactcggcgtcgacgcgcgccacggcggcgcggatggcgccgaccacgtcgcggtagctcgagctgagcaggcgccggacctggagcctcgggaacgcccagagcaccatgttgccgaacaggtccgccggcgccggcgggttggccctgcgcctgcagttgacggccaccctcacccgcgtgaactcctccggcttcaggccgcgcgccgccgtgatcttcttccacgcgtgcgcgagaacgcactcgaacgtgctgcaccggccgccgacgcgggccttgagctcggcgacgaacttggccgtgaagcgcacgccgatgtttgcgatcttctccacggcggcggcggcggcggcgccagacgaatcgctggatttattacctaccttgaactcgattgaccggtggtcgaacaccggcgccggcgggctgcgtggcacgccggtgatggcgcggtcgagggatggagacgggacgatgaatgcctcgctgtcgcgcaccgccctcgcccacgtggcgcagaaggtgctcatggagtgtccgtcgaagacgtggtggtggccgatgaggccgacgacgaggccgccgcacccgaagcgggtgagctgtacctgcagaagcgccgccccgaagctatgctccggtagtgcggggtacaggtcggtggcgacgttggcggcgagcacggcgtccaggtcgacctcgacggtcgcatcgaggaccagcacgccctcgttgttgacgtgcaggacacgacgacggcgccggcgcccctggccgtcgacggcgatgcggccagacacgagagggtacgcggcgacggccacccggaggccctccttgaccgcctcgctggacggcgccggcgcgcggtaggcgaacaccaaggggacgaagacgtcgaaggccgcgcggtcgaaggcggagaggggaaccttctcgccggcgagcgggtgcggcggcgtcgtcgtcgtcttcagcatcgcgctgctcgtgatctccattagtgaactgtacgttctcttgatcttttgcttgttggtgctcttcgagaggcaccaatggcatcacatatatagagagcggaggtaggtagctagctagctagcttcgagagatgataagaattaatcgattcccatttttaaaagtgttaaattatcgaatctctcgtagaaggctaggggcttggaaaaccattgccagttatcagcggaaactagtggaaattagacaaattttggtaaaaccttaaaaacgagacattaataagaaactactatatattaagagagtcgtaggtgaagaaataaaagtaagatgattatgattggttgagataagactctaaatagagaagttagtatattgtgagagttatatcttgtgacggtgcatgaggtagtatttcaaaacttttcgtaaggacaaatctagctaaagcatttttcaatagtttaatttaaatactaaaagacattttatgaggcacagtataaaataattgactacatctatgtatatacacaaaacataaaatttcttgcgtgcctatgattttttctcaatcccttttatgtttttgaattttgtcttatctccttcgtattcttgagttttcattttaataccccatatacccccttcatttgttgaatgtgagttggttcttagatttttttccctaaaataaaacgaagcacgtattattgcatgattaattaagtattaactattttttttgaaaaattagattaatataatttttttaaacaactttcatataaactttttttttacaaaaaaaacacaccgactaacagtttgaaaaccgtccatacagaaaacgagagaggtgggttgagaaaactggggaagaacacagcctatattgcctctctcatacttatgtgctagattacagagaaaatacgtacaattctcaatgtgatttttttaacaaactcaaatgggacggaattatttgaacccatacctgaataacaaaatttaaattctcaaacataacttttaaacaaatgatgagttccatacgaaagtttcaccggaattgaaaatcaaaattattttatatttgggcttaattttcgttgaaaatgttatatgaatatcattgaatatgatttgaaatttcattttaaaatattaaattttagttttaaaattgtgctcaaataaatataatccctttattttctttttataaatgaatcttatcgcattgagaattttgttcttctcaataaattagcacagaagctagtatgagagaagaacacgtacataacattttttgaagatactagctatcaattcatggtcaacaactcaggacataaaagatgcggaaaaatgcagaggcataggagggatacagcgaaaactcataggtacgtaagaattttcttctatacaaaatgtaattttttcaaccggaggtacgtatcgtgtgtatatttttacagctcagaaaagtcaactatgtagaacttaactaagcctgatcgatgcttgacttttacactagggacatgaggttgtcaatttggtgctccctaggtgcaagttggtagggttgggtacgacgtacgtacgtgctgcatgcttccagtagacttggcatgtggaccctgtgcctgtactagtcttatactcccttcgtactcgtaaaagaagtcgttgaggacagcgacacggtcttcaaaacacaattttgacttcttgtatctataaaaatatttatgtaaaagtaatatatgtatatacttttatgaaagtatttttcaagacaaatctattcatataatttttaccttttcaaaggtttgacttaaatattgccctaaacgacttcctttacgagtatggagggagtacgattcaatttagtatggattaattgcttcaagtcttgttcattcttcacaggcatatatgtacaaactcaattcaacggtctaatattattcgacttttgagtattacaaaaatttcggctgttgaattgtggaagttttttctgaattcgcacgcgggcatctgctaattattagcacgtggcgtggcgtttcagttataccctattactatgcatgtgttaatgtgaatgcacgtatggcaagactaactaacggctaacggaagaattttgttacttttcattccgagtacgtctccaaattaagaccaacctagctagaatatcttagacttatactacctccggtttttaatagatgacgccggcgactttttctcacatgtttgaccattcatcttattcaaaaattttatgtaaatgtatatgatataaatcacacttaaagtactatgagtgataaaacaactcataacaaaataaattataattatgtaaattttttgaataagacgaatagtcaaacatgtgagaaaaagtcaacggcgtcatctattaaaaaacggagggagtatatgtttgtgcacgtctgaactttctttcaaatccggataatgaaattgcctgttctcttgaaagagagtctcttctctaaactacctgagttttttttttctcccgtgatcccatcccaacataacattgatcatagactgcacatatagaacatcttatgtcacatgcatgacacattacttagaatataatgttgtagagttgaacatataagtatatgtgtttgcaattccatgttctcacctcatctccctcatttttcacgcacacgctttttaaactattaaatggtgtgtgttttacaaaaaaaattctatatgaaagttatttaaaaaatcatattgatcctttttttaaaaaaaagcaaatacttaattaatcacgcgctaatagaccgctctgttttccgtgcggggagtttagttcccaacttcccatatctgaacacagcccaaacaaatcatctttctcatattattttcacaaaatttcaaaattcattatttctataatatttaacgtatattcatctattaatttcgcaacaattgcagagtgaacttttacaacctactactccgtccccaacgctgccgcgacaaggcgtcgaccacgtcgtgaacgggctccgccgccgccgcctgcccgtacgttctccctgccgtggacgaaacctgtacatcaggtattggccaaatggccatcatgatcatgttcgtcgctctcgacgtggaagctaagccgcgtgacgcggtcgtcggcggcggcagcggcacgggcgaaggcgtcgcggcggggcgagcagagctgtggttccgatgtacggagtatatgctgccgtaagggacgcgcgcggcgaggttgacggcgcccgtggagcgccagagccagtgtttgaaatttcagttcgaaattttcgccccccaccaaaatgttcatatctcatccgaaactttcggttttttacaattttcttgtgaatttagtcaaattttattcaaatccattcaaaatcagtcaaaattttaaaaaatttcgtacgaaaaaaattccgaaatttcggttctatcgctccccctcggcagaaacctaatttcgaaatttgaaaccctggccggagcgcgccgaacgcgccgcaagagcacgctgtggtggtggcggcctccacggcggaggaggaggtcgtcggggagttcggacaggccgggcggtcgtcgccggtcgccatcggtcgtcgatgccggcggccggggggaggctatagataattaaatcgaatcggcgaaagataattaaatcgacctttgattcgctgataatttggatcgggacgtttaagcgctgataattagttgcggcaaataggctgtgttttttctcccgccggaaaaaaaacacggattacggcaaaccgtagtctcggttttaattatatttttttcggttaagcatagattttaggtgcatgcttttcgatcgcattacagtcaattttttttcgatcgcagaaggattatttaaatatagtataaacacggacactcacttatttctataaaagtacaaacgtatatttatctctctataagtatctctaaaatactaggttaggtttgtagtggtattttatatgagtgtcttagttctactgatagagtaggaaaaaattacaagattaagggttgtaaccaggaaaaaggaaaaaaaatataccaccaccgacacaccgacagcgccaacacacaaatacgggagaaggctatcaccggaccggccgccgttaagcgtgaccgaccgctgctagaccaaaaaaggaacacaggcgagatcgcccccgaggggatgccaaaacgacgtcttcaagaagagaaacgacggaaaaactgccgccgccgtccgtcggggctcaataaagccatgattgggcttacgcccggcaaacacccttgaggggtggaacagcatgacaacgcctttaagagggggaacgaaccatcgttgtcggtccgggcaaagccgggctgggttttcacctgctgctcaacatctgtgaatccacgactgacgctccgatgctccaccaccgctcaagctctgccgacatgtgggacccctgcaccggcgccccccgccggccagccttcgtgcgccgaagaccacgccacacccaccggcagctccaggtcgcctcctccaccgccggctgcgcctctcgcgccaagccagcctcctccaccggacgcgcctctcgcgccagtccgacctccctccatcgaccgcgcctctcgcgccaagccggcctccatctttgccactcgggcctctcgcgtcgagccggcctccgcggccatcggctgcgcttctctgcgccaagccgatctccaacccctcctccaaacgatgccgcaccggccaattgcagccgtctaccacgccctcggctagccgtccgagaccgtcatgcctcctgtggccgcagtcatggtcaccgccaccgcagccgctgctgctgaacgcccagccacctcgtcgtcgccatcctcaattactcgacctcctcagccgccgccaccattgccaccgtcgtcgtcgcgcctttgccgccgacgccgacgccgcgggctccgcagcgctaccactgccacgaggtcgccccgcaccagatccactgtccagggggccggatctgcccccggcgcgaccgggtcctgcccgccgtcgccctcctagccgctgccttccatccccgccgccgctggcctgcaccccgccgcctccaccaccattcgccgccgccgccgcccctcaaccccgccgtcgtcacctcgtctgcctcttccgcctgcgctgcaaccacctccgctggcgtcacgacctcctccaccggtagctcgacctcctctaccggccttcgaaacgacgcggccggttctgctccctcccgacctggccacgcgggggggccagatccgcctgcgtcagatccatcgcctccggccgccagcggcaccgaagacccccgcctccgtccctccatctgttccccttcagagctccatctgtcaggtagaggcgcgagggagaaagaaggccccgccgctgctgtccttaccgccgcccggctttgccggcggcgaggcagagaaggcaagggaggggggctggcggcggtggctggcgtcgccgccctagttgccctagagcgaggcgacacgggcacaggattcactccaccattatatacacgtaaacttgtagaggtaaaaaatctcattggcatatggatattcttggtctatcatttgttattttggactgatcgatgtacaatagatgtgttattgtggacttttgtgtgacgccgatgaatccaaactacagaattgtgccaatgaatccatgtattcctgatcatttaccttttaagagatgagactataaatcgggacgaactattacaacaaccaggcatatataattttcgaaactaaattcccataaactttcttcaagtatgtgctccgaagtccaaaccaataatcttggtctcttggatgatttgggcgcaatccatcattcaacattcagatctatgtactttcactgatttcggtttccgctgtcaaaacgtgcagttcttcgagaaacattgcgttttcagcgaagaatttgatcagacgaactccaaaacaatcggaatcctctcccaacctgaactgcagactgactcttctcaaactactcttcaagcatgcgaaggagcaatcactcagtccacggatatccaatctctgattcgattcgaatttgatgaggcgcatgaaatcatcgatcgacttcccgaaatccgcatcacatttcttctgaaacaaatgcttcacttgcttggagttcttgcaggaatcaggtggcaaatcgctgatgaaattgagctcgagttgacgaagcaccgggcagcaatggagcaggctggcgatcgtcgccgccgccgtctccgccgccatgctccagccgctgtaagctccgtcgagctcgaggcggaggtgttccagttcggggaacacctcggcgacggccatgtcgtcgaggtggttcgccttgagcctgagcaccttggcgttggtgaagttgtggatgaaatgcgagtagtcgacgcatcgccccatgccatgggtgaagtggaggtcggcggcgaccaccgtcgtcgtgtccggcgacggcggcgaggttaggtcgaacagcaccgcttctcccttgtacgtgaaggatcgcagcctcagcgcggtgatctccattgatctgcccggtgcgccttcttcgccgcggcagtggatcagcgcgagcacggtggccgacgggaagcggaggccggtgttccatgttacggggccgaagcggcgatggcgatcggacgagaggaggacgaactcgaggtgcacggtggcgagctccggcgcggcgtcgacgatgccgtggaggtgtttgacgctatacgtgcagtgtcgcagccgtagcgtcgttagcctcgggaaggcgacggcggcggaggcggtgcgcggcggcggcggcggcgagaagttgtggcacctggtgaggtccagcacgcggagggtgttcgacgggagggaggagaacctgaggatgtagaggaagacgtcgtcgtccatcacggcgtcgtcgtgttcgtccggctggccacggtggacggcggcgacgcggagctcctcgacgcggcgcgccgccgggtgggcgaccacggcgtcgagcacgtcgtgatctccgactctgagcgagttgtacgtggagcactcgtcgtctccctcgacgtgcagggtgagcctcgtgacggcgcggtccgcggcggcgagagccgcctcggcggcacggacgaaggcgtccctgccgtcggggacgcacgcggcgaggttgacggcgccggaggagcgccagagcgcgccgaaccgccgcgacagcaagctggtggacgcggcctccttggcgggcgcgaagtggaggacgcgaatgaggaggtcgtcggggagggcggacaggcggtcgtctccggccgacatcggtcgtggacgacggtggcggccgcggcggcggcggcgagacgtgacgatgatgggggagatcgatcttggttcgggctaaggtatggatcggagtcggtggcgaggcgggctttggaccaaatggggcttggcccatcaggctaaatgggctgggcagtagtttttttcaaaggaaatagtgggtcgtaattttaggtctaatttaaatttcatcaatcaatcagagattttccagacgatggcaaatcagaatctggtttcctaccattaatgtcactatgaatggttcgattttgaagagttaaaaacagattataattaaacattggtcaaattacagataaaaattgatccaatgagcctatatatatttttaaagtgtttcctaaggccattcacagtgcggtgaggtgacgttcaacctcacctcacgagcgcatagattctaaaccacgtcagcatggagggaggagcagccaagaacggggagcttcatttggccatccgaacctcctcaaaatttgtaagagaaagctagaatttatcaggagaaagcagggaggagagaaggagggattgatgaaaagtgacttgtgacctgtgacgggacccgctaaaaatagtctgcacaggatctcgaatcttgtgacttgtgaagtttctcatcctatctagctagcagttgtgacttactacgtacctagcagcctagaaccagcaaaattatccggcacattgtaaacgccctaaggaatttgacttttcgaactgcaggcttactcctgcaatgtcagaaacctcgctcgtcgtgatcattgccttcatcatcatccaagaaccccttgctctcctctctctctccacggcaataatccaagctcgattatcacattcacaccgatagagcatcaaaatctaaatcttagttatatgaaaaaaaaaactctcaagataaatccacatgtttaatcttcgtagatgagattagacattaaaaatgcaattgctcaactttgaaaggtttgatgatgtttaatgacgagaaacgtacacgggtcctctgtctagctccatcagtctaggttcgaagacttaacctttctatttactccctccgtctaagaatatagtaatctaggaccggatgtgacgtccaattcagtcctaagttgctatattctggtacggagggagtattcgatattaggtcatttcttaatattcgtgtttttttatgttcaatgataatttttcatgactgaagagagctttttttttttaatttggaagtattataaattagatagaattatgtatgagtcgaaaatgtcaaaaatattgcatctaatacaagtctactaaaatcaattatactataattattatatacttcatcagcgaaagcatgttttggccgacttattcatcaaccatcctcttagctcttgcttcagctgttccagcatgaacaatggcccctcggcggacacgcagaacagctcggcgatcgccggcgcgttgcagagcaagaacttggccagcgaccgctgcgccatgccgccctggtagtgcaccaggttgatctccctcaccgtgctcctcaggcaaggcaccaccatggcgcccgccgccgcggcgagcacggcgtgcgggttgtacctgagctggtgcgcgtcgcggagctcattctgcgagtacgagtcgccgtcgccgttgccgtgcgggtggaacaccagcgacagggcctccagccccggcgtgctgttgaggatcgtggtgaccgtggtcaccgcggcggcggcgtcgtcgtcgggaaggcttccccagagctcgaggtggcggaggttggggaaggtggggaagctggccagcgcgtccttgtcggcgccggcgccgaggcgggcggattggaggtggaggtgcgtggcgtcgtcggcgaacagctgcaggaaccgcctcaggccggtgagctcctcctccgaggtcgcctccttgccgcagatgtcgacgtggcagcacgcgatgccgcgccgccgtctggcgtccgcgtcgccgtggtggagcgtgaggaagtcgcggctgcgcggcacggcgcccctgtactcgaaggtgtggagctccgacgcgtcgacggcgacggcggcgaggcggtggcagcagcggatggccagcctgcggaggcgcgcgccgccgaggatggtgaccgcggtcaccgcgccgcaggcctcgagcgtcaggtcggcgaggcgcgggcagccggagaccagccgctgcacgtcgctcgctgggcccttgacgtgggagaggaccagcgtctcgacggaagggagggcgacggtggccgggagcgcgaagccgcaggagccgagggtgagcgaccgcagcacggcgcaggagaagagcatgctcgggatggtgtgcaccggccgccatggacgaaagacaggagtgtagccacggaccttcttgtcgtcggaggaggcgacgtcgtcgtcgtagtccgagctagaggggctatgactaggagcccgtctcgccggcgacggcgagcgatctctcgcttcttgtttctcgtcgtcgtcgtcggcggcgttgtcatgttgctcgtcctcggcattgtcatcgtcgtcgtcgtcgtcgtcgtcctcggcgatgttctcgccgtcgcggagagagtaggcgcggtcgcagatcgcggggcggccgaggcggagatcgatctcgaggccgtggtcggcggccgcctgctgcacggcgtaggagacccactgatcgacggcggcggagtcggcgcgcacgtagcccatcatgtcgacgcggagcgcgcgcagcgggacggggcggcggtggaggcggcggtggcgcgagaggagcgcggtggtgacgacggcggagaagaccggcggcgcgagggggtcgaggccgcggcggtacgacgggctgacgtagccgcggatcgcggggtggtcggcgtcggtctcggccatggacaccgtgtgcacggcggcgaacacgtggcgccaccgcgacgagagcgacgacgcgcgcgccgcctccctagccgggaggaaggagaggatgtggccgagcacctcgtcctccagcttgctcaggcgatcgccgccggcggccatctccagcggcggcggcggcggcgcgtggcgatccatggcgcgatcggtgtacggatcgatgtagtggaggtttatatcgcggcggcgattgcgggaatacaagtcggtttaagattggagagcacaactgggccaaattcgtgccaaactgttaaaattgggcataatttattctctttttgataaaagcccattagtgcccgactcttttttttatcatatcttattaagcctgttgtatttggtgcaacaatgtttacctcgatactaaaaataataagaattattatgatatttcatagtattaaagttaactaatgagcaaatggcaggaactattgcctctcatgaagttgtgttatgcaactcatacataaattttacataacttttgtgctggaaattgtccaacaagtaaatcagctaatttctttcagtcatagatgatgtaatgctcataatctttcagtgatagatgaatagatgatgttcgtaagaatgagaatgcgcacgtgtatacatgaatatgcgtctgtattatgttaaaaaaacataattttcaggcacaaatagattaccctctcaagggtgccattttatgactattaatgaacaaacataacacatattcctattttcttgggctatgctgatccacacgtttctttttcgcgggtggacaaataaaagagtggtgcgctatgagactgacttccaagctttacgagtagaactatcggataagctcaattagcttttgtaaggcatgattgaccctactcttaaaacattgccggacatgtatgaccataggaaagaaattaagtgtcgaccataacactgcgatgacatgagatcgactcactggattaaatatcagtgtggagattatggataccccatatctacacggcgatgatatttggactgaatataggataccgaatatagatagaatatcttatttgtatctcgggtttgtttctcaacttgtacatcaaggaaacaccttgagacttagtcggttacgactgtattttatctgtatctgcatattccgttagggatatagattatcttttgtaacacggactccttcccatatataaggggggtccgggtgcctctaggggcagatgttgattttctccaaatcatacaattaataatacaatcggcggattcatccccggacaggagtagggtattacttcttgaataagaaggcctgaacctgtataaatcctttgtctccaaacccatacactttttcagcttgatagccaccccttttattattgccgaaatctagtttcgacagttggcgcgccaggtaggggtagcg

SEQ ID NO: 3711 - DNA, 3182 bp, Oryza sativa
ccgaggagaaagaaaagagattttgggccgactttgggcccaaagccaaaagaagactttttaaaactttttcaatttaaattatttcttaaatgcaattccatttattaaaaacactttcttagctcaaataaatcccagaaaaatctaggaattatagaattaagcaaagtatttaatgaaattttatctggccccattttatattggaatttattaattaaacttagattttcttttcaagacttttaaaataaattctagaaattccatttaaacaacaatttatatattttgaattttcagggtgtgacagagctgcaacctaagttaaggtaaataagtcctctatttattttaaggattgctatgattcatatttgtcaccgtgggtaccagcactatatcctgggactggtaccgagatcgcggtttcgtaggaagcggttcacgccgttttccctacgacacgctcctgtcaggtgccgttgtacggcggtatcagattggggtgtgacaacaaataagggtgcatgcatacaaagaaaaggaagataatctttttctactgcttttttgtggtcgataatattttctattaatacttattgcagttcatcatatcaagtatacaaatccatcttcagtgagcaaaaatttaaatccaactatcttgatagttcttctttcaagatgagactacaaatccagatagatgtactaatactcctactacaaaaccaggtgaacttttcagaaattccagacaaactctgtgcagaattcctagtactcttggatgattaatttgggcatcatccatccttcaacgttcagattgttctactctctcaggtttcagtttccactgtcaatacgcgcaattcttcgagaaccattgcgttttcagcgaagaattttaccagacgaactccaaaattctcagaattctcatccaacctgaattgcaggctaactcttctcagattgtactgcaagcaggtgaaggagcaggcagtcaatccagggatgaatccagaaacctcatcgccgttatggcgatgatcaccacgctttgatatgctgtttcgcatgaaatcatcgatcgacctgtcgaaatcaagctgggattttctttgaaagaaatgctgaacttgcttcgagttcttgaaatagtcaggtgacaccgtgctgatgagattcaggttgaggtcgcagagcactgggcagcaatggagcatgctcgcgatcgcggcggccttcgccgtcttgctccaacggttgaaacctccgtcgagctcgaggcgagcaatgttggggaagaatacgccatggacagccatgctccgcctttagcttgagcaccttgaccttggtgaagttatggatgaaacgaaggtaatcacgttgatggaagtagtggttgaagtggaggtgcaccatcttcatgtccggcgccggcgaggttagctcgaactgcgacctcgccgcccccttgtatgtcaaggatcgtagcctcggcgcgtcgataacgctgccgctcatgccgccgttggtgaggcagttgatcagcgtgagcgcggtggcagccgggaagcggaggcgggtggtggaggacattgccagctgcaccaggaagtggacatcgcggatgttggatatgagatggacgaactcgaggcgcacggcggcgagctccggcgcggcgtcgatgatgcggtggagatcgtcgatgttcgtcgtgcagtgtcgcagccgcagcgtctccagccgcgggaacgcggcggcggcggcggcggccgccgacggcgcgaggctgcggcagttggtgaggtccagaacgcggagggtgttcgacggaaggttggcgggattgatgctgtagatcccgacgccgtggctgctcacgatgttgcccttgtcgccccagtgagggtggacggcggcgacgctgagctcctcgacgcggcgcgccgccgggtgggagaggacggcgtcgaacacgtcgcggtggccgcggcgctcgtcgttctcgctgctgaggaggaagctggcgatcgagcctttgtcctccttgtcgcactcgatgtggacggtgagcctcgtgacgcggtggtcggcggcggcggcggcggagagcgccgcctcggccgcacggacgaaggcgtcgcggcgggcgatcagagccgctcttccgatgtatctgctgccgcaggggacgcgcgcggcgaggttgacggcgccggaggagcgccagagcgcgccgaacggccgcgagagcaagctggtggacgcggcctccttggcgttcgcgaagtggaggatgcggaggacgagttcgtcggggaggtcagacaggcggtcatcgccggtggccatcggtcgtcgacgtcggcggcggcggcgatcggttgttgagatcgatcttggttcgggttatagatagtctctgtagcgaggcggcgttgggccaaatcgggctgggcccattaggctaaaatgggctaggccgtaatttttatgaaaaaaaaggttaagatggactgtaatttcagttttaatttaaaagaaaaaatgagaaggttaagaaggactgtaatttcagttttaatttaaaagaaaaaaacgagatttgaagagagagacatcctcaaaatatttttttaagacgaaattatgagggtgatgggtttgttttttttttaaaaaaaacaactcacatcacacggtgtgaagtttatattgatagagcaggaaaaaaaattgcaaacaagtttatatttaaaccacacacgccttgccacaagttgattgccacaagtttactgatatttaatttgaattactaaacactgcaccttttttttcaaaaaatggagctagtatgacagtcaaaaggttgattgtcataggtttactcatatttaatttgaattcccaaacactgcactttattttatttttttacaaaaccacgtgtttccactttccacaagatgctaaaaatataaccgcaacaataaccgtaaattagccatcaaatccacatgagaacactacattaatccaacttcagtgagcaaacatgcaatccatacgtatcttgatcattcacctttcacacgttgtgtgaggcacacacaaatccagatgtactcaataccctacaaaaatattacctg

SEQ ID NO: 3712 - DNA, 6304 bp, Oryza sativa
tcgtccgtctaaataaaaaaatagaagaaaaaacctaaaataaaaaagtccgattccccataagaaagtggcgaaaataaaaaaaactaccgtatccgattcccatctaattttgttcgttttcttttttttctgtttttttccgttttattttcttttcctgtttcttttttttctttcaccttttttccggttttctttgtccgttttcttttcctcctttttgcgtattttcttttcgccgttttttctttcaccaatttttctatttatttcttttaacgctatatttttttgcggttttttcatcggaacaaacccagtgccgccgccacgttgattttcctcctcatatgcttcctcctcctatttactgcaataaccgattctccactactctctcattatttttccccatgaattcccctttcgattcagctttaatttaccagattgaatctccttttaatcatggttattttttatcccaagttttgcagattgctttgattttgatgaaccatttaatcgtcgtcattttttatcccgagttttgctgattgctttaattttgataaaaaaagggaaaagggagatcaagtggataaaaatccctcaataattttggatatggagaaagattcgaccaaatttgatggagaggatcggcttcgttagtcatcgtacgggtacggaactatgtgagctcgagcggattaccgtatttgatgggaggatcggctccgtcatggtataagactatgggagctcgagtggattactggatttgatgggaggatcggctttgtaatggtacggacacgatactgttcgacttaggcctacaactccatttgtggactgagccaaagagaggtagaccgagcagagggagatagaggactgtactaggactagagctgaaaaggacggaaggaatgtgcgttcatttggtccaaaacgcacgggcattaaagggagtatagtgcgtaggataaaaaaatatttttacccgttgcaacgcacgggcattttttctagtaattacatatattcggctactgctcatcaccaaatttgtgccttttgttctcgcttatataaacttatatgtgccacttatgaatttactattccataatgtgaagaaatatttatggtactatgatatatgttgttagatatttatagaatttttaagacttacttacttgaatatatacaacagaaatgcactaattaccttgtaatgaattttcaattttcatataccaactcaaacacatgaacaattttgtggtatttaagaaggtatatattgtgaggtactacaattttaaatgttactttgtgtaactcctatgagatcaaaaaagtttgcactaaaatgcacggggtatctcctttaaaaaccatataaaatcaccaaacacgtatagtttatttataaaaattctgatcttacaagcacaaatacaattatttgtagccctttagctatcatgcattattttcagaagcattacaaataatccatcctctgtcacctttcaaggggtaagactataaagcttgttgtactcgtctcaagctccggtgtcgaatctggacaagttctcgaaaactcccatgtactattcgcaaaattcttgcgtttcagagaaattttggtggaatcagccccaacccatctttcaacattcagattcatatggtcgcacagttttctgtcgccactgtcgatccgcatttcttcaagaaccattgcattttgagcgaagaatttgacaagctggactccaaagcaatcgtccccgctccacttaaacttcaggctaacttttttcagacttctctgcaagcaggtgaacgatcgtcggctcaatgcagggatatcagggacctcatcgacatggcgatcaccatctccttttctactatcgatcgaggaaatcgccgtcgtcgtgttcgatttgcggcgcatgaagtgatcaacggaatcgtagaaatctggctggaatctgccacggtggtttggccaatatctatcagtgcacgttgtggcggagttgagcttcatggtgaactcactgagaaccgggcagcaacggaggagattggcgatcgccaccgccgatttcttggtgttcatcttggtgttcatcagctgcgccgcttcaagttcgacggagacgaggttcggcagcacgcagaggagcttcgatcggctcgccttgtcggcgacggcgagatgatcgaggttatccactttcagcttgagcgtcttggcgttggtgaagttgccgatgaaacgccaggagtggacacgtgctgtgtcttccttgagataatagtcggagttgaagtggaggctcaccgccgtcgtcgtcgtcgtcgtctccggcgccggcgacttgaggtggaatggccgggggaggcctttgtacctgaaggagcgcagcttcggcgcgtcgatggcgatgctgccgccgcagctgtcgtcgtcgtcgctgtatctgctgtgtgcgtagtagaacttgtagtcagtagagccgcaccattccagcgcgagcgaggtcgccgccgggcagcggaggctgatgctgctgcacgcgccggtgtcgcggtggttgtagctctggttgtcgttgttgtcgtcggtgttgaagacgacggactcgaggtgcgcggtggcgagccccggcgcggcgtcgatgaggcgctgcaggtgcgtcaccttcgcggcgcaccgccgcagccgcagcgtctgcagccgcgggaacgccgcggcggcggcggcggcggcgggcggtggcggcagggagaggttgttgcacccggcgatgtccagcacgcggagcttctcgaacggcaggaatgcgaggctgaggccgtagacacctaagtcggtactgggctcctcctccttgtcgcggcggcggcggtggacgccatagctgtcggactcggaggcgacgcggaggcagagctcttcgacgaggcgcgccgccgggtgggagaccacggtgtggagcacgtccatgcccgtgaagatgtcgtacgccgccgccgactcgtcgcagtccaggaaattcgtgatacagtagccgtcggggccgtccacgtcgacgctcagcctcgtgacgtggtcgcatgagatgtcgccgtcggcggccgtgagcgccgcgccggcggcgcggaggaaggcgtcgcggcggcgggccgaaggttcctccgccgtgacctcgtcgtcgtcctcctcgtcgcctaagtcgaagtcctcctcatcctcgacgtgttcgacgaggttgacgtcctcctcctcctcgtcctcgacgtgttcgacgaggttgacggcgccggaggaacgccagagcgagccccaccgccgggagagcaggctggtcgacgcggcctccctgaaggggacgaagtggaggatgcggcggaggaggtcgtcggggaggtcggacaggcggtcgtcctcgccgccggcggccatctcgtcgtgggcgcgcgccggcgaggctatgcgatgcgatctggctattagacgatggaacgagtaaacgatcggtggctttattcaggacttcgtggacgtgtcggtttggtatcataccagatatcacccgttccttttgtttttcaccttatatctgtcccgtcaaaattatgctatgagattcgtgcgtggcaaatatattacgaatagggtttcggaccacgatacgaaactgtttcgtctaaaatttccagaattgttcatgtgctttgaatttagcacggtttattcacatttttatcgaaatttgttaattcaaattatttcggaccagaatattatgaaattctgcaattttgaaattccggttctatctgcgccggtaaaagggataaaccgaaattttgaaccctgactataagttatattatgaccatggaaataaatatattatctaagtgcccggctatatatgcctaatattggtctcaaaattgttcatattgttgtagcagggggctaacaccatactccctattcggtcaaaacactaaagagaaggaggtcttgagatttctaagtgtttaaatggtaaaatactactcgaaaggtaaaacattattcgagtggaattaacgttctattcgagtggttttgtgctactgaagcaactcgtctcgtttgagtaggtttctgattagtgataggtaagttccgagagccaggcagatgagaaggagtattcaaactctcaatatggaaaagacaacccaagataaaaaagacaactcaagatggaaaagacactcaacctaatgactcaaggggaaaacactactcgaacaagaaagatggcaaaagattccatggggaccactctcaaccactcctcccagctggtaccaaaagaccataatgacctccaaaatataccaaaatgtggtgacttcgtcaatctctccaggatttgccggcctagtcttcaaagatgctcataggggtagggtttgcgtacgtgcgttcataggggtgagtgcgcgtgcgttgtgagtgtctgtgttgtactgtgtaattctcaaaaaaaaatacccctaaggttactgacatggcaagggtataattgtaaactcataaggacccatagggcaaaattgtaatatcacatgtacggctgtgggctatataagctggccaaaatcctgtagcaggacaagacataatttaatagaggaatatcaaccaccaaagttgcttttgtgttcgagctcatttatcaggataggctggaaaaaggaatttttccgtttatccccgaacttgtccggtcaagacacatacgtattcacgcatactgatactgaaagccttttgtagttctgttcaaaacaattttatataataactaatttagtttgattctgaaggggatgcccctcgcttttttacacgtctcctaaataacaaaaaaaattaaaagcatttgacaagaaaaatcaatgtgatacaacgcttaaaaataaaagtttaaatccagcctctacaaaatattaaaaataataaactgaaatgtgtattatatatggtaatatattattgaactgaatttaaattgcatgtttatgttgtagtacatattgataaatcttatcaaacttcctctaaaaagtcattactatttggataatatgaaaaacaaatgtaacgctccgcttttcgtgagtcgttaaaaactatttcggcaaaatccttattgcgaaaattttcgttctttgtgtgcgagtctaagttgtgccaaggatctcaattcaaatcccgttgttccctcccatcgccatcaaaatcgtccacctcaagattccaattccgactcaagtctccgaaattcaatcacatcccttgaatccccgccaaatacctatccacatttccgaaaatatcaaatccccatctcgaatcatttccttgagtctcccttgattcatccctaaaccctcgagtttgaatatcaaatttgaattcgaatccaaaccctaaatctctccacttctctccagatcaatctcctccgaaaaagtctattttgcctccctcggacttttgtgggccgttttctcctcggcccatctcctctcagccgctcctcctcctccccctcgcacgtgcattgcgcgtgtgcgctcactctctctctgtttctctcgctctctcgtctttttcctctctctctctcgtcgaactcctcacctcggcgccgattcccgccgccgccgtttgaattcgccggccgcccctcccgcgcgcgcctcgcctgcccgccgcccaaaacggaagggaaaggcttccctttccaccgtcctccctcacttttcccttctaaacccggcctctctcctctcgcccttgtcttcttgcgcgcggaggcagaggacgccgacaacgtcctgccgcgcctgtgccccaccttgaccgcgccagcctgcgctcccgtggttcgaaatcggccgtccgatccaccgccttcgccgcccaaagcatccacgccgtcgccgctttcgcatcgcccacgaaaccgcagctgccgctagccgagcgcttgaccgccaaggtcggttctcccccccccccccaaaccgacatcgcctcaccccgcgcctataaaacccaaagccgagctccccttcccatctcaatccctcccacttcacactcctactccaccgcgccattgtcgcccttcctctgctctcgccgtcgccgtccgccgccgagcaccgggagaccggtgcggggctgcaggaa

SEQ ID NO: 3713 - DNA, 26092 bp, Oryza sativa
ccgtgaaagggggttgcccatccaactgatcgtaatcctcgtcagtcttgtcctcaactccgatgatttttcttttgcctgggagaaccacttgacgcttaggctcatcaggccctctgcccttctttcctttgctagacatgtccttcacgaaaaagacttgcgttacatcattggcaaggacaaaaggttcgtccgagtatccaaccttgttaaggtcaacagttgtcatcccactgtcatcaatcattacgcctccaccagtcaacctaacccattggcaccggaacagaggaaccttgagaggaccatagtcaagttcccatatgtcctcgatggcaccgtaatacgtggcagttgttccatcgtgtcccatggcatcgacacgaacagcgctgttttggttcgtgctcttcatgtcttgggctctcgtgtagaatgtgtacccattgatctcatatccctggaatgtcgcgatcgacccagacggtcccctcgccaggaaggcaagttgttggttgatcgactcgttacccatgagatgttgtcgtagccacgcggggaaagtatcaatgtgatgccgtgtaatccatgcatcggacttaccgatgttcctggcgcgaactagagccaagtgctcctcgatgtaaggagctaccaatgaagagtgttgcagaacagtgaaatgggctttacggaataaattgttgtctaccgtcgttattgctttccttccgagagttccctttccccgtagtctcccttcatggcgtgattcaggtaccccgattgggcgaaggtcttcgataaattctacgcaaaattcgatgacctcctctgttccataacccttggcgatgcttgcctctggacgagcacggtgcgaacatacttcttcagaacgcccatgtacctctcgaaaggaaacatgttgtgtaggtacataggcccgagaatacggatctctttcacaaggtgacaaagcagatgcgtcattatattgaaaaatgaaggtggaaatatcaactcaaaactgagagacattgcaccacttcattctgaagggcttctaatctatccggatcgatgaccttctgcgaaattgcgttcatgaatgcacatagctttgttattgttgcccggacattgtctggaaagataccccttattacaactggtagcagttgtgtcatcaacacgtgacagtcatgagactttaggtttgtgaacttcttctccttcgtgcttattattcgcttgatattcgtggagtatccagacggtacctttatgctctccaagcattcaaacatactttccttctctgccttgctaagagtgtagctggctggactcaagtaatggcttcctttctcctttggttccgggtgaaggtcgccgcgttgttccatatgcttcagatcattacgtgcttccagtgtatctttcgactttccgtatacacctaggaagccaagaaggtttacgcaaaggttcttagtgaggtgcatcacgtcgattgcgtggcgtacgtccaagaattcccaatatggtaactcccaaaatatagagttctttttccacatcgccgcgtgaccatcttcgctctctatatgctggcttccaggcccctttccgaacactactttaagatctttaaccatagcaaacactgttttcccgctgcgatgtttaggcttcgtacggtggtcggccttatgttcgaagtgcttgcctttcttccataccgggtggtttgctgcaaggaatcgacgatgacccatgtatacaaccttcctacagtgcttaaggtacgtactttctgtttcatccatacagtgagtgcaagccttgtaccccttgttggactgtccggataggttgctaagtgcagaccaatcgttgatggttacgtacagcagcgctcgtaggttaaactcctcctgtttgtcctcgtcccacacggggacaccttccttcttccacaactgtttaagatcttcgaccagtggtcttaggtacacgtcgatgtcgttaccaggttgcttggggccttgaataataatcggcatcattatgtacttcctcttcatgcatagccagggggggaggttgtagatacacatcgtaacgggccaagtgctatggccgctgctcatctctccaaaaggattatgccatccgtactcaaaccaaaccgtatgtttcgtgcgtcatttccaaattctttaaattttctgtccatgtttccccactgccaaccatccgcggggtgtctcaacatcccgtcctgttgaccctcttcagcgtgccatcccaacattctagcattcccctcttcctgaacaaacgccttagccgtggtattatagggaaataccacatcaccttagcaggaattctcttctttgttagctgcccgtcaacttctcctggatcgtcccgtctaatcttgtatcgtagtgctttgcaaacagggcatgcttctaggttctcatactcctcaccgcgatataggatacaatcgttcggacatgcgtgaatcttatgaacttccagtcctaacgggcagactatcttcttagcctcgtacgttgtctcgggcaatttgtttccccccggaagaatgttctcgacgagtttcaataaatcgccaaatgccttgtcactaaccctattttttgccttccattgcaacaactccagagtggtatccaactttttgtcgcctgctcgcaacctgggtacaacgaagttctgtggtcctccaacatcttgtccaatttatgggcctccttttcactttcgcagtcctccctggcgtcctgcaacatctgaccaagatcatccgcaacgtcgttaccatcagcagctatttcctcctcgcccgtttgatttccttcaaatccaacatactgagcaaagtccggaatattgtcgtctgccacttcatcttcttccatttcaacaccttgctctccgtgggatgtccaacaattatagcttggcatgaaccctgactcaaacaagtggaaatgaatagtcctggatgcagaatactccttctgattcttacacttattgcatggacaacaaataaaacccctttgcctgttagcttcggccactctcaaaaaatagtgcacgccgtcaataaactctttggaccgccggtcagcgtacatccattaccgatccatctacatgagtcaaaaaaaccgcacacaaataattattcttacaataatgacagtcatacaataattataagatatctttattcatacaaaaatcataaaatattacaccaaataattcttaaaaactagttgtaaagttttaaactaattttaatgtgttttacttcttttaattttcattttagtttgttttctattatttaagattaactttcactagagttttccttctcaactattttataaaaccttgtttagcaaatgaactaaatttctatatattctttcttccccacacacattttctctctcatcaacttacaactaaattttggagacaaaaaaaagtgtgcaaaacataggtgcaaatgtagtatgacaaaaaaaaacattggaggatgaagttgcaaaccttttaggcacctccgatttgtatgtaatcaccaaaataaattcaatagaaattttggcatgacctcccctcttttttgaagtaattttgaagcttgctcgggcagctggaggaggaagaagacatatatataggggtgggactttagtcccggttggtagcaccaacccgggctaaagatcccgggggggcctgacaggtcctgacagcattcgaaccgggactaaagatgatctttagtcccggttggtaacacaaaccgggactaaagatcaaatatgcccgttacccttttgaactgggactaaagatcatctttagccccggtttttattgcatccgggactattgtggaaatcggccgaccgacgaaagatggtttctccaccggtgttaatttgttgatggctactagcttgttggatctaaatactgatccttgtttcaaacatgggtcgttttatagcgtatactcactttgttttgttttattgtataagacgtttacgtttattataagttaaacttctttaaatttataaaaaatagtgtaataagtacaatactaaattagtttcattaaattaaccattaaatacatatatttatagtctaagtaatttgttttttgttagaaactgtagtacatttttctataaattattgcttgatcaaatttgaaaaggagaaaaattagaaacattttatgatatagaacggtggaagcattaatcaataagaaaattgtgttgccatgcaattattacttactattatctccgttccaaagaggctaaagctgtagcattgtaaagataaattaataggaaaggaaaggactgagatgtccccggcctcatgaatttagagatggttgagagtgaggaggttgaggttaaaatgggaagatatataaattctagaggtaattggagtggaagaatattagagtagaagttatattttgaaataaattctagaggttagaagttagcttttagttaagtgtatattctttgcaccacgtggtacgaaatattcgagtattctttactggagttccccttgactgttactactagtagactgttttatagctgatgttattttgatatgcagtagaaattgtctgccattccacggacaggtgggcccatgaaattgaagtcaaaggtcaagcaaatatgttttgggggcaaatgttcatgcaattttccttgtctatttcgtgtcccctcgacaattattcttgcatatggtacgtatactcttccacatcttcaattaattaattcaacacatacatataattacgcaggaataatatacgacctcttaaacattactaagtctaactaatatataaaaataacattatattcagtcaattttccagtacatatgttcttgataattatggacttgtcggcggcatctgtaacaaaccaatatttcctccgtttcatattataagactttctagtattgtctatatgtgcctagattcactaacatctatatgaatgtggacaatgctagaaagtttagtatgtgttaaacaattaagcatagaatttgtcatttgatattgttccagctgggttttgaattattcaacattaacatggacaggttaatataggatcgaatcataagaactaagccaaccagagaggggtgaatggttgatataccccaaaacccaaacttttagcggaaataaaagttactctcaaattcgatgtagatcagtctgaccgaggttgatccgccggtctgaccgagctcgtgccgccggtctgaccggtgttgatccgccggtccaaccgcctgaagattgcttgctgcgtgtgaagtcaccgccggtctgaccgcctttcctccgttggtctgaccgctgcctgccgccgctctgaccgccggtatgtcgccggttagactgccgaacccgatgaaacacaaatcgaagaactcttaaagtagatgacaactttattgcttctctctgtgtttacaaagtgcaccaacaatactccttacaaaaatctcgactaaactcgaaaccctaactaaactagcaactcaattgctctcaaaagcgataccgggaagcctcacgctccccctctatttatacataaggtaggcagcctaaagccacgaaccaaactcatactaagagtcctaaataccttaggaaaccctctagtacaagacacaaactttacataaccaatcgtatcaaatttggactccttccaaattcgactccgcatcccatacgcacacaatacctccatcgtatgccatatggaatcttcaccaaccacgtgcatcaactctagccttagtatcccgcatgatatctgaccaccacggacatcgtcttaccaccaaaccgactcccggtccatcaccgcaaatactctcccgatgtatcgagtcacctacacatgaaacaaacaaagaaaccatattccgagaccaagctatccccaacttgactcattagtagcaaacaatagtattacatacgtatagtatccatctagaagccataaccatgaaacaatcacggatatccaaagaaacaacccgaaaccgaaaccgacacagcgtcggccggtcagaccacgggccggctggtctgaccgctcaacacaagccggtctgaccggcaacctccgcctagtctgactggtcccgacaaaacaacaaactctgttcatcacctgaaaattaattatctccaaaaccacttcgtgaataaattccaaatatcaaaaaccaataatcacagatgctaattattcatcacagaataagaatcaaaacacacattgatcttactgttaattctgagtttatctcaaggtagacgccgtgagtagcccgggctttgctagctgattgaactattcagttacatacagtgttacagacaataatgatcacaaaaagtttgtcctctccgagtgtttttctttgaaaaaattacaccaactagaaggcatcttcccagaaaggaagctgtcaatgatatatttccttgaccaaatcggcattagaaagatcattactgcgtacttgttgcatattatatagacagaaggaagtttactcctttgttcttgcatgctgtcctctaaataatactactagtctcattgtctcagttgtcacaaatacattatcaaagtcaattagggacaagaggatgtatggaattgtagatactggtgtactctcttcactgtaattacagtagaaccatgtgcagattaagactgattgctttgacgttcagacaaaattttgtcatatgcaacaaatttcaccaccatctgaatggtttgaagccaaaatttcctcttaattttggtgtgctctgtttaaaccttgatgtccatgatataacgtgcacatattttttagtgcagaggccaaaagctatacttccatattttttttaaaaaaaattgtcttaattagtagctgctgttaattaccaattccatagatgcgtaatatatgcggaggtgcttgcgcagcaagaactagcgatattgggaaaaggtaaaggttaattattttgaccaaagtaattaggtgattacgtagacaacatcgactttgaccgatttttacttctcacgtttgatttgtgctgccgccgctagcttagatcgagttatagcaataaatatctaattaattgtatcaatcacgtagtcgatcgttcaacatacagtttgtgcttgtaactaaagagtttctggtcgtattttctgctacgaatgcgtcctactaccttcgtttctaaatatttaacgccactaacttttttaaatatgtttgaccatttatcttattaaaaaaattaagtaattattaattatttttctatcatttgattcattgttaaatatacttatatgtatacatatatttttacatatttcacaaaagtttttgaataaaatgaacggtcaaacgtgtgttaaaagttaacggtgtcaaatattagaaacggaaggagtatatattcagcgatgtgacctattgatctaatccgtttagctaaattaattaactacgcatgtacgaatgaagggatttaatttgtgaagtctcgtatagttcataattttgtggtaattaaaacattgatgtcattcacagagaagaactacttgatcatttctgtggcgaaccaaaatatctttcggaaagaaaccactacaatgtcacaatatttatatacttgatatatgtatatacttttagagtaaatttccgatgttttactttggactatcctttaaccaatttttactttggaccaggtatttttacctttgagacactttggaccaccctcgattcttttatctatctatatccaacttgttatatgtcaaataaatgatcttacatacatatagctataagagctatttgacaagtaggagccgacatactcgagatcattcatatgcttttagaagagagtcgagtggtccagagtgaaataaatgtaagattacccaattcaaaatgaaaagattggttagaaggtgatctaaagtgaaacataggaaataaaatatatatggtacaaagtgaattttactcttactttttatgcagtagtatatgatgaaaaaagaccatacttggtagatatttttgcatatatatagatttatttagatgttatcaacagcttattaattactgcatatggttttgactgtcggctacaataggacaaaaataaatgttcttcagttcttgatagtccaagatatgtcattgggttgaaactagttttccaagaagaagtcccatctcatggccgactcgataatatcagcctcagacatatatgagacatgtcaaaatgcatcaaattccacatttccttatctcccgtgtgataatttttatcatttgtttagtgctggtcaattgctagtgcctggtctttgcatccgtctgccactctgttgaatagtgccatgcaatgcatgttttttttcccaaaaccaaaccatacaactttcagttataaagggaaaccagaatggtagaccatgcaattcatttatttttctgaattgaactttcagttgtaaagggaatcatgcatgcagagatagcatgtcaaaattgcatgtcaaaattacctctgcctttttatgcttgatatgcaaggccagcaagattcagaaagaaatatcttaccaatgtaaatgtcaaaatctaccagctgcatgcatattatatgtgtctgatctattctcccttcaaataatcaaccaaaatgtatatacatgtgaccaatctgaagtctgaactctcactatgtggctagattctactgcataaattctgagaagactgaaagaagggtcaaaaaaaattactgtagtatacatgaatatccatttggacttccccagcttcactgctgcagcaagaacaactaaaattgaaccacaagtcaaagcagctgatcttataaaatctcccaattgtactcatctgaatgtattaaaatcttcctaacaacacgcgacatcgatatgatctacacgtccatgtcgaagaaaatttttgcttctccctccaggctgataatacttatcgttttagataagggtgaggtcaaactttagaatctttgattatgaattatttttaaaatatttgtctttcaaatatggtgactacgtatatagattagtcttaaaagtactttaataaaatcatatatttgatatacatattataataaaaaataatggtcaaagttattttttatttttaaaatatttgtctttcaaatatggtgactacgtatatagattagtcttaaaagtactttaataaaatcatatgtttgatatatatattataataaaaaataatggtaaagttattttttttaagatcgtgttcttgtttaaaataataagtattaccaatccggacgagtattagctatcacgagcgtattattcagagtttcagacaacctctactgtacggtactatctgtcgtatggaaagacttacaaacgtagccaagagaatcagagtcagactaatgctgggttggtaggggttggtgagacgaagaagtctttgcttctatctaactagaattaatatgacttaatcctaattaattacttccatattttaatgtatgacaccgttgactttttatccaacgtttgaccgttcgtcttattcaaaaaatttatgtaattatcatttattttattgtgacttgattcattatcaaatattctttaagcataacataaacattttcatattttcaaaaaaaaattgaataaaacgaatggtcaaatattactaaaaagtcaacgacgttatacattaaaatacggagggagtatattactactacatgtcaacctcttcagggttaacaagtcaatcaaccccaggattaagctggggttgaccaacctaattggttactactccaagacaaaagttatctctgccaatgatataatattaatctccagttactctgctatgatatattgtctgatctttgatctttccatgaagtagctagctagctagctattttagcttgcgtctgcgaggcaactgggttgcgtgcctttgttgtgttggaaaagtatagcaaattagcaatgcagtgcaaatgcagcctaattttttctatctagtgttcctcgttttacccttttttccattgtgctgatctctaccgtccattttgtcatctggtctgcagcgattggcttggtcaaccattgcaaacggccatccggttcagcaaatgtacttctgtgccaactatatgcgtatggctgcatcatcagccaccttgcttctatctataaatatgaccccaaaactgtcctggaagaagcatcacttcatcacaaaacctaccaagctaattcagcatttcagcttggttctataggtaggagctggtaagatcaccatggagaagctctccatggtgacctctctcctctgcgccatcactgtcgcggttctcgccgtggcggtggtcagcggcgaggcggctgtggtggagcacaccttcgtggtgcacgagatgaacgcgacgcacctgtgcaacacgaccaagatctacgtggtgaacggacagttcccgggccccacggtggacgtgacggagggcgacacggtggttgtccatgtcatcaacaagctgccatttgggcttaccatccattggcatggtgtccgccagatgaggagctgctgggctgatggggctggttttgtcaccgagtgtcctatcccacccggaaacgagcacacctaccgcttcaacgtcaccggccaggtcggcacgctgtggtggcacgcccacgtcacctgcctccgggccaccatcaatggtgccttcatcgttcgccctcgtgatgggaagtaccccttcccgacaccggccaaggacgtgccgatcatcataggtaatgaacggtccagatcgatcgttgacctatgcaccggttgatcttgaccgttgattaattgaatttgtttggttggaataatttcggtacttacgaatccacttacttaagaaatatgtatcatcccatttgtaggagaatggtgggagcttgacctcatcgagctagatagaaggatgatggatggcaacttcgacgacaacccgttgtctgcgacgatcaatgggaagctcggcgacctcagcaactgctctcgcatggtggaggaaagcttcatcctcgacgttaagcacggggagagctaccttctccgggtcatcaacactgcactcttctctgaatactacttcagggtcgccggccacacgttcacggtggtcggcgccgatggcaactacctgacgccatttaagacggacatggtcaccgtcgcccctggcgaggccatcgacgtgatcatggtcgccgacgcgccaccggcgcactaccacatgatcgcgctggctaaccaacctccggagccggacccgcagatcccggtgttcacctctcgtggccttgtccgctacgccggcaccaccgccaacaacaacggcctcccggtaccgatgccgatcatgcccaaccaacacaacaccatgccgtcctactacttccacgccaacctcaccggccttgcccacccagagcgccatcgtgtccctatgcatgtcgacgagcgcctcttcgtcaccttggggctcggctccatatgccgtggccagaacaccacctgcaagcggcggcgcagcccggagaccatcgtggtggccaccatgaacaacgtctccttcgcccacccgaaaaccaccgcgctcctcgagcgctactacgacggcacatcgaagggcgtgtacacggaggacttccccatccggccgccgcggcctttcaactacaccaaccgtgatctcatccctcccggcccgctcgaggaggcgttggagccgacgttcaaggcgaccaagctgaagcggttcaagtacaacacatcggtggagatcatcttccagagcaccacgctgatgcagagcgactccaaccccatgcacctccatggctatgatgtcttcctccttgcacaggggctcggcaactttaacgccaagagggatgtcaggaagttcaactaccacaacccgcagcttaggaacaccgtgcaggttccacgtggcgggtgggccgccattcgcttcgtcacagacaatccaggtaaattttcggtggcatataaggaatttatgaccgcgttataagatatgatattattttttgttgttctatgttggtaggcattaaaattgggtgaaaagagaggttgatgtgtcattgttggttgtgttcttgtttgcagggatgtggtacctacactgtcactttgagttccacatcattatgggcatggcgacggcgttcatcgtggaggatgggccgacaccagagacgagcctgcctccaccaccaccggagttcaagagatgtggcaacaatggtctgagtcaaccatgagggttttgaagagaaagtccaaattttttactgctacgagtaataaaaaataaaaaatgcatggatttgtagtatgcattgtattggtgatgattattcttactgtaaaagagatttactattcttttttggtattcattgttgtaaggtggcaaagtgtaagtaaatccatttggatttaatttatgaagaagagaacaattatttatgaagaaagtcacctgtcaattctggggtacttcagaggtcagagttaactctgaactttcagacttcagagtttaaggccatgtttagattccaacttttttttttcaaacttccgacttttctgtcacatcgaactttcctacacatataaacttttaatttttccatcacatcgtttcaatttcttcaaacttctaattttggcgtggaactaaacacagcctaagactctgaacttgtgaaatctctctgaatttttctccttttggcgtgaatcggcaacccatcttccaaccctgcgattcatgtgcttgcacatttactgattcccatcatcaacgttaatctcttcaagaaccatggcgttttcggcgaagaagttggcaagctgcgatccaaagcagttggtcttcgatctccattcggaattgcaagctcactcgtttcagagtgctctgcaagcactcgaacgattggccactcaagacagcaatgtcagaaacctcttcttcttcttcatcatcgtcatccaaagaaagcttcggcttcgaactccggtgcacgaagagatcgacggacttgtcgaaatcgagtttatatctgaattgtagtagaagagatcgtgatgagtagtctctcttgtacaggtttgccatcgccacggcgctgcgctttctggaacacggtgcattgtgccgtaggtccagctcgaggcgatcgaggttgacgagagccgccaccgccgccgcgccgaggctctcctcgccggcgattgcgatggcgttgtgggtgagctgccagaacgccgtcgcgacgcgtcggctccgattgtcgacgaggcgcaggtctacctcgcgccgccatgtccggagctcacgatcgcagcgagaggtggaggacgaagccctgtagacgaagtgtcgtagcgccggcgcgtcgaggtccagggctcggagccgtcacgccgacgccgggcgttcttcatcttccagcggcagttcgccatggcgagcttggtcaccgacgccgggcagcggagacggagagacggacgcccatggcgcggcatggcgcccttggcgccgccgggttgcggggcgacccttgcggtaacaggaggaagacggagacgagagatcctgcgatctccgtcgtcttcggattcggaggacatggtggtgaggtcgttgtcgtcgtcgtcatcgatcgtcgtcgctgccgttgtccgggcaggatatgtgtgttgcgccgacgcccatgccgacgaacgctcgtcatcgagacggtgtggacgctggcgaacacgtcgcgccaccgcgtcgagagcgcggcccgcctccgtggaagccactgagatcgctgagacggtcgacgccgtcccctcgtccgtcgccggcatccatcgcggcggcggcggcggccggcggaggcgtgatggcaagttgtcatctgggctgggctcattatgtagctgggctgcatgggatgcgacaatgcagaatgaggcccacctagctaccgacgacaaacccaatgcaagttgcagtctcacaggcccagcgacggacctgcgctcatgaattgcttggtagcctttgcgttatttttacacttttgtttttcaacaaaatttcagaatttcgattgccaccaaaatttcaggaattttggaacttttttcgacgaaattattgaaaaattttaataaatttaattaaattttgactaaattcagaaaaattaaaaaaattaaaaaaaaattggacgagatatgtgctcgttggtggggggcgaaaaatttcctaattcggaaattgcaaaatcccttacgcaggtcaacttgatagggggtgacgaaccgaagtgcaccaatcgagcaggctctcgtcatcgccgctgcactgcgctggttagggccagggctgtaaatttcggaacgaaatttctgaaatttcggtcattttagacctctccgatacaatattatttcggccgaatttttttttaattttggtaatatttgtttaaattcaactaaattttgtttaaaattttggaaatttcggaccgaattggtgaggtccaatcaaatcggctaaacctggcggtggctggaacccttgtgccgtaggtccagtccagctcgaggttgacgagagccgccgcgccgaggctcttctcgccggcgatggcgttgagccggtggtcaagcctcagctagcgtcgatgtgccttctcgcgttgctgaactttgtggatgagctgccagatcgaacgccttcgcgacgcgtgcgtgtttgctcgccgcgcgtgtcgcctgtgattgtctccaaccgccggaaggaggcggtggcggtgccggcgccggcgagcggttgacatgggacatgggtggtctttggcgcagttcatgacgtgcagggcaggagattcgaaacggatgttcagtggaggagcattccgaatttgatctccaggaagagaacaccattcttctgtgctccgtcaaagttggcacggttcagggctaagcacacgggactagctatatatatttatcgacaaatttactcggaaaaaaattatcagatgtaaatgtaaaataattataatgtagttatagtgtaacctgcatgtagctacaatgtattttgtgtataactttcaaaagtcctacaacaacacgttatttgcatgaagcgaaagtcgcgagaccaaatttcctcacccgctcgcactgtgtatgatctttttctttccaacatgcacgaatcttaaattaaatctaatggtttagaactgtatgaaaagttatattcaaattaaattgtagttatatgcaacgcaacaattatattgtatttacatttaacattttttgggagaaaacttagtataatttatagcaaaatcgaaacacaacatacttgcgtcagtctccaattcagtatttctccccatatataccagcatctgaagcaaacttgaaggcctggaggcaggtctctgcctctgcctctgcctgagacggttcagaaacattttgcaggttgcccgaccccgctgagactgcgatggctatctctgatgatgaagccccagccaccagattctgtgctattcctgaaaaggctccatcaacatttatcttcaggtatccctctcccggtttcttccatctaggttgactgccaccaacattagcaaggggtgatggagaaaccgtaccaacatccatcccaaaatctgcaaattcgccaacaggcatggctggccctgattgatatctcccatatgtgaagaaatcatgaccttcggggatgcagtaggtaataaatagcgtatagcgggttgttagcggattagtgtccgtgcagcggattgcggatagtgggcgctattgcggacgctaagttccaatagcaaatataagaaaataaccataaatatatcaatattatcatcaatttcacttaaatattagaatttataatacatttttaattactcatatatttcataacataaaaatatgaaataacatatagatatataagataaataaaataaacaatgtaaagttttacaattcatatatccatatatgaagaacaacatttaagcgttataacggtccaataaagtcaatagcgatcgcgaagcgctataacgggctgctatagcggtaacgaagtgctatatcgggcgctaagttacaacatgctatcttcagtccgctaccgctattgcgggcgctacgaacgctatttattaccttgataacagtgttgctaacgccatccgatgataggggcgtaccccatatcatttttttaaaaagaaaatttatatatagtactctctccatatcaaaatatatgacgacatgttttatcatataagaaactacagccttaaagtatttatactaaatttaagaataaaatgaatggtcaaacattatgaaaaagtcaacagtatcatacattttaaaataaaatatagtatgttgcttatgtacatactctgttgtgtctaatactttcttctcatgtttcttttttcttagtaattgggcttcctttgttatttttgtaatgtgtttaaattattgagattcatataatatgaactatttctttttccacaggaaagaggtccctgttttcgggcaatgaacagttgaacctgaatctatcccgtaatcactgcttccatcatcgatgcaaaccttacatgatttgacactgacatcccttttcaaattaatcaaggtagtgtttggttgctgggatgagatgggatgggatgggacgaacccacttttaggggtgtttggttgaggggtgggtaggatggattggtccctggagaggaatattcctctcagatccgggaccaatcgatccgggaaaaagagccggacgaactcgtcccacctgggacgagcgcacggcgtcagctcatccgcgactgccgccactcgtctgcgaccgacgccgcctcatccgcgcccgccgccgccttgcccccacgaccgccgccgcctccaggaccagccgccgcttcgtctgcgaccgcctccgtctccgcgaccggccgccgcctcgtctgcaaccgcctccgcctccacgaccgactgccgccgctcgtctgcgcctctcctcgcatctgcctccgtgcgcggcctccgcctcatccgcgaccgccgccgcctccgcgtccggccgccgcctcgtccgcgaccgcctccgcctccgcgaccgactgccgccgctcgtccgcgcctctcctggcctccgcctccgtgcgcggccgccgccgcctccacgtccgacgccgcctcgtccgcaaccgcctccgcctccgcggccgactgccgccgctcatccgcgcctctcctcgcctccgcctccgtgagcggctgccgcctcgtccgcgaccgccgccacctccgcgtccggccgccgcctcgtcctcaaccgcctccgcctccgcctccgcgaccgaccgccgccgctcgtctgggcctcgcctcgcctccgcgaccgcctccgcctccgtgcgcagccgccgcctcgtccgcgaccgccgccgcgcgcgcctccgcgtccagccgccgcctcgtctgcaacctcctccgcctccgtgaacgaccgccgccgctcgtctgcgaggtagccgctgggagccagacggccctaacggtccgtgaaagttctccatcccatcccacctcaatcccttctaccaaacaaaaaactataaccatcccataccacaaaccaaacagacaactggaactatcccatcctaaaaaactgggataggtctaacccatcccactttgtccccaaaccaaacacacgccaaaatgcctgccaggctacactgtcatccatatatattatcgcacaggggaatacaatagagaggattaaattagcatcagccgtttggaaggttaattttcctaaccatctctgcatcccaatttgccgttactggatcaataagctcacatatatgctcctggtttatggatttaaggacgagggtttgaagggatcagttgcagctaaattagcttaagtgggccacaattttatcaccaggcccaactgtccgcaattggtccctctgttggattatgtgacctacctaaacatgaatattacagcgatttcatcttatatgctatttaaattactagaaaactgaaaattctaggaacatagaattatgatatatcctatataatcgagtacccacgcagcagaatttcagcacgggctatatattccgagaaaattcaacgaaatcaagtaatgatgcttattgatgttcattttataattatatagcacaccccacttcacacgcatatcaagctgaaaaaaataattgatggagactaggtacagtccgcctactgagcagcccccttccagatgaccaacatgtggacaacagactaatcaaataatgaccagctcaatcgactctaggagccgtgatttcaggaaactattttgatccctcgaggaaccatggctcttccgctcgatcgctccggctcgccatgactgcctatgtggacctgcctctgcctatcgcactcctgaatcagcgacgcaccacaatacggacgcattcatgacacgtacctgcactagaattccccttcccaaccttactaatcaatcggatgcatatatatgggcttggttgttttgcattgcaacaagaaaatgggtcacgacaggtcaggagcgccatcatgggatccactgccatcacagtgactattcacccaccaggaatacagtggcctagttgtgtctataaatatggccccaaaacctgtcctcaaagaagcatggcttcatcagaaaatccatgaagataattgagcttggttctaacagctaatagctgatcagaccaccatggtggcctctctcctttgcaccgtcgccgttgcggttctcgccgtggcagcggtcggcggcgaggcgggggtggtggagcacaccttcgtggtgcacgagatgaacgtgacgcacttgtgcaacacgaccaagatctttgtggtgaatgggcagttaccgggcccgacggtggacgtgacagagggtgacacagtggtcatccacgtcgtcaacaaaataccacatgggcttaccatccactggcacggtgttcgccaattgaggagctgctgggccgatggggcaggcttcatcaccgagtgccccatcccgcctggcagtgagcgcacctaccgcttcaatgttaccgaccaagtcggcacgctgtggtggcacgcccacgtcacctgcctccgctccaccatcaacggcgcattcatcatccgtccccgcgatgggaagtaccccttcccgacacccgtcaaggatgtaccgatcatcataggtaacggacagtcctgattgaccgttgaagtatgcatcggtcaatcttgaaagttgattgatcaaacctgtttggttggatggatggcacaactttgtgaacctactgactaaggaataccatgttattgtaggtgaatggtgggagctcgacctcgttgagctggacaggaggatgagggatggcaacttcgacgacaacccgttgtcggctacgatcaacgggaagcttggcgaccttagcaactgctccggcatagtggaggagagctttgttctcaacgtgaagcatggggagagctaccttctccgggtcatcaacactgcattcttctccgaatactatttcaaggtcgccggccacacgttcacggtggttggcgctgatggcaactacctgacgccgttcaagacagacatggtcaccgttgcccccggcgaggccattgacgtgctcatggtcgccgacgccccaccagcccactatcacatgatcgcgttggctaaccaaccaccggagccagacccacagatcccgaagtacatctctcgtggcctcgtccgctacaccggtgtcgatgccaacaacaatggcctaccggtcccaatgccgatcatgcctaaccaacacaacaccatgccatcctactacttccatgccaatcttactggcctcatgcatccgaagcatcgtcgtgtgcccatgcacgtcgacgagcgtatcttcatcatccttgggcttggtaccatctgtcgtggtcggaacaccacctgcaagcggcagcgcagcctggagaccatcgaggtggccaccatgaacaatgtctccttcacccacccaaacaccactgcgctcctcgagcgctactacgacggcactccagaaggcgtttacacggaggacttccccgttcggccaccacggccatacaactacaccaaccctgctctcatccctcctggccctctcgaagaggtgctggagccaacattcaaggcgaccaagctgaaacggttcaagtataacacatcagtggagatcatcttccaaagcagcacgttgttgatgagtgactccaaccccatgcacctccatggctatgacgtcttcctccttgcgcaggggcttggcagcttcaacgccaagagggacatcaggaagttcaactaccacaaccctcagctcaggaacaccatattggttccccgcggtggttgggccgccgtccgcttcatcacagacaatccaggtaaacgttcaatggcatataaggaattcactattatgttatataacatgatattattttgtcgttttaagttggtaggtataagaattgggtgaaaagagtggctgatgtgtcattgtttgttttgttcttgttaacagggatgtggtacttgcactgtcactttgagttccacatcattatgggcatggcgacggcgttcatcgtggaggatgggccaacaccggagacgagcctgcctccaccgccgccggagttcaagagatgtgatgcctcttgaaacaacttatcctaacaactatggcaaggaccttcctcctctttgccagtattcactagataatggcattgcctttggggcattttattcttgtattgcattagttaagacgtacatgttaaattccagcgtgcacaagccggtccaggccatgtggtcatcagcttcaggccaaggtcacgaaaagcacaacttgatcatctgcatcttgttatgtactccctccgttttttgtttgatttttttttcttgtcaaacttctttaatttaaccaaatttatagaaaaatatattagtatttccaacacaaaataaacatattatgaaaatatattaaatgttaaatttaattatactaattttatattttagatgttgttaaatttttctataaacttaatcaaacttaataaagtttgactagcattttataacatgaaatggagggagtatttattaaaaactcccttgcaaataatacaaacttcaaaatatcatagtcctctagtaattgaattaactgattgcactatttatcagatgcaaatcttatattcatcgttactaccatcaatgggtaacaattgcacgatcatcatcgtctttcaaggggtaacaccttaaagcttgttgcattcctctcgaactctggtgccgaatctggatgaattcttgaaaactcccatgaactccctgttaaattcttgtctttcaaacgaatcttggacgaatcaactccaacccatctttcaacattgagattcatgtgctcacagagttttctgttaccactgtcgatgcacatttcttccaaaaccatcgcattttgagcgaagaatctgataagccggactccaaaacagttggaggccgaacccaactgaaactgcagatttactcttctgagacttctattcaagcaggcgaatgattttccactcaatccagagatgttagaaaacttatcatcatggtgttcatcgatcaaggatgatgaaaccgctgtcatcttcgatttgtgacgcatgaacagaccaacggatttgtcgaaatctggcttgaatttcgcatgaaatgaactcaagtacatactattattcttcgaccatgcgtagttgagcatcttgagcttcagactgaggtcgaccagagcagggcagcaatggagtaggttggcgatcgccaccgccggcggcggcgccggcgccttcgtcttcgtcggcttcctcactgcttccagctcgaggcgctcgaggttgccgaacttgcagaggagctcggctcgcctcgccttgccggcgacggcgaggtggccgagctcctgcaccgtcaacttgaggatcttgacgttggtgaagttgcccaagaatcgccaaagtctgtcggcgaatctgtggtcgccgtcgatgaagtgaatgttcaccgccgtcatctccggcgccggcgactcgaggtagaatcgccggggatgccccgtgtacctgaaggagcgcagcttcggggcgtcgatgccgatgccgccgtcgaggtgggagttgatgtagctactagagccgcagaattccatggcgagctcggtggccgccgggcagcggaggaggaggcgcgattctacggcgacgaggccgccgtagaccccgtagtagtcgaggtatatgttgaactcgaagtagacggactcgaggtgcacggtggcgagcgccggcgcggcgtcgatgaggcgctgcaggtgcgccaacctcacggcgcagagccgcaggcgcagcgtgtcgagacgcgggaacgcgacgccagcgtccggcagagcgagcttgctgtcgctgaagttgcactcggtgatgtcgagcacccggagtgtcgccgacggcagggaggcgaagctgagggtgtaggtgtagatgtcgtcgctcctccatcgtctggcctcctgccaggggcgctgctcggcgccgtcggtgcggtacatgggacccgcgacgcctacgcggagctcctcgacatggcgcgccgccgggtgggagaccacggcgtcgacaatgccgatctcctcgccgccgccgccgccgccgtagttcaggaacttgtctaccccggagaggcagcgtcccgccacgttgagggtgagcctggtgacgccggcgccggcggcggcggccgcaagcgccgcctgggaggcgcggacgaaggcgtcgcggcgggatgagaaggcctcgtcgtcgccggagacatcgtcgtagacgacgcgcacggcgaggttgacggtgccggtggagcgccagagcgagccccaccgccgcgagagcaagctggtggacgcggcctccctggaggggacgaagtggaggatgcggcggaggaggtcgtcggagaggacggacaggcggtcgtcggcggccatcgtaattagtttaggtagcaattggtgtcgatctgttctaagctatgggattaacgaaccgtcaatcgtcattagtttgggcttaatggccttatacgtatgagaattggacttcaccgtcgtctacaagatctcttacaaatttctactggtacttcaccgtcgtctataagatctcttacaaatttccaaattcttttttcacggatacgttcttcttttatatgtgaacacgcaaacaaattgcacgtcgatatgttaggagaaagcaaagatttaattacacaacgcaacaggccagatggatggccatggacattgccagggaaaaaaacaaattcaaatccacaaattgaaatttcaggaaaaaaatataagtttattaaataatttcataatatcaatatctagctgtccctaaatctgtataagaactgatgcatgcttttcccccttctagaatagtttttttttcaacccaagtgtgtgatcacttgtgtatctgacctgtttgctacacaccacaaatatcaaactaatatttattagaaattataaactaaattgacaatattgatacaatgatcatatatcatctcgtaaaatttcgattccgatgtagatttacactatgacatcaacaaaatctacttctactctctctctctctctctctctttatatatatatatatatatatatagcaaaagtgcccgtgcgttgcaccgggtgattacagagtgtgtatattgaccaaaagtgttgtttggtttagcaaaagtgcccgtgcgttgcaccgggaagtttacagatcagaaaaatatgcaattaattaaaatacaaattcgctgaaatatttggtatttttaagtaggtatgtgtataattaaataaatttacaagtaaaattctccattctccatggttaaataaaatgacatggttaaatttaattttattaaattctccataattagttacgctctttggaattttattggaattttcagagcttaattgctaattttattaatacaaacatcatttaacaattatttaattggaaaaagaaagaaaatactttcttataggtttgcttcgaaataaacatattcaatagaactataattgtaatgcttctgaaaaaatgagcactaaaaatgtacttattctctttttttcggctcgagggaccaacaatagacttatttccgacctatgccggtcggcccacggccttttgcgcatgcgcgggcgcacttttcctcccccaggccgcaacctgggcttgggccggaaaagaggcctcactctcgatccctcttgggccgatttcggcccggacgacaccggccgtccgatctctagggttttgatcggacgaccgagcgtcaatagtggggaaacaaaacccactccctctcagccgcggaaccctagcccatttccccccctcccatctcacttcgccgccctctcctccgcgcccccgagcggcggcggcgacgacggcgcccctcccccaccaccgatggcggcggcgggggcacccccaccacccacggcggcgtcgggggcatcctcccccaccaccggcggcggatctagcgggaggggaggcgccccgcgaccggggcgaggggacggcgcccttcttccgcgagcggggggggcagcaccctcccccaccaccggcggcggatctagcgggtggggaggcgccccgcgagcggcggcgacggcgcccctcctcccgcgagcggcggcggcggtggagtcctcccccaccaccgacggtggcggcggcgctctcccccaccaccggagagtgcctctgccgccgccgctggcggatctagcgggaggggaggcggcggcggcggtgctctcccctccaccggatccacagcgacggcgacggcggcggttcggcaacgacggcgacggcgacggcggcagcggcggcgacccccttcgatctaattttttgtttttatttggatatatgtgtgctggcggcgacccccttcgatctaattttttgtttttttgcaaagtgctataaggctgcatgtgattctttgttatgtgctatgattttttatactatgtatgtatatatgcacttgttctccttgtgatgctaaccgaataggacttggtataattcaaaccaagtcctattcgcccaaacaaaaacaaagtcctaatcagctcaaacgaaaacagatgggagtttgtttcctatttttgtggaatcggacatattcttttaccgcgttgatgaatcggattcgttccggtttttttcacccggtttttttgacggacga

SEQ ID NO: 3714 - DNA, 21224 bp, Oryza sativa
taaaacttattcccgtcccggatgacacctatcagtgacgggccgtagttaggcccgattgagataacatttcatttctcaaacgggcctaaagttgcggcccgtcaagatgaccatcaactgtgacgggcaccaactttaggcccgattgagataacattgtatatcttaaacgggcctcaagttgtggcccgtcacagatgaccatcatccgtgacgtgcaccaacttgaggcccgtttgagatagcaactaggcccgtcacagatgactcatcagtgacgggctatatacttaatctctatcgggtattaactaaagcccgtcaccgatgactatttttttcatttttcatatgaaatgtttatatttgtaagttgaactatagcaaaataattaaatgcagtataataattcattttatgagtcaaaataattttacgggtagtaaatgatttcaaatggaaaaaatgtcaacaacaaagttgtataacttatcaagatttacaacttttagtttcgtcatttttctatataaaattttttttgaacactttgaatttgaatttgaaaatataacaaattcaacaacattttcaaatactaaacgatttcaattgaaaaagtcatcaacaacaaagttgaataactcatcaagatctaaaacttttatttttgttatttcttcatccgacgaaatgttagtaatattattcacaaattttacatatatgtgttatagttttataaaaccagataagagatatgtcaattttgtgaacaatgttactatcactttgtcgtatgaagaaatgaccaaaataaaagttttagatcttgatgagttatcaactttgttgttgatgactttttcagttgatataattaatatttgaaaatgttgtttgaagttgccatatttttaaattcaaatttaaacggttcaaaaaatgttatatagaacaatgaccaaaataaaagttatagatcttgatgagttatacaactttgttgttgatgaatttttcagttgaagtcgttcactgatctaaaattctatttaaacttttcaaactttgaatttcaaatttcaaattgtttaaatagagtcatatggagaaatgaccaaaataaaaattttgcacctcgatgagttctacaactttggttttggtaactttttcatttgaaatcatttaataaccccaatttgacatcctggcttagggcttaataagattaatagaataatcataccaacaagttacaactatttttccggaagccaatctccaaagaaacttgatgttaagcgtgcttggcttggagcaatttcacagtgaccgaccgggaagtttgaacttcaagtgaggacaaaaaaagactagcctaggaggcctgagactagccaaaaaataaaatttatttttttaattatactcatatgtgacgggcattaacttaggcccgattgagatgatggtcatctgtgacgggtaatgcccgttacagataagggtcatctgtgacgggcgctagttgtggcctgattgagataggtcatctgtgacgggctataatttgactggtcgtctgggtcaaagctatcggtgacgggctttaattaggacctgattgagatagatttatccgtgacggccgtttgcccgattgagataactcttcacatctgtgacttctagcctgtgacggacgccgtgcccgattaagatggggtttaccgtccaattgagatgatggtatcccttctagtgttagtttgaagcactcctgaatcctgaacttaaagcgcttatcccgtctcaaatcacaagaagttggaccagctacttccggtcttccactttattaagcacgtgaagtcgaacaaagaaagagtccatggcattattacaattatatattatataggacaatttaaaccatgccacacaaaatttgtaaaattttacaaaatttatgatatgccaccctgatccatatgtcattgactcatgtggattctacatgacattgggaacgtgtggcatatcttaaattttgtaaatatagggtggcatggttccaacaaacccttatattaatacaaactttaatatgatacatagtacagataagatgatctatgtcaccgatagctaaatttttctggtgaacgtaaagggacctagaaagtaccaaattaatatgatatcgtggtatagacatattgtgtacctgaaatgaaatgaacatatcttatatatacagctcagagcgcaaagaaaaactattatttctacaataaaaataaataattatatcactgaacaactactctctccggggccataaaaaaacaaatctagaatatgatatgatattttctagtacaataaatttagaacaccgcatctcgtttatattgttcttttaacatcatatctcgtctgagattggttttttatgggacaagggagtacacctcagtttcttaagacgtgtttagatctagtggtgaaaagtttcggcgtgtcacatcggatatacggacacatatttaaagtattaaacgtagattaataacaaaacaaattacatattccgcttgtaaactgcaagacgaatttattaagtctaaagaatccgtcattagcaaatgtttactgtagcaccacattatcaaatcatgtagcaattaagcttaaaagattcgtctcacaatttacatgtaatctatataattagtttttttctatatttaatattttatatattgtccaatcattcaatgtgacatggtaaaaaaaaattttcgtgggaattgaacagtgccttaatccgaaatctgaaacctccatcatttaccaaccaaatcttattaccgaaccccaaaaaagaagtctcctaatcattttcttcaaaaagtaaatagtacaaggatgaaatgacaaaaagcgccgcagcataaaagtataaaaccgcgcgagcacgcaaagcgcagctcactttcgcggcatttcttacatctcgccccctccaattcctcccaattcacgactcgcccccctccccttccccaccttatctccggcgatctcctcgccgtctccggcggcgggggagagatgcggggggccgacctgatcaacctcctcctcccggacgagatcctcgacgaggtgctccgccgcgtggccgtgtccggggccaagcgggacctcgacgcgtgcgccctcgtctgccgccgctggcgccgccacgaccgcgccacccgccgctccgccaagctcgccgcgtccggggcccgcgccgacgaggtgctccgcctcgtcgccgagcggttcccggcgctcgtcgaggtgtcggtggacgagcgcatcagcgtcgaggccgccgcggccgggccctcctgtgccgccgctagatcgcgccgccgcccggtgggttccctccatccctatccttgcttttgtggctccgtacgcgaattgcaggaaatgtagaggatcgtagagatgttttccgaatcgggattatgaggagatttagaattttgggagaaggttcgcatctgtcgaaggttttgtaggggaattgggggcaaactatcgatttcttatcctgttttgaaggtagtttgatcgatttggaccttacaaatccgcatttctcttggttggatgcagaatcgtgataactgataattctcctggggattgagttgtggtatccatttgtacatagttgtatgagatctgcatttccatgacttgtacaacagctgcatgcaaataagtaatgtgtgagttttgcatatgatcagtttgaaaaaccattgctatgtgtccaccagcttagtagtgattaatgattattatacggcaatatatatgaactgatgtgcctcgatgtcgtcctattacctgccgctagattctttaatgaaaactttctccttgcagtagattaacatagccttgtactgatgcactgatgcgatacagatgtatgatgttagtccttccgggcgccgtaggaggatgtcccgcagctcaaatttcggagcccacatgtccccatttccattggaccagccgggcagtgataatgagacagagcgcacttgcttgactgatgttggattaactagtcttgccaggggttgcaaagggctcgaaaaactaagtctggtatggtgttcttccataacttcgacaggcttagtaagaatatcagagaattgtaagaacttgagttcgttggatcttcaggtaatgtcatgctacccgttcctttgcttttttctcagttatttacttcatcatctctgaattctttcatgttttttttttcttgaagacttctatgcctctgtattaactgtgagtgtccaatgtaatatttacttgtaatacggtatatgaaacctcacaatacttggaacaagcattattcctggtgattagcagcagtcttctctaattatgaggaaatggtgtatctgcatgccaaatatgctgttaatgtagagactaattatgcacacaaatttttgacctgtctaaatcacaattttttttctgcaggcttgctatattggagatccaggacttattgctattggtgaaggctgcaagttacttcgtaatttgaacttgcgttttgttgaaggcacttcagatgaaggcttgattggactaataaagaactgtggacaatcacttgtctctcttggcgttgccacttgtgcttggatgactgatgcatccttgcatgctgttggatcacactgccctaacctggaattcctgtcactggaatcagatcatattaaaaatgagggagtagtatccgttgctaaaggatgccgcttgttgaaaactttgaagctgcaatgcatgggtgctggtgatgaggccctagacgctattggtttattttgttcattcttagagagtctgtcactcaacaacttcgaaaaattcacggacaggtactaagtagaattgtaaatcaatgccacaatattttatagaggcatattatccgactttgtttcacattcttgttttgcatagttctgtcaaatcattatgtgctggccagaaaggaagggtactaccaagttatatggaattagatataggatacaaaatgttggactagttattgcaccagcctgctgccctgctggaatgctaaaagttaggtgcttatcctaaggtgggaggtctgttggtccaacactcttaactatgttcaataacatgggaacatttatcaactaactggactgttgactgattaaacacactagcccattaactaacatccattgtttgcagttgtgatgtttttgttgctgcaccaacttaggaattaatttgcctttaagataagtttcgaatctactagtttgacaatttccagagtatagatattcctttatcttgacataattctcctttgctgtacattacattcttggaattgctgaacttcatcaggacattagtacattacaaatccatacctgttttctgttgaatcatttctcttgtactgtaggtgtttgtcacacattaattcttactgcttccaccttgtgctgcttcattaacttttaagttcattcaattattcacttacattttcctttggaattgcaggagcctttcttctattgcaaaagggtgcaagaatctcacagatcttattctcaatgactgccatttactaactgatagaagccttgaatttgtagctcgtagctgcaaaaaattagcacgcctgaagatcaatggttgtcagaatatggaaactgctgcactggagcacattggacgttggtgcccgtatgtttcttgctgacaactcaatatattaaaagttcctttcttcacttaaaatctatatattgcctttcctgttttaatttatttctctatagttcacataagtgagcagtattttagaatgaagggtaattcaagaaaaggttttagatgcttgatccataaataaactacaatatggtttctgattacattggcacattggcaagagtgtgggttaccctaccttttacttcagaaaaaaaaaagtagttgttgcactctggcattgttatttaattatcttacctgcatttttagagctatgtcatattgatattttgttgcactaacagtagatgatttgctttctgtcaaaacaggggtcttttggaattatctctaatttattgtccaaggatccaggacagtgcatttctggaggttggtagaggttgctcccttctcaggtctctttatttggtcgactgttccagaataagtgatgatgccttgtgctacatagctcaaggttgcaagaacttgactgaactttctattcggcgtggttatgaggtacttttgacatttgcatagatattctgcaactagcatacatggtgaaatatgtcaaatataagatttgacatgttttacaattaaagtgttagatggaatgacatgatttggttattaccatctttattcttttaccatatgcagcaatgagaaaaaaattcaaatatctttagttgattgaagttcattttgtatgcagataggagacaaagcattgatatcttttgctgagaactgtaaatcgcttagagagttaacactccaattttgtgagaggtaaatattatcatgcatttaaccatccaatttatctatcttgtccattactccatgcacatcatccccttaccgaagctcattataattcttgttacactttgttgaatgattggtattaggaaacaacttagattcatagattgattaatcatatcttagcctattaggagtgacattgaccacgttgttatgcaagacaacctaacatttgatagttgggataaggactggcctctacagtatcaaatattcgacagcatttctacagctccatcctatgcatgctgttcgaactagcacccttgggggattgtatgttctgaatgcatcactagacatatcagtttctaaattttgttgcaacttcctttccagggtatctgatgcagggctgactgcaattgctgaaggctgtcctcttcgaaagttaaacttgtgtggatgccaactaatcactgataatgggctcactgcaattgcaagaggatgccctgatctggtctacttggatataagtgttctccgggtacatcacttgtcacactgaatttcttttatgaaaaattatctgaaaattgtggtatcaatgaataaggcttactatggtccgcgcagttaggattcaggactaaaatcagctcatttcaaccaaggaacacgtaaagaacatatgatgatacaatactagatacagctgtaggttttggtatgcagagaacttcaaaattttataatttgaatagtctgtgttttagtagttgtagatcaaagagttaatactagaaatagatggtcataaagaagacgaacaaaaaggattatctctgtaagatacagcaaataacaggcctatgaataagtttttatctgcactaatatgaagttcgtcatgatatcttctccattaaccagcactcaaattattcctttgtttagttgtctggtgccttatacataaggtaccaggagtattgcggtacatatatgtgttcaaaatttatggctccagacaaaatttgcttagtgcttgtgtggcgcgtgtgcttgtcacagactctgctccaacaatcgataaatgatgtttactttacaggatttacagctatttcttagacaatcctcttatatacccatctgtcattatgcgagagcagtgtgattattttaccttattttctgatgccttgttctcttcaaccaacagtccataggagacatggcgcttgcggagatcggtgaaggttgctcgcagcttaaagatatcgcgctgtcccactgtccagaggtcactgatgttggtctaggccaccttgtcaggggctgcctgccgctgcagtcatgccagatggtgtactgcaggcgagtgagcagcacaggaatagcgactatcgtctcgggctgccccaagttgaagaagctcctcgttgaggagtggaaggtgagcgagaggacgcggcgcagagcaggatcagtcttgtcgttcctctgcaccgggctttaacctgaaaatggaaaaaaaaatctgtgttttaacaactctgttgttggtcagaaatcgtgctcatgagttgctgcaccctgtgccatagcttgtttagctgaaaaaaaggttgtattaactgcaaataaaatggtgttctatgtatgttactatgatataaaaattatgaaccaaataaacagggttcagtcaaactcaagtgaatgaattgtcgcaagttcaattatatgaacaaatgtacatttgcattacttaaccttgttgtcctgcctgtcactctaaagtagagcatgatttttttactcattctttaagtgtattagaagatgagactgattgtcacatttgggattgctttaacctgcaacattctaagcaggttgcctcctccggcatctggaatcgcttggtatcccctcatcaaacaaggatcttttttttttttttttgcttctgatcatgcaaagcaccttttagcatctgattcatgttttctcagcttcaagaaacgaatgaattctttgctcctgcataccctctgcttccttcctacgctactgtctttcttcttcttcttgagataccttatccactccaacccaaaaacatcaagttgaagcatctataaaagttcatcatcctccatttctacaccgagaatcgaaccacgaaaaacactcacacacccacgaatgcgccgctaaaaaagcgcaaataggcagcttccaatggagaaaggcactgtaggtggcattggcatgtgtgaccgtctcttgacgttcctcgccaagaacctgtccatgaaccggcagaagaccatcaccgatggcccaagaaatgacagcagcaacaacaatggcggccatgaagaggaaagaggagaagaagacgacgacgagttcaccattgagatcgagaaggccgaggtgttgctagtcgacgagaaagacgacgacgacgaccacaagagcatcacggccaccattcttgaagagaaaagcactgaagtggcgacgagcaatggaggagcaagtgtgcagaaggaggacgaagaaggtggccgtcgtaatgatcctccggtggctgcagaagctgcgacggtggcggaggcggcgccggtgaaggaggagaagaaggtgaagaagacggtggcgatcaaggaggaatccggcgcggcggcggcggcggggtcggcgtcgtcggcggtgaagaggttgctgtccaagaagaggcaggcgtcgtcgagccagctcggaggggatcacgacggcggccagcagacgaagccgccggcgaggcggccggggctccggccgaggatgccgtcgatcctgagggtgccgtccaacatcaacgagaagtcgtcgagcttcatagaggagcgcaagaagagcttcggcggcggcggtgccggcgccggcggcaagccggagaagtgaaggatgcatgtgcacgtgtgacgtgtcagctagcgtgaagtgcttgtgtgcgcgcgcgtgttggttaattaattaatttggataatcgattgttcgttctttacttctgtccaaggggcttgcttgatcatgaaattaaattcgttattgtgaaaaaaaatataaaatttataccgttgttatataccttttgctctatgtttttcttttgcctcaatatattgcttgtcgttcctggatttattttaacgacccacacaagacgtggaatttcctatatgttaatacagtaccaaaaaaatattataacattgaaagattgtaatcagaaaaaaaaatcaccatcacgtgctagcagcttctcacacaaattcaagcaacccacaagattggaacttagttccccacaaaaaaaaatattttgttgaaaaatccaaatataaagctttgttaaaaatacaggtgggtatgataatttcttaaaaaaccttttgaaacttttttttaacttgtcatgctgtaagcagaggtgctagcagacagtagtaacttgccttgagttaccgtgctaatgtccgtttacatataccatgcatggacaaaagatttgtttgtaaaaaaaataaattgtacagagagaacatgttttcttataaaggaaaaaaatattttgaaattttaaattaaagtttcaaaaataaaataaataatccaaggttcacctttctgattgagcgaccaccggcaatacgactgtttttgccaaatttgcataaatgcttatcaaattttagttaaatttattgttttaaatttgaattcggaaaagatatactaaaatttacttggaatatactttcattcatcccatactgaaacatcaaaatttcgcagttttcgatcaataactcagaccactaagagcatcaccaacagtctatctattccattcctaatcctattttttttggattttggttaaaaaaaactgatccaacagattcccaaaagaactccggacgttttggagtttccatctccaattttctcggtacgtgtatttgagggcgagagaacgactcccaatcccctccttccacatttcacctctccttcctgcgtcggggcgatctccttctgcgcacgggaaaggaaaaaaactagattttctgttggtagtttaacagaagggcccacttttagtttttgtgattgaatttaggctatctcttggaggaatgggttttttcaccacctattttcagtttaggaaacacaaaaattaaattttagagtaatgctccggtgcaatctacttgcagtattctactccaagtagaattaatcttgaccttttattttgaagggcgggtaagtaatctcctaatatcatttaggggtaattttgtcatgggatgttttcttcggttcgcatcgcattaggtccggactccatcacacgcagtcacctcgctattcctcccccggcctcgccgccttgtccgcccccaccgtcgccgtccgtatctcccgccgtcgccgccttgtccgcctcctcagtcgcatcgtccatatgggagcggacgagtgtggcggcgtccgagcgaggatcttgagcaggagttctggcggtagtaaaaattccgacgtgggcttcggcggcggcggcgtcacgcacgcacgcaacgtcatttgcgtggcggcatcgtgtcggctcattcgtcttcttgccgttccgatcactgcgttgtttcatggattatatggatcaattaagatcttgcacgaccaactccgacgaggatgacatggtgttcgatctatggattgtaaaatgataatacccctacgcgaattatttttcctagacgaaaacacctctccacatttctacttccactaattctggtgggagtagaactagatcttaaccctacaattaaatatgatcgagggtccagattactttctactccgagtagaaagcaccggagtgggactgtaaattttagggatagattattggtagactgttggtgatgctctaacacaacgatatcacatcagttatcaaatatggaaaccgaacatgagccacagcaagtgcaacccactctcttggaccttcatgtctggcaccaatatttcaactaggcacctacaaattgggcgcaatcgggcgctatttcaccaagtagattgaacatgtttcactaaatatatcgaaaatatttcagtcttttaaaaagctgaaacataatcaaatcaccttatgaaacattttgctacaatgtatgaaacagcggtttcgaaaaaaaatcagacgttgttcatcctatataaaacaatatttcagcaaatagcgaaagaatgtttcaattctttaaaaaaagtgaaagacgatcaaattgctagatgaaataatttggttcaatatatgcaacaaaagatttgaagctattgcaacacttaaaccctgtgtacatcaacaacccacgtatctatcaagatgaaattattaaacagtatcaaaactcactgcaacatttgattcatacatagttaaatatcacgagtacactagctgaaatattattggtagaaaaaaaaatgaaacagattccccttaattatagaacgtttctgttatatccgggtaaccgttgcaacggggcacactgtggtggagacacgtggtgagcgcgggtgcgcgtggtggcggcatgttggcggcggacgcgcgggtgcccgacttatattggcgcgcatcgggcacccgacgcaaaggattttccatatttcagtacgcggagaaccgctggcggcgatggatcgatcaacaacgtcgacggcgtcgtcaaatgttattggcaaacgtgacactcttcttgattttctcttttaattattttgtcccgtacattgcacaattaacatatgacgtgtccatatcagaagcgtcctcttaatctttcacatgtatttaaaaacatctgtgtcaaaggtactactttgtcaagttttatttaggaccattcggtgcatgcatgcgtgatgactgatcgacacgcaaatccatcgtcgacgatctttgtttactgttttgcatagaaatagacgatattaattagtcatcggcgtgttatgacttttaagagtcaatgtggtactaagatctttacactggtggagaaaccctttgtagtcccggttcgtaacccccctttagtcccggtttccaaaccgggagtaccaatccgggactaaagatcgctatctttagtcccgggtgaaataaccgggagtaaagatcgatctttagtcccggttggtaacaccaaccgggactaaagatcgagctgactttttttttgcatgcccctgttgctgcatggtttatatatatatatatatatctagatctagaactacttaaaaagtaaaacctgcttccttcgtccgtgagaaaaaaaaatgccgagaaaaaaacaaacaaaaaaaaagaagtccgactcccttggaaattccctaaaaaaaaggaaagaaagatttctgtatggaaaaaaatcaagcgcgaataaaagtgcgaaaattttgttctgtccgataaaaaaaggtgcgacaaaacggtttccgtcttcctaaaaaagtagaataatagtgaaaaaaatatttttgtccgattaaaaaaaatctcgtcgtccgtcaaaaaaaagcgtgaacatttttttctgtccgattccaaaaagaaaagttgcgaaaaaatatttttcgtttctctttctctatctctatctcttctctactacttatatataaaaaataaaaaaataaaagtgtttccgtcgtccgtccgtgaaaaaaagcgtgaaaaagaaatcgggcgaaaaaaaatcgaatccgattatatatgacgcggtaaaaaaaattaaagacatttccgacgtccgtagtaaccaaaaaaagggcgaaaaaacatgaaaaaaagaaagtccgattctatatatacctaattaaaaaatttgtatggcttccaggttatagttttcgtccatcaaaaaaaaattccatcgcacgtgcgatcaatcccgctttaatccctctccgatggccaaaaaaaaaaagaaaagaaagaaaaaaaataatgagaggccgcatcaaaatttggacctaaattctagagaaaacactactacaagaatacaagatcagattcaacaatactaagaaaacactgacgcgtggaaggggagggtgttgccgtcgctgccgaacagccatcgccgtcgcagggatgtaggtatgccgggccgccgccatgttgttttgagagagagggggggaggagaaatgattttagggttagggtttgggatgttgaacttttatataggtcgggatcaatcaggaccatctatcacatcggacagcttcagcttctcccacgttaggctgaacgccattcccaggtcgcccacatggaataagttcactttaggtcgcttaagttgttcctccccgattctattcccatgccgcccacactattgggccacctcatggaccgcgtgtacgctctgtgtggaataagttcactttaggtcccttcagctgaacttttttttatttcattatgaatatattttcttaaagagctcatatcatgtaaaactaaaccttaatcatataatatttttatatttgttataattgcaacgcacagtcattttttctatgtaaaaaatttaccacgatgtacgagtgagaaatatatgccacacgcacccgccggctcatgtttaaacaagctggcaacagatttttcaattacagttctaattgttttatttaggtgattaaaattgtttttatttacataattagtttgttctatttaagctttttgaaaattgctaaaattcaagaataacttttcctacttcatattatattatttttagctaatggaattaacggaaaatcaattatatatttttatctttttgaccaaaggtcactgcaattttatttcattaatattattattatgattatgattcctttatcttttttcccaccagtatgcatgattaaaattaccttcacccgttgcaacgcacgggcattattgctagtatatatatatatataaaccatgcatatatatgtttcaatacatatatatgcatacatatatatatgtatatatatatatatatattatattatattatatgtatatacatgcataatatatatgtatttatacatatatatgttatgcaaatgcatatgtatatagatatatatatgaacaaaatatatttacattatagaaaatgtgtacacatgcatatagaaacatatgtagtcatgtattaattacaatccattatatgtcctagctagctacgatttcgacgtagtagtactcgctgctagctcagaagctaaggaccggtgaattgtgtttccgtcgtagtagaattcacccttgggatcaaggatttcttcgttgatgaatcccatgagttgttcttgaaccgccgcgataaattccttgtgtgtggtcaggttatccctcatgcgaataaactatatgaatgtatgaaattgattagtaattaaacaagaaatcgctacgtaatgaaattttgaatttatttatacgtacatcgagctctcttgtggtgatgatttggtctgcaaggcagtggcaatactcgcacacgtaatagccgcacaagttagttccctgcttttgctttgcgcactacaaataaatgacaaacaacgagagatctaattaatatacacttgtatgtatttgaatcggagaaatataaatgtagagcatgtgtactcacaggaaatttgaacttccgcctaagtctttctctccatttgccgcggaccaaatgacggaaccgataccaagccctacatggagtttaaagctatgattcgtagtagcaattaacataacaagattttcttaattaacaaaggaacttatgacggtacctgtctataagttcgaaaaccttgtcaaacgtagactcttttttatccattgagtcatatacgttgacggtgcaggcctccaggtcgatgagtaaaagcacccagtggaatctgcaatgtgcgtgggatgcattacatatgaaacacttagcaagttcgtacgggaatgaaatttggtatgtaggaagacagtaaaattaaactaactctgtgttgtatggcaacagtatgaacgtcttgtaacgctgcgccttcaggagatggacgagattgtcctctgtttcttgtggatattggtcgagcattgcgacgtttactttccgagggtcgatgaatccagtatcgaaaaccctccgccgtcgggccctttgaatctccattctacaacgataaaagggagtatattattttctatggtctacttatatacaaggacctaattaattaaaggagacgtatagtaagaaatctaactgaacgatatacttacaaaatccagcaactcataatagagacgtcgagggcgtccagctggtatagttcgtagattcccctgaaattgatccagagaatgtcatctccttgcaagaagtccgtgtccctgatcctcgctccgatcatctctctaccggtggcgctcatctccatgtacagctgatggaacttgtacatttgtgtgggtagggactgcagcagctcaggcttgacaagtggtttaccgagttcgtacatgtatttcacttccgccttttcgattggtgcgactcctagcaattgatccgtagttagaccggtgtcagtaataaattgttctatcgtcatttctttaccggtcaccaacggctcgatctcctggtttggttgctctccaagctgagggactggtttggactttccagaagatgctttcttcagcgttcgctcatagtccgatagcttgatggcctccttgacagatgcagacatacccctgaagaagttcctgacactggggtctataggaatcttcttttctggacttcgaggcttgaattgtctcttgacttctgatgcaacgtaagcgtcaagctcctcttgcgtgcaatcgtaccccgggtccttgttcttgtcggcgtcaactttcgccttctttgttgcccttgtgtgggcaagcggtggagctgggggggcccttgactttgaaggtgccggaagaggagcttgcgggggagtaggtgtaggagcacgaggaggagtcggtgcaggatcctgaggaggagtcgatgctggagcctgcggtggagacggtgctggcggagcatgaggaggagacggtgcaggatcctgaggaggagatggcggagccggaggagatggtgcacgagacgccgcttgtcgcccagggaggatgatgtaccgcctgcgccatagaataatagcatggcatatgtctcgtagatgcgtctcaccgtctcctccagggtaatccagctcgaggtcctcgtacgcgccttcgaccaactcaacttcgaccttggagtatcctgctggaatcggcctgcagtggtaagtacctgaagggtccgttgggatggccatgcccgacgccaccttcatgttgtgagagattatttattagtaatcaacatatataagcagcaactagcggaatggctaaatcttacctttattgataagttcttgaaaggaatatgcagctcacatggtgtccgctgagtgatgtcatcaacgggacaggtcgattcgtcctgtgtttgcatggcgtccatgctctgtgatcctacctgccccgttgaggcgcagctgctacggtttcctgacgggctcaccattgcaggaggaatggtcggctggggatcatgggaccgatgtgcggccatgcgttcatcaaccttccttgccacctcctcttgcatgttgagttcgtagctcgatacccggaactctaggtctgcaatcttcgcctcggtatctctcttgctcctcatccgactcctgtacgtgtggatgtcctccttgaaaccaatcttccaaggaatcacccctttccctcgagttcgtcctggatgctctggagtctgcagggcgagtgtcagctcgtccctatctctgtctggtcggaacgtgccctgagaggaggcttccactgcatctgttagtcgtcgcgcagcctcttgtatctgatagccgaagaccagtgagccatcagctgggttgagcgttccaccgtgagcatagtaccagaacttcgatcgttccggccaattggctgttgccggttcgatacccctctcaatcaagctagcctccatctgctcccacttcggcatcgcgacgctatagcctcctgaccccaagtggtgatgttacttcttcttggcggcattttctttgtttctttccatcatcgcctgcccttgttcacctgtcttatatgcaacgaactcgtcccagtgatcccttagctttgggaatgtgtcgaagttcggtgtctgccccttcagtatatacttctggtacagatctcccttgaagctctaaaactgttctgccattttcttcagagtccaccttttcactttgtcctctgtacccgcaggaagggtgaatgtctcgagcattgtggtccacagcatctctttctccgaatctgggacaaagctctcatgatctccgcgtgcccttgttcttcgccagtacaccgtactgacaggcacgttatcccgcacaacccaaccgctgtgacgtacatagttcttggcggcttcggccggggcactaggacgtccatcttcttccacttccgttatgatgtgccgaccctcaagcttcttcgctgcacctcgttgcccgcgtgccctcttctgtccaacggagggttgactaccactagcctcctcctcctggttcccctccacatccctttccacgtgcccctgctggttcccctccgcatccctctccacgttcccttcctcgttcaagtactggtttggatcctcgttcccctcttcttcattccagtactggctgcttccctccgcgattgtatcgtacaatatctgttcctcatcgcggtcagccatctgttgatacaagaaacatctgctaagtcacgagacatttatgttttaacaatctaagtcatgtatgctaagtgtaaatgtcgtacattagaaccctacacaaccttacgtgctaagtctaattacaaatcgtgatataaactaagtctaggtgacgtatattatacaaccctagctagtaaataattatatactaaatctaattacaaataaaataatcttatattaaaactcaaataatattacatgctaagactaaaatagtcatgtatatgctaagtgtttcgtgcgtatatgctaagtcacgagacatttatgttttaacaatctaagtcatgtatgctaagtgtaaatgtcgtacattagaaccctacacaaccttacgtgctaagtctaattacaaatcgtgatataagctaagtctaggtgacgtatattatacaaccctagctagtaaataattatatactaagtctaattacaaataaaataatcttatattaaaactcaaataatattacatgctaagactaaaatagtcatgtatatgctaagtgtttcgtgcgtatatgctaagtctaattaagactacaatagtcaattgctaggagtcgcaccaattccgtagtcaataatgtcatactaagtctaatttgcaataaaataatcttatattaaaactcaaataatattagaacactacacaatcttatatgataagtctaattacaggtctaataatcttaattaattgcattacaaatataacaatcatttatattattacgtcacttgcctgctccaattccttctagggctagctcttccactcaggcttgacggacgactccgacaacacgtcttttctgcaagatacaaaaaaatgtattaggataaatgcgaagtaacatatatatatatatatatacatatatacatatatatacatatatatacatatatatatatatacatacatatatatatatatatatatatatatatatatatatatatatatatatatatatatatatatatatatatatattgcatttcacgttaacgttcgtcctcgttcgttcgctcgttcacgttccctagctcgttcacgttcgttcgctcgttctcattcacgttcgttcgcttgttctcattcacgttcgttccctcgttctcgcttgtcttcgttcgatcgttctcgttctcgctctcgttcgttcgatcgttctcgttctcgttcacgttgtcgcggcaacgtacgttgacgtgttcgttctcgctctcgttcgttcgatcgttctcgttctcgttcgtaaacggcggtgtgacggcatcggggcggcggttggcccgccggcgtgccgacggcggcggcggcgtggcgttgtggggccgtggtggcgccggcgtggcgtgacgacggtggcgtggcgtggcgtggcggcggcggcgtggcgtggcggcggcggcattgcgcgcgcggcggcgaaggcggcggcggcgtggcgacggcggcggcggcgtggcgttggcatgcggcggcggcgttgcgcggcgtcgaaggcggcggcgtggcgcgtcgtcgtcgtggcgcggcgtctcgtggcgggcggcgcgacggagagagatcgagatcggagagatcgagatgcatgaagggagatctggcggcggcggctctcaccccagagatgcggcggcagcggaggaggcggaggcggcggcgaggacgacgagctcgagacgacggcgagatacggcggcgtcggcgcggggatttgccctaggcagtggcggcgaaggagagaggccgagagagatcgatcggccgaaaacgtttaagtgttggtgaagaagacgagggcgcaccgggaatatatatacccctggatctttactcccggttgttctcaacaaccgggactaaatatcttttcccgctatttcgaaattctttttaaacccggttagggttaagaaccgggactaaagattatagcactacatatgattttcgcttacatatgtgtgtataaaatagaagttaatgcattaacattatttaaagtacaaagattaatgaaaattacttcgaaaaattatttttggctgtaataaattaagtggataaatcgtaataagcaaatataattaataaaaattccaataatcatatatacttagcatatatatgaatgatattattatattggtaaaaactctaattaagatatgtatgtacatactgcatgatttaaaattaataaaaattgtaatcatcatatgtacttagcgtaggaattatattaaattaaatgctaaaaactctaattaacatatgtaaatgccacatgcatgattttaaccttttaaaaattcgaatagtcatatataagtagcatatgaaagatagtaaattaaattgtgaaaaactctaatatatgaatgatagttttaaaaatatattaaatttgata

SEQ ID NO: 3715 - DNA, 510 bp, Oryza sativa
atattcttaagacatgaacatgctgcaacacggatatcaacagaagcatgcttcagtgcatcaaggattaaggtagatgcctgttacataattaatttgttagtcacaaatgtttgatcaactgacaatcataaaatccacctttttcatgctactacacgccaggagcccatggagtcagtatattttcttgtcacaagttgcttaacaataacagtagatgaactctacaaaattttactcaaagggcaaagagcagcaatgatcaatataccattcaaagtcctgcacgtacctgaactgacataagttgagatcttgattcttccaattttgagcaaagttcaactaaagcaagcaatatggtcactgcacgccttgactccaacgaatttgctataagatgggtggttaacttctgaacttcggttgttgagagtgcttgcttctgcaggtccacactgtctttgatcaagggtgtcaatgccaatggagcatcatctctacatg

SEQ ID NO: 3716 - DNA, 1971 bp, Oryza sativa
agagcggcttgacgtaggggctgaagagaacgcatcccgggttgggctcggggttggggttcagatccgtgggcggcggctgctcgtagatggcctcgaagagcgcctcgtcggagaggaggaagaacccgaactgatccggctccgccttggcgagcttcgaggaggtcctcgcgccggtgatggcgatggacacgaacccacggcgggagaacccgaacttctcgaagaggatggacgcgcgggagtcgtccttgaaggactcctgcttgatctccgccgccgcgggacggaggagcgctccggcgacggcgatgaggaggaggagggcgcgcgcggcggccgcggcggtggccatcgcggcgagatctgggggagatgggggagcaggtggaggaggtgcgcgaatttggccagacgggtcggaggcggtgactttcctggaggcttatggaggtaggcgtggatctcacgtccgttggatttgcatcgagattggtgccaggtgggtgggtgactttgaccgagggtactcttagcagggaagcaacgcgtcggtttcgcgtcggttggatcgttggattgtgattggacggtggatctgattagtcgcggctcgatcagtttaggcattttttttccacgttagtttaggcatgttttggacgcagtagcaaaatgttcgtgctttcactgggctcggcctagcataataataaaattccggcgaaatttaagacgaagaagataattctagattctagaaggtttaaacaggataagggatcgatggaaaagagggcgacggcatgccgggtcaagcacggtcatctccttcgacgtgttcgagaaggctaaagtcgccgtgcttcgtacagccgcggccgtgagattatgcgcctcaaattgacccgcaggaacgaaagggtgtttgtgttttaggatatgaagcagtgaagcactgctggaggcagagcgcgtattgacaatgacataccatttcggtctgttcggattggtgctatttttaaccgtaccattttttaataaaattataaaaaataatatctacatttagtttgttgtcaaactttgataaatacatgagaaatcataccaaaattttagtaatattaacaacttgccaaaattttaatattgctaaaattttataaggtttattttagctataatctgaacagactcttcaccctggtgtttttgacgtctagagaaattggtagtaacacactagtagcccatgacaatatgacataaagtactttcagtttggctattttccccattttcgttagcacgtttttaaactattaatcagagtgttttctgtaaaatctttttatagatgagttgttttttaaaaaaataagtttttcacggttaatcatatatgtagctaataattcactcccgggaactgactttagaacacacccagagcctaacaagccaggtttaacttttcaatttcgacgtaaaccattgctcaccgatttacccaagtccaatcgaaaacgagtaaaataccaccgattttcaatcaacaccataaaaaccagctataccgatcagttatcacaaaccaaaacctaatagtttcacgagagccaaccgattttcgtgaaattccatcgattttgtgagccttgcaaacaagcgtccgtgtgtctgggagaggcacaggctgaggcggtaaacacgcctgtgttttatcccctgccgctgcaccggtttgtgcaatgccttgaagacttgaacgcacaccacctttctcttgtgggtttggccggactaatcacgcgtttgacgtgagggcatgcgtcgcggcgggaggaatcggcagccggccgcgtgttaggagtagtagctagcgagcgtcgccggcgccgcgcagcgctggctaacaaggccggagctccgagatagttactagaaaaacatcccaagcgt

SEQ ID NO: 3717 - DNA, 5367 bp, Oryza sativa
ccatcgccgccgccgccaccactggtggatccttccttgtgctgctctcgcgggatacagcgccatcgacggagccaacatcctttggtcttaatcaaagatcgccgcttgctgcctgctagtgccctcttcacatacgaaacccccaaatccggtctctggcgattaccattgccgagctcgagccgtgacttgtcgtcgcaatccatcccctctctagcaggcggcagtagggaggcgctcagtggcaggcggcgatgcggcgggaggtggaggagagggcatcggcgggcggcagcacggcgccgctcagcggcaggcagcgatgcggtgtaaggggagaaaagagagagagagaagggagagagcgaggaggaggaaggagtgaggagaggatgacatgtgggtcccacatgtcagtggaccaacaattttttgtgtgtgtggatgacaaatgggtcccacattatgtttttaactctaatgccacctaagcgccacgtcaacgccacagaccaagtcaacactgccacttagacatcacgtcagcgaaaccgccctccaaaaccaccaagggagtcaaattgcaccagttttaatagttgagctgtcgagatatctggcattgcgattgaaggataagaatcagattcggtgactagttaagggagtcaaagtgatcttattcctccaatgtctggccatatttatagaagtccaatttgactcccttaatataggtaagtcgaatctattctatatcactcaatcgccaaacctggtataacgactccaattattaaaacttaaaagtagtaaataatgactcccaagataatattaatggtggttttccttgacatggtatctacatagcacgttgatctggttttcgtcctacgtgacactgcaacccacaaaaagtacaatttaattcacgtgggacccacaagttagtgtcctacttttttcctctcttctgttcgctccttcatatatgcgctagcgctacgccacatcgtccgtcgttttaggattgagcgtgtggctagcctgtggtgggcatcaacgcccacggtagggtggtcagggtggcgcctaccgtggcgatggagagggggattgggtgcttgggatttgatatgtagctaccacgtagaatgaaaaccatgttaacgtgtcacatagaagctgcatgaccgaaaaccaccataaatactatcgtaagagttgttttgcacccattttaatagttctgaaatcgttgtacctagttatacagcaagggatacggatcaaattcaacctatattaagggagttatattgaactttttccattcatatttcatatttcaggcccaatttaagtccaccccgatcaaagtttcactgtgaatacaattttagttgtctataaacaaccggtttgaaattgccagtcggaatttccccattgacacgtacttattagagcaagtttaatagtatagccaactactggcttcaaatcatctatagccaattgaatagccaattgatacaatagttgattactatactattaatacatggtatcaccagtcatatacacattgtgtcttgtagtccgtgctacagctggctatagatatgtagtccgctgatcttctctcacttcctttatctctttaaaatatgtttatagctggcttagccttctattgtacctgctcttagtattcatatggtccggatggagcacatccttcaaaaaaaaaagaaggaaattaacccagtcccggtgctcaaactcctccttggatcaattcttcagtatactcttcaagctgaatatcctcctcggccggactgaacatgcagaacatgaacaggtagaatgcgagggcggccgcctcatccaccgccacgctcgcccaacggtaaccggaacttgcgcccacgagcaacttcaggatgaacacggccatccacgtgtggtacaggtacaccgccaccgcgaggtagagctggcggaacagcgcgagcttgccgagcctccgcgccgccttgtcgtccgtgtcggcctccttccgtagcgcccggatcgccctgcccatcggcatcagcaccgcgacgcagcaggcgagctggactaggacgaaggcgtggccccacgtccaggccacgcctccgtcgccggacaaggtggtggcgatcgccatgtagacctggagcggaaccatcgccgtcaacacgttcagctcacgggcctgcacgaacggctccgggagcgaccaccctgcgccgatcagcgcgaccacggggaagagcatggcattcttgacaagacgcaacgccaagcacggcacgttccacccgcgcgccgtcccggcgacgacgctggtgtatcgcccgtcgtgggccgccgccgtgaggcagtgcagcatgagcgcggcgaggaggccggacatgacgtcgtgcacggggcgcgccgtggagcaaccgcgggcgagcgtgcggtgcagccacgcgatcaggaacacgccgtagcacacggcgaaggagtagatcatcgcgacggggtcctcgccgccgtccgggttggagtcggacagctcgacacggacgtccatggtgacgcgcgtccccgacccgcagttggcgaagtagaggctgtactctccggcgcgggtgatggggaacgatgaggaggggaaggagatgcgccgtagaggcggccatgggttgcagaaaggaaaaatggctgtaagacgtcaagctcactctcggcgatgctggtgttttacggagcagatttatgcgtcccgagtcccgacggccggccggcgggaggcacaaggcggaatggttttgttggattggacgaggcagacaggcaggcattgtattttggcgcgttttttctactgccggcgtgatttctcacagctgtcttgcactctgaatcaagaacagagcatctccttgtctgaatgcttaacatctcaacgcagagccattagcttgggacttcaggttgaagtatcaaaagcatcagagcactctcagaaagtctgagacaatttcctacttcaacctgatttagctgaaggtcttgacgggctcctgtacgagttccaaatctctttgtactattagcagcaaaatgtatgtgctcctgaatttccagttaaggcgttcgatcaattagtttatgcaaaaaatataaccgagttacattccaggaactgatgtgtagaattaagtttcttgcttgaataaaatctcctgcctcgttgtattgtatatctaagtgcatttcagttctcattttaagaatggcatatactttgtactccattcgtcccaaaataagtttatttttcacatattacacacataccctaatacaaaacctaaaaaactataataccctcattttatcaaatctcaatgcaattagtcccccctctttatctactaccaatacatttataccctactttaacaaactccgatgcaatggttactcaaaaatgaacttatttgcttgtgaagccttatcctcctgacttattaggaaatatggaaagaacgaaatcagcaggtgttcagacataaagagctgtcggcaacaagcctggtcgccaagatcaaatagaaggcaaagacttggagcttgaaaggagcaaagggccttcgagacctagtcccttagggtttgcggttttcccctttttgtaaatatatattccatatacgctgtacattttttatcctactctattcaatgagattggcatagttttgtgccggttcattaaaaaaattaacgtattttgggacaaataggataggctaaaaatgaacttattgtttatggggcagtgggagtagtttctatggccatgttagtcttatacagaagttcatttcagatagctcaccagatacaagatggcaatcctacgactacgatattatcatatcattggcatatgaacagtcaagatgaactgtgagcttatagcaatacagaatagcacgatagcccatatgatctgctgtttcgctggttcaagatgcattacattcatgcatcaagccatcaagattaatgaagcatgtcaactagatgctactctgggccttacaagtgattcacctactatgtttatttgctacccagtctgccagtcatgcataaagaacctaagcaaccagatgttgatacaccaataagcatatattgcatagttggtgtccccttctatagttctgtcactcattcctaataacccacctataaaatcatgaacctaggtatgaagtcatatctaccaatgttatcccgatagcaacaaaattctacagctcgtaaatgataaagaacagctgataagtacgaagaagcaaacctgagtattggcaaaatggcaacattgaataaatgcccctaatttgcaacacaagcagcccaattatctttggacttctcaacaacatttgatgctagaagaaagaagtgaaaagagtgaatatatccataacacatagataaatataggctaaatcctgcatctgtatagtatgaccgacatcaatggaggagaaattgaacaggtcaggctgtatttcccatcatgtatcctctcactggatcacaacactctagagctcaaactcctcctcccggagtgccagctctgcagcttcctcctcatcctcatcaagagcgaaatattggttcctctctgctggcctgaacatgtagaacatgaacaggtagaatgccacagtggccacctcctttgcggcaacactcacccatctgtacttgtagttggtgattgtcttcagagcatacacaatgatcctagtgaagtataggtatccaatcacaacaacatagaactggcggaaaagggtgagcttggcaagggttcgggccgccttgccgtctgtcttggatgactcccgcagcgaccgcatcgaccacacaaccgggaagagcacagcacagcagcaggcgacatcaacaaacaagaagatctggttccatgttacccatccctgcaagaatggaccagtctcaccgaccacagctgcagcaatgttagctgcaacctgcaatgggatcacaaccatgaggaccttcttctccttgtcctgaaggaagggcttcaggaatgaccaaccggtcccaatcagagcaatcacagcaaacaagatcacacccttcaccagctggaacaggtagaacatcacatcccacccgtgtggtgtccctgcgatgcggatgtagtgctggtcctcggccgcggagatacagtagagcatgcgcgccgcgagcaggccggacatgaggtggtggatgcggtgcgcc

SEQ ID NO: 3718 - DNA, 34676 bp, Oryza sativa
aagcttgcatgcgctaacgaggagcacacatgagctgctttaactgatgtcaacagaaaagaccaaagagatgcaggttgactttggggggcatcaaccaaacatgatgatggctccacatgcttatctataacgatgccactttacagatgccctccatgactgcatgcacgaaagtcattgtcacttgtttttcatttgaaagtaagacttgttgataacatgaggcttctccaagatcgcactgcctgaaaaggaaattacataacgatgaaatgtcatgatcagaaaatacaaaatatcttgtgtagatgcatcctaatatctttcagtgttgttctgaaagattaacttgaagttttgctaacaccacattgaatatactcttgcctgccaacatagtttgtatatatgacagtactgaagcctgaacgtgccaatttggctatttcatccaaaatggtaggtaatgaactaatggaacctgaaaaactgaaaagacttcagtgatagaaatagttgatcagaaagtcagtataatgcactaaggagtctacatcttttcctagataataattcaactaggaaaacagtggaaccactaccttttctaggggatagggggttttttgcaaacagcgaatcaatgatacaagataactcttggtttgtcaaatggaacttcagcaccaggaagttcagcgcaaagtccccataaatcaaatttaggcaccaaatgattttgtaacaccatacgcttattcattattatattgtttttcagtaccttggaatgaggatatacatattacaaatcaattcacaagtcaacatcaatgaaaagacaaaatcaagtcagggaacaacaagatttcctttccaaaaaaatgctaagagattacacgatcctttttacattctcaaaacctataaaagactcaacatatgatttaaattaacatgtatgatcattcgtgtagaacattaagaaaaaggaaaaaaaaacatagctaatgatctaaccagtctcatccaaaaggccctgccctcatgtcagcaactggctttggcatcacaggacccatgcacgaaaagagcgatgctttctttggcttactaccaaataggaaagttcgaagaggtactccagctttcattgacagagatctgaagctatgttgtgttcggtttcttcttcctatagacagttcaatattctctctcagcttcaaaagagccctcccaacctccacttggaggctcctcacatggtccatcccagtttgtagctctttggtaaccttgctgttctcttgcttcatactgctcacctctccttggaactttgcagcctggaaaggagtgaaatgagcttcatcagtttggcccaatgctgtgatctttgatatctcctcttctatgctgcacagcaatgagaatctactctctagttccccttgtagcagcacattcttttccaaccatacctgcagatcagtgctcaagccacgcaacttcttttcaagcacagctgactcttgttttctagctgactgacaagaaggcacagcatctgagccttcctgcgctttggcatctgtaagtttatccatctcagcttttgctttatcaaatgatttctggaacttctgcatataatgatatgatgtactgaatctcaaccagaagtccaggttttcctccagtattctgctaatttctgctctgaatttatcttccaatgatgggtcatgtggttcttcatgttcacgtatcttcatgtattcttctgtctcagcaatatttttgttttcaagactaggagaggcatttgcttcagatgattcttcagactccacaaaacgctgaggtagagaattgttgagcttggtttgtaaagagctcaacattcgtctgagagagcgaatctcatcatcttttgttgcactggaactctttaactcattcatctctgacattgcctcgagatgatattctcgatttctcttctcaatttctaaaagctgtttctgcgtatctttgtagttacgaaggatggatgcataatcttttaagagaattttatccttatcctctagcccattcaaatctagttgttgccaccctaaagtttcatctggctcttccttatgtgccttgctagagtcatctaatgcatccaataatccttcatcttttgatttgcatgcaattccggaatcatcttgtgatgaatttactatttcatcagtggaatgtgcatccaacttctttacaaaatcattaagactgtcatctacttcagttagttgctggtgaatatttccattctcactgtgcacagactttccaatccgctgaattgtctgcagaacctcctcaacttgcttcaatctttcagacaacttgctagaatcctcaatcaaagctgccttctcgtcctctaagctatccaggcgcttctgtagttcgtctgcctcatttttcattctattgatttgagcattttgtgaagaagctgcaatttctaggctgatgaccttatccacaatttcatcaacctgtccggctagatgcaccgcggacgcctctgaggacgactcaaacttttgtttgaccttttgtgataattcctgcagctcgagcttgcagtctttcataattagatcactatcctctatagatgaaggtatagagctgaactctatgtcttggtgattaggtaggtccttctgatcatcaggatacccacactcgctcttgaaaatcgttatcttcttctttgcatctatgactctttgaatctccatggttgtctcttcatatgatctcttttgctcacaatgcaagctagccaatttatcctcgcaagaaataagggcttgtgcagccattaaagctcgagcttcattgtcttcaataactgcgctggtgctaaaagtctcctgcaagctccatacctcctcttgcatctctgccgcctgtctttcaatgctcaaatacttgttcagcgaagattcatatgagctcttgaagaattccttttcagtctgcaagacaaggattttcttctgtagcctctcaatctcttcttgtgccttgtctttactcatcttagagctgatctttttatgtgtttgcgtcctctttggagctgcgctggttcctctgttgatattaatccctgtgataccttttgggaaaccatcaccattgtcatcttgcagagagagctggacttgctccggaaatgcagttgctatggtgtggttggacttgtgaagctcccctgatacccggtcatatctatcagcaagcgcctggtaagatctatatgtctcctctacatggtttataagatcgggcctgctcttgaagtataggtctgccttccttgcaaatgtatcagcctctatatctatgagtttgatcatggccttcacccttatctccatctctgcagagataaccatacaaaccttttgaaacattgatgagaacccaaaaacaaacgctcttactagaaatctacaataattccttcagaatcatttcatgttaaagaagattatgctaagtagtagtaaataccaacaggacaccgctatcacctcatccgtcgtatccacaatagattggaacggcaatagaaaaatgtagctacgaattctgctgtgctcgtgcgttgttcggacttcggagagcaatggcgataccttggacgttgttgtcgagccatttggactgggtggtgcggatgtggctcgcccaccaccacgagtaggcgttgctcgccgcgcgccgcagcatcgcgggcagcctgcctactcctcctccgtcctcctaccccccacctctcctcctcctcctcctcctcctcctcctgttcttcctatgcgtcctagccttcctctacggctaatgctaccgctactggcggcgtggcgctggctagggtgagggcggggccgggaaggccccggggggccggtggtggtggggaaaggcatggcgagattaggggaggggaggggatccgtccgcgagcggtcgcgctgcggcgggtggctgcccgcggcgcgcggccgaaccgccctgcgctgcggccggccgcccgcgaggcgcggggacgccggtggactgcagtcacggcacaactttttttttttaatttctcttttttgagaggaaaagtcacggccgaaactagtgggcttgagggttcaagttcaacccatcagtgaagttcggaactgcgtggggccgggcctttgacaaggctgacggactctccgatgaacatacgtcggcccaggtgaccatccgatattatcttccttttctttttttttggcaattatcctttctttacaaaatggaagtataacttttgatctcgccgcaacctaagagcaagatcagtaatacagttaagtgccgacggtaaaacggaccatgtcagcctacagcaatatgttgcacactaatcatacacaacttccggtgctggttttcttttttttttaaagtaatttatacgtctacagtacatgaacttgataggtgggtgcgatctagtaaaaaacgtgaaaaataagcatataggtgcacaacttggctagtgcgttcagtaaaaaaaaaaacttggctaccgtgtgtattttggttgaaagatcaatattccacacaatacttttatgccatataaacaaagcagccactcatgtcatctcgataaggatctacattgttttttaatttgttagttataataataaaataatcagtcattttgaaactgaaagatatatgattatcaaaagtaagtgtatgcagataacataatttctaaacgattcgattaatcgacatatccattacctcaggttatgaacatggcaaagacacaaaattgaatccatgagccaatgatctactccctatgtttcaggttataagacgttttgactttggttgaagtcaaactgattcaagttgaccaaatttgtagaaaaagataataatattttcaactaaacacaaaattattatgaaaatatattcaattattgatttaatgaaactaatttggtattataaatattactatatttatgtataaagttagttaaatttgaagtaagtcaaaacgtcttataacgtaaaatggagggagtagctgttaagcttataatactaggattaataaaagatatgtgtaaatgtttttgactaaaatgcacatgattatcaagtttatgtaccagtctactcattttttaagttcttgcactaaatcgcacgcacctaccaatttcttgtatcgtgggtgtaatttactcttattttttcaatcttactttactagcacgatccctcacgagattggatgatattgggttggccccacaaaacgtgttatattatcaccaaaagcaatctgctatcaagtagcacgtgaaaaactacactggactcgggcggtaaaataagcgcccacttagttctctctcttccacatatgaattaaatgatgtgacatatattggagcctacccagtcagcttatagtactttactgcttgctctaaggccgagttgtctagtgaggttcccaagtcccaacatccactcactcagtttcctgcatacacgcttcctaaactgacagattacatgtttttggaaaaaaagaaatataaaaaagttgctttaaaagcacattatttttttaagtgtgtttagataatgatatttaattgatcatacgtcaatttatcgctttgtttttttttttgcatgaggggtttagttccaaaccccaaccaaagaacacattataagtgtgcatactgttaataaaaactaagtatgcacacaactataaaaaaaactagtatgctcacaattatattcatggacaccataatttaatcccgatgatttcatcaccacactagtattgcttaactgtaaaatcgtgttaccattgtccaactaaattttaaatagttatagtatagtttagaaaaagataatggcatctataaatactccgagaataatttattttcgtatttacaaaccttttattgtatcatataattcgatcatgctaatataacttgaaagtgcacctaaactcctagtgaattttggtactaacatgtttattgaggaaaaatggagatattagccccgagttgtattactggtgcaaggatacccctccataaacaaaagcaagcgacaaaagtgcttgaagatatttttgctttatattttttcttttgagtgagtgtgtgtgagagagagagagagagagagagagagagtcacttggcaccatatgaccatactcacaagggaaaacgaggcttggagcaaagtgatgatcactggagactgaggtttggagcaaagtgatcaccggagactctgataggtgtaaaccggatactcatgtaaacttattagttgtgtgcaacaaaaaaccatagaggagactctggcaccttttttctctagctgacagagtgagccaaccagggactctagtcttcctttcttggagcaatccaagtaatccaacaaactagagactcagatgtttaaatttgtgtgtaacggctaattttggatgggtgtgagcatttcactatcctccatgctccccaccccccttcctcacacgctctgaataagtggatgtcagatcctttagacctaatctcctagggtttccaccccttcttcttctaggttgttgagccaattttattgtgtgagagacaggggattggatctaaaaatatagtgaactagtattgaattgaacacctatgaatcaatgacctaccttcgacattgtgattcttactcttttaggttctcctcctagccagctaggcgtcacctgcgagtacccgattgttatgatagccctagaaggttttgtgaaggtttatcatcacctctggaacgaaagaagtatttgagtggatactaatcatggtgctcttggtaaatcaagcatcattggatgcagtagctcgtcgtccaagcttgaatcttggtggtcgcttggaaacgaagttttgtctcggtggtagcttagaaactaaaacttcttcatggttgatagcttggtgaggattgggtcaattgagatacaggttccttgaagtccctcgaaggggagtatggtcgctctgtcaattgttgttctgttgtggtatcttatcttgtgttttctatattcatctcgctatctttccttcccgctgtaaatcaaaatgttcatttttatattagtttattgtgttttatatattcacctggagtatatggtgtgaaataccggagttcaaatatagagtacacttcgagaaagagtgtaagcatatagattcatttggattggattattttatacaatgtatacataaatcaattcagttgttgcaaaaacactatagattcaattgttccaaacgggacatacagattttgactcttgtaaatgtcaaagaaacaactctaaaatctactagtagaaaagaaaggcactatcaaaacgttcatttttcagctttgccaacatttatatttcgttttttttgaacttttgataaatgcactatcggtgctatttagctcaaatttagtattcatttgagcttagaaaaaagaacataaaaagcagtacaatcattgaaggaatgttcatgtcatttcatctgaaaattttactggcatactccctccgtctaaaaaaaaagacaaaccctggtttccgtgtccaacgtttgaccgtccgtattatttgaaaaaactatgaaaaaaattaaaaagataagtcacgcataaagtattaatcatgttttatcatctaacaataatgaaaatattaattataaaaaaattttatataagacggacagtcaaatgttggcacggaaacccatgatttttttttttacggagggagtacatatggagtacacaaaacacagtcccgctaaaaccatcgcaataattcaaagcccccaccagtcagagagccaccacggcagacggcaccgtcccgctaatcttttcccaaacccattcgatttgggcgccgaaaatacgaaatttcagatcccgcccgccatctcatcgatccgcgcttttgtccacgtcaccaatccgtggcaactccctcgcaccccgatcccacccgtccattttctccctcatccaacggcccaaacccactccacatcgccccgccctgccctttaaatatcctttggccctttcgcctaccgcactcactgctcacaaccaccgaatccttccccaaaatccccaatcccccatctctttctcctccagcgagcgagcgcggcggccatgtcggggcgcggcaagggcggcaaggggctcggcaagggcggcgcgaagaggcatcgcaaggtgctccgcgacaacatccagggcatcaccaagccggcgatccggaggctggcgaggaggggcggcgtgaagcgcatctccgggctgatctacgaggagacccgcggcgtgctcaagatcttcctcgagaacgtcatccgcgacgccgtcacctacacggagcacgcccgccgcaagaccgtcaccgccatggacgtcgtctacgcgctcaagcgccagggccgcaccctctacggcttcggcggctgaggtccgccgctgcatccgcctggccgtggggacaagtcttggctcgcggtcaagaaatccgggaggatatctccaattgatctgggtctcagttagtagtagtagcagtagtttgtgttggcatcgttcttgtgcctggggcaagtttgctttcgtgttctgaacttgtgctgtgtaaatccgtatggtgttttagctattaacaaagttgggtcattcgctgcaaacctcatgcttctagttattgttgttcatatgagctagtataaaactgctagttttgtcttgtgcaaatctcacattaggaatttctattcgctccaactgtttattgctgtttgtttttggcgaatccttaagaatcctgcagcatttaggtggaatgtcaacctcaaggtcagattgttttcatatggttgatccctatcttagctttgcacttcttaattctccaatctccactactccacccttttctatggtagaggtgctcactgctccctttcgttcaatgattggcatgacggcgtgctcttctgctgaattgttgccaactgagcaatttgccgatttggttgggagttgggactgcaaattttgttgggagttggacttcgtatacgcaatgcttagctatgtactccagcagtatcgagctattgttgcatcgcacgcgtttctggatcgaaatcgttgtttctattgcatgaatacgtgattaggaagagatctgtcacccaaaatacttttagagaagggttaaatattttttgtagttctgatttgatattatataaagaaaacaactgtcaaacacttaaatttgcggctatatcaatactattccaaatatagaatgcatgcagttaaaccttgaaacttcaaatggtttattgatacataccatattaggatttgacatgagaaaatgttattggtaattggtaaataagatttgtctagaaaagcactttcatatgattatacttctcctaatttttataaatatatagtcccaaaaaatagccatgaaacatatatgtattggaatgataagtagaaaaaacagaggtggtaaataacatataaataaaatgcatgggcattcaacaatgtcaccaagatattccatccatagtaatttatctgatactaatcctagtactcatttcatagctaaggctgtgtttagttcctgaaattggagagaagtttggtgaaaattggtagtttggaaaaaaaagttaggagttttatgtgtgtaggaaagttttggatgtgatgtgatgtaaagttgaaagtttgatgtgaactaaacagaacctaaatggaagaagtgcagaaaaaatattcatgcgagttctgcatttgcatcccctaaggtcactcacaatgcatcaccaaattttgaggagtcaaaactgctacatagactaaaaacttcgtaagcaactaccttcaaggcattagcagtgcgccaccgaaaaatgccggacctcactagccacataggcgaggaacaatataagctacatgtctcatagtgcaggccactcgtggtgggtcccactagtattaccttttttggtaaaatttgctataggacatcaaaaaaaatttgtaattagctagaggatactgtaaaaacgtgtatttgctatagtgcatcgcaaaaaactggtaattggctgttggacacccgcagcactattttattatttttggaggaaaaggagagagaaacagctgtgtaaatacggttataccctttgaatttgtttctttttctttattcttttctttctcattctctctcttctctctattctttcttcttgcttctctctcgatcccctttctcaccacgcgagtgcacgcctgagcaggagacagctgacgtggggcggtgcgaggcgacggccgggcgcagcagcgcaggcgccggcggccagctgtgtgcggcggcgcggccaaggccacgatggcgtggcgctacggcgtggcggaagctggtggcttgccgttgtcggcgtggtcaccacccttgccccagatgagcgcgtggtctcacatgacgcgaaggaggatagctcggcggcgaggcgcaagccaccggtgctggcctccgggtccgccgggatgacgacacacgcgaggctgcatagcccggacgccgcggtgagctcgaccaccgagctgcgccggttgaacctgcccatgaggagccacgagaggacggacacgggcatggtcgccagtgacaggacgagcatcttccttcgtcccagatgagtgtcggcgagcgtcgtgagtagaaagcctccgacgaggttgtcagcgaagaacgacgacgccgggagggagacgagcgccgggcagccgccactcttgagcgcctactccgacacaaccgacgtcctggctgagtggtcccactcatgtcgcggcgctccgccacgagcgcgacggcgccactcatcgccaagccgagcatgcagatgagcgccggcgcgcgtggctgcatgtaaacccccctcccgtcggcgaacgtggccggcaccgtcgccgtggccgcggattgccgctccgccacccggcttgtctgggaagaaggagagggagtggggactttcatgtggggcccacgtgggagtcatttgagccaagggcaaacttgtctttaatcattgtttccctagttttcctccaaaaataataaaataatgctgcggatgtccagcagacaattaccattttttttcgatgccttgccgcaaatacacatttttacggtgtgctccaactaattacacgttttttaagatgtgctacagcaaatttgccaacttttttaccttttcatctctctctctagtttccccaccggtactttgcgtcacgagagaagcaggcgctgctcctctaccatttcatctctctctctctttactttcccaccgcgcgagcggagctgcggcggcagtgccgagctagcggagcggcggcggtgtcgaccggcggcgtcgagcggcgcgacggacgacggcggcggcctcgagcggcgctgtggacgacagcggcggccccaagcggcggatctctctcctctcgccccgggcggcgtcgaaggcggcgggcggggtggcccgagcggcgacggtgccgggcggccgggcgacccggccggcgccactcctcccccgaccagcactcttctcctccccggccgacgtctcttctctcccggcgctgcccaggcacggggaggcgggcgccggacgtggagtggagcgccgacgccggacttggagcggggtggccggcgtcggacgtggagcaggcggcggcgccggacgtggagtgtggcgccatcgccggacttggagcgaggcggccggcgccggacatggagcgggacgaggagatcggaggcgagcgcgcgcgcggagcaacgatggagaagccactcgctccaagcgcggttgcggcgctctctccctgccccatgcgacctcgatatcaccggagaacttgtgaccttctttggacgcgaggacctcaggtttgtgggcccaaacacggacgtggcgtagattctccccgctttgccgacgtggattgctcaggctgaatgccaactcattgcattatgaacgtggcaacccattcacagtgcacgtggtctcacaggtaccaactttatcactttactaactttttctttatcccctcctttcttcactcctttttccccaccccatagccccaagccgggccgagctcctccgctaccgacgggagaggcggcggggcttggcgctcgccggcgcaccaccctcctctccctcctcccacctcccatgaaacaacggcgaggtcggcacgcggaagcgggcggcggaggaatcggcggcgggggagctcggcggcgggggagctcgacgtcggccggcgagggcgccgtcgcttcaccacctctgcgggcgagctcctctcgtcgccgccggatgggatggcgaactcggcacggatctggctcggattcggcgcccctactcttcctctccggcgagctttttcactcactcactgtgtttctctcacaaaatttgctgaggttctcggagccaaaactagccatgcgaacctggtgaaaacgtgggccccatctccttctctcctccatgcacgcattggaccgacatggacagagattaccacacgccacctcaccgcatcgtgaatggcctaacgttgggcctgcataaccagtttttgggctagtcaggcccgtttacaaaccaagccacaaggttataagcccacacacacgtctctcttctctactcgtccccctccgccgcacccgccgacccctcctctctcgtccccggcccgacggaggtggaaaaaaaaaagaaaaagaaaaaaaaactcaaaccgccgcactcgcacatccggctcgccatagtccccctcttctccaacgaaatcttcgccgtgtcaacccgcgcctccgatttctccagcttttctttcccgggattgcgcgcgtgctccctcccgctcgatccggctccgcttgcccgtgctagccgcggactcggggggtggctctcacctgttgtgaggccgctagggtttcagctcgagctctggagccgtagggcgccgggatatggcggcccagggcggggaggcggctgccggatccgacgccaagcccactgcggtatgcttcctctgctcctgattcggcgtcagtccctagcttgtgagttgtgaggcctctgccgccgcatccttttggagttgtgattatttcctgcacttgcgcggtgtgattcgcctctgctttgggttaggatgcagtgggtggtatccataatctagttgattacttcagtgttttctgcttgggcgtgttgccttgagaaacttaggtttagtgcaacggttggatatctagttgtagccggtggaagatgtttagggatgttttttttttgctaatttacttgttcacgaatttaggaaaaccaaggactgaaatagtcgaagtaggttgatgccatatattacaatgttgttgtttactactacctccttccccaaatgtttgacgttggttagttccaacgtcaaacagaaaagaatggagggagtactactgttgctttgcttatagcataatggctgcgcactcttcctatctacgtacctagttgacaagccgtcatggttgttggtcaatttgctgtggtttagccgtttagtcccccggaggttaatacatgaggcgcttataatgttgtccgttgccagcgttttggatgtaactgaatagcttgtttcattctgaaattgataacgttgtttgtctgcactctacataaattgtatgcttcattctgtactctttaatgttcagtggatatggctgatatggagctgccacgaataaagttttaaatgttattaattagagcgtgcccacctatttacaaggcgttttctttccctttttgaaaccggcatgcctaatgtttcggatatagcagtaaacaggtttcggaaagctaggatcaaagatctactggtgaaaccatttagcacgtgaggacctgctttttaggagtctgttttgtgaagtaatgccctaagtgtgaggacctgtgatgccatctgcttattctgtaagacataaatttataaagatgggcataaatgtaactgtacttatgtaggtttgtgttaaatttgttgtgcatctttgcttgaacggcaggttaaagccagttgatgctgtagtttgtgtatattctaatattgcatttattagacagtttctgctgtcatttgtttgccacgtcatccttttagattttctctgccacatctgacatgtcattatgtactatattgtgagataaagcatgaaaggggaattctgccttgtatagataaaggtggttttgtacaaaacaagtaaggggaattgtacataaaggttttttttgtataaagactgtcttataaaacaagtcattactgtgtgaatattaccttggcattctttttgcatctcatgctgtttttttttctgtgggtcacgtggcacaatagtgtactcctaatgtttttctgcctgtttctacactttgctacatggggatcgatatttctttccatgattttccctgttttgccagagaagcgtcatattgtgttgtaagttttttttttcacatcatacattgttccaacctgaaattttgtttgttctaaacaaataatagggcacaggcatggagcagccaagtccatctccatatcaaccttcagcttctgatcatcatttgtggtcttcttcgactggtgctccctggaactattcaatgaataactctaaccaaaacacagtttattatgacccacaaagggatgtgtcagttccaggatctactgaaaatgtgacaagtggtgcaactcatgtggtccaatcagctatgggcattactggtgcaactgattcttatgctccttactcgaattctgttcaacccggttacaatgctccacagtatccaaactattactataactgtccacaaagtacaaatgaatcttctgttcaacaaggagtagatcaaagttcaggtgctgcttatcagcctcttacttcatttcagaattcaggatcttatgttggtcctacaagtaacacatattataatgctggtgctcatcagactgcaccgggatatgctaccagcaacaattattatcaaagcaattcctggactggcggaagttctggagataatcatgtacaatcatatcagagctatactccatcagatactaatgcagcccagagttctagttcactacccaacaattcttaccattatcatcagcagtataatcaatggccttattattatgatcagtccgcaccaagttctggtggtcctgcagttgctgtcagcagtgtttctgatgcaaacactgccagcgtcagttctggttatgtttatccgagcacccaaccacctccaccaggcactacatggagaagtgatgctggtgcaactgctgtccctcccccgcaggtattatttcttcattagtacttgggaacctgtgactctgagcacttcctatgtcctattcattgtatatttttttattcaggtttttcccacaagtagttttgcgttgccaaatttaacagttagcaattgacaggcaccaggaaccccagtgtttcaaaatcagcatgtcaaccaggcagcaggtcccccagggtatcaaaaccagtatgtcaaccaggctccaggcaccccaggattccaaaaccagtatgttaaccaggcaccagctgtcccaggatttcagaaccagtatgctaacctagcaccaacatatcaaccgggcactacatactatagtcagttaccactaagtaaccaagcagatcaacagaaggcttcacgttggcagggtccaatttcaaacgtttcttcagtcaatcatgtttctgaaagttctcaaccaacttttcagggttctgcgacatcagatgctctcagggtaaacaaaatccagatcccaacaaatcctcgaatagctccaactcttcctatggcaatgcccaaagtagagaagagaaatttagaagctgattcatcaaaaaagcctgcatatgttagtgtcgcagtgcaaaagaatgatgtgaaagcagctcaagatggtcacgaagctgtaacgcaggtgagtaacgattctatttacttgtttttgttttggtgattatcaacgatactattattatccttcagggacaaggaaccaactttgtggaaatttaaacatgcttactccttaacatttccatttttgaaattatatttgtacattcctggctctcaaataagtggcagtgcccagattcaaaatttgtcaaatctctaatgtacttaatgcctgtcgatttctcatgtggtcatgccaaatataacatgcacagctttacatctacctgttttgtttacacaatttcctgatctgtttagggatcaatccctgtttcgcttcgtacttatgttgggcggaatgtttcccgttgcaaggatgatgcccagaggtctgccgtgcagaacatcttgaaagaggttcagtaatctgttgtttttaattctttttaaacactatatcttggtttctgtctggctggattctagttatagacgcaaccttcagttcatgagacctttagtaactatgggaatgggtaaaatagttagggttgttccatactgaagttaacacactaacatcaacgacagcaataaataaatagataggtagatatatacaaggtacataaacaaagatccacaaagaaacaatggcacagaggccagacaagcaaatagaaaacagagtagatcacgtaggtgaattcctgaagcctcttggagatttgccagaaatttcttgttagtttttactgagaaaggttcatttctgctgtaagcattctcttccacatatgcttgtttggaggaatcttgtcaaagatgtatctgttctttagatttggcagaaacttcttgttagcttaacctgagaaggttcatttctgctgtaagcattgtcttccacctatgcttgtttggaggaatcttgtcaaagatgtatctattctttataaccatatatgccagcaaccagaagggaaaaaattctttatacacttctttacaagatgtatatgcacgccttgtggagtttaaccataaaagtagagagctcctatggatctctatcaactcccagcaagctagactgaattcacaggagacacacagatgatcataatcttcaatataattgatttgcgaagaatacatgcttcactctccactttggaattcttcattttaagcatgcgcgttgcgtttgttttaccgtggagaagtagccataggaatattctatacttaggcatgcattaatttttccacaaaaagtgacttcatatttaagctcttaagttgattttcattatgcgcccattggagcttgccatgaaatatatgttcttacaaacttcataaagagtctcctaagtcccaagtttttcccttccgataattcagataatcaccaaggcaactgctgatggtatccttcatactaagaactgggacattgagccactggttcctttgccagaaaacattacaagcacaaatttgacaaggtgtgctgctcttccctccatttcctccttccactagtgatgatgtagcttttcatgtggcagtaaccatcaaatcatatgcttgtattcttgtatagcacctttttggttagtagtattctttaggagtatttcctgcagcttgatttgaattatttggatattggaaagcaaattttgttgccattgatttataactatgtaaagatgctttgctttgttcactatgaaaaaaatctcacatttttctcttaatgcttgaacatacaagtactgtaaaaactgagaacaacagcactgtgctagatgcaatatatgccacttaagaagcatcatgggcaggatcaccaaatcataattcctcccccacctccccacatagaactattaagatcaagaaattattggaataacatctgttctttgttttgttgttcaacacatgataagggtaagtgggttacttgcttaggcaggtaaaaacattgtagagtctactaagaatgcatggtagtaggcacattgacatgtcagttcagtggatgcctcggagcaccagtgcatattgtgttggagggcctagcttcttcctgaagatgcttttctggaataagctggtggggacggacttcagctggccagtactataggggcttaagcctctctaacaaacctcaaaatctacccgttagagtcttatagaggatataggctcatgccatatggtggttttaagcttacagagttcatcaaaacaacaccataaccaaacaactaatcttggtcattgagataatcagataaacttgggatttatgaaaaataccaatataccattgccattgtagcactgaggcatcgtgaagttgcaaaatgccatgcaaatatgcttgggttataaatgccatagtcatcaaaatccatgctattcatgtccatttaggagaaaggtaatatcacatatgatggtactttccacactttatcgtatttgcaagttcatgattatcttaatgatatagagctaaatttctcaatcctttttttctttggcagctctgcaaaggatttgagccccttctccttctcaacttctaggaggagccctagtagacgtgcaaaaagcaggtgggaacctgttgtagaagaaaaggttgcaaataaggtggaattgatttccaaagaatcagcaaagaccaatacctacaatagttcagaaacaactaaaagagcggtaagatctcagtatgggttcatataacatgcatgcctttcatttatgagaaatacttagctaaatactttgcagggtagaagttgggatattgggaagtttctccaatcccgtcaggctcctttaagtcaatataatcagagacctagtaaaaagaagcggattggtggtaactcaagtctaactgaaaatggaaatgtttcaagtgacagtgataaggagcaggatctgacaaaatattatgctaatgcaatcacaatagcaaattcaccagaggagaagaaacgccgggagcatagatccaagcgttttgaacgtagtcagggtgctgcatcctcaaaatctaggagctctgttccagataaggatggaacatccaatacatatgctaggagatctatgccaatgcttcttagcagaagtaatggagatgatgttagcttcgctgtggaggatttggattgggatgcactgactgtcaagggaacatgtcaggaaattgagaaaagataccttcgtcttacatcagcacctgatcctgccacagtgagaatgctctgctaatattaccttgtaaactgcctagattggaaaaacatattgttgataggaaattgtctctagatgttgttttcttccttttgctactccttgctttagttttgtttcatcataccttttcaggtaaggccagaagatgttttagagaaagctcttcatatggttgaaacatctcagaagaattatctgtataaatgtgaccaactaaaatcaattcggcaagatcttactgttcagaggattcagaacgagctgactgtcatggtagcctttcttagcccactttgtgtgttatatactgcattatactcctgttcactatgttagtccattttcacgggaaatatcatttcacaatgtatccgagaaaaataatactccctccatcccaaaatataaggcacaaccatttttttctgtctcataatataaggcgtgcatgcatgcatacattaattatcttctcctggttcttttaatttggtttattttaattcatgtaccattaagtctctcaatcacattgcttgcatgtatggatatgattcaattaaggaggtgattaaattttttcttggtctttgtgttagtagtggttgtgccttatattttgggatggatggagtagttgctatttgcactccttttcccaaatttagtaatgtgatcatgtgaatacatagttgctgtgtgctattcaatgtggacgcacatgatcatttcttatcaatttttttcttaaactgctgcttcattggcctatttgcatggttggctaggacagatattacaggacggagtagtttctaacagtttggcgtgcctcgattattctgtttgttttaatgttttgattcatgaaggaaattatttagttaatattattttggcatgccatccttttttactctattatctatctttgatttttcatgtcaacgctgttccaacttcccgccatttgtttcatcttgcctgctttttttggtagcttccatattacttgttttattctctctttttttttcaggtttatgaaactcatgcgcgcttagcacttcaatctggagatttacctgaattcaatcaggtttgcttatcttgttctgaatgtctgtccttattcctgacataagaataataaacaagtgtcatgtgctattgtagtttcattacgcacgtctactaacagccttgttagaaattacccgctctcagcggtttgagccaagttaacgtacataatactctggtgaaataaagccccccatgtccttattagtttctagttgaaagtcttgacccccccccctccctctttttttttaacagaagcatatatgtagcacatggtctatactactaccaattgcaactgccgtagaaatgcagtaaattagccatgttaaagtgttggtactttgcaaattgtgtcttttctaaaactggatgctctattcttgaattattaagttttgtttgtctagttgcctcacagaagaaagaaacctacagcctaatttttttattgtttctgctgcaactctttgcagtgccaatcgcaactgaagagattatatgcagaaggaatcaaaggctgtcatttcgaattctctgcttacaacttgttgtgtgtcatgttacactctaataacaaaagagacttgctttcttcaatggcaaggttggttatttcacatgagttggttaatatgagtccattagggttgcataatatgagcacatatgagttggttatttcatagttacatgaaccttatttgatatacatccatatctaatagcttgccaaaggaagccaagcaagacagaactgtcaaacatgctcttgcagttcattccgctgtttcatctggaaactatgttctatttttcaaattatacaagaccgcacctgacttgaattcttgtcttatgggtaaatatgatctccctctctctgtaatttgaagtgttcatctaatttcattgagatggtgtttttgctttgcaacttgcatgattggtgctgtagatctctatgttgaacggatgcgctttgaggctataaaatgcatatctaaatcatatcgcccaactttacctgtaaaatatgctgcacaagttttgggattcatggcaattgacgaagtttgtgaagctaaaagagctgatggattggaagaatgtgaagaatggttaaaagcgcatggtgctgttctttcagtagataacaataacggagaattgcagatagacacaaaggtaaaacacgcagcaggtttttgcaatgtgtttgtgttgtattggcttttgaaacactgcactacctctattgttcgacaggtttcttctacttccctatacatgccggaacctgataatgctgtttcacatggtgatgcatcacttgctgtggatgattttttggcacgaacatcataggtgatgccatgctgagcatttttatcactcatgtggcactgaacttcgaaggtatttctcgattgcatgtagcaatgcctgtagaggaatgttctgttaaatgcagggtaggaccttgaaatggatcagctgaagggggaagcacggtcccttgtcgaagagaacagaatgcacatgagcaggtcgctttctattatactcaaaacgtgctctgggcctctgaatctcagatgctgtgggatcgttggcatgttgctagctctacagccctgcagcagttccattttgacaaacaaaattctggaggcagcattaaccgaaaaaaaaaaaccctcctcgaagtatacattggcgggcattacttttgtaccgtcccagccagacgacaagtgtacatgttgagatgtagtcgtaccttcaggcttcagtgtattgtacaatttttgtttacatcggtgaccctgatgttactcatttcattgatcaactgcaaatagttaatacaaatttggaagtactcatgttggtcgactactgttttattctctttttgttaggtaaaatgaaaaaacaaacctgagtaatgtcgcaactagacgattagccgtgttagaaactgtgcattatggcagattcgtcctgagtaataaactggcctttttgggacggagggagtagaacgtatacattatttccggtacttgttttcagtagtcaagttttatgtattttgatcaataatcaaagtaacaaatacatttaacgtctaaaagttatatcactatattcatatttcaatgctttagcaaaacattaattttatagtttgttgggaatatattcaagtttaccaagtgtcttactccctccttcccataatataagggattttgatttttttcttatactgtttgaccattcgttttattaaaagaatttggaattattatttatttcatttgtgacttactttattattcaaagtactttaagcacaatttttcgttttttatatttgcacaactttttttttgaataaaacgagtggtcaaacaatacaagcaaaaagtcaaaattcattatattacaggagggatggagggagtaatttttatttctgagatgaacggtgcctgagactgagtctcggttacccagtataattgtttctgtgaccgcagcggcagtgcacaagcctctcgagccaacgatcgcgacggcggagtgccaatcgatccgaatcacatccctttgcacccataagaaaatctcatcattctggcaaggctcgcatttgatcgacctacgtctaaggaatggccgtcaacgcacaaatcctattacccttcctcaccgttaatatcgtggcatggagcagtagcatagcagcaattcaaggcaacgaacaactgaacaagcgatgcgagtgtaaagcatgtacggccccgcgccgcgcgctaatgcgttacatgggtgcggcaaacgagccggcaatgatgtagccgggtgtgggcgacggattccgcagacgagcgcacgcaccgtcgtaccgaccgccccccggcatcccccctttcctcccccggcacggcacaggcaacgggctcagcctgggagcgcgggcgcggcgcagcgtttcacctggcccgcaaggttttgtcggtaagccgcgcgcgcgcgcgtggtcgctcgcgaccgaggcctcggctcggctgtggagcgcgcgaccgaggaggaggcggcgcaattaatggcgcagcgcgatgcccgatctgcggcgcggcgctggcagctggatgagatcaccgccaccgtgcgcccgcggcaacggaattaaacctgcgttgcgaccgggcgggccggcgccggctccacttgcagatttgcagccgcgatcgagctgcggttgccgtcgcgaggcgacgttggccgtgagtcgtgagcacgcatttatgggcctcctccccggtctgggttttcggaggttttgccgtttcggctagctattggcattctggcatactagtattaccgctgatagcagcctactatgctgccgctggttcgtcacgtacccctactccaccttcgatcgctgcggttacgagtggatttcacctttcgggtttctaagaaagaaagaggaagggatacgacgttgatacgcatgggtggtagcagtaaaatagcaagtgcagcggcctatggacttgccagaacggcagaactaccttggtgagtcacagtagtcagagtagcgagggtcgtattttactattttagtgcattctaagaggtggacttatagttttgagagcctcctaattctacactcgcccaacaaaacaaatgaacatgcccgctttaaaaaggctgcaatcaaactatattaaattcgatcaaatatgtttcatattggatctgtggtcaccgggtataaagagctctagagcacgtgttaaagggcgcaaggaaaaggatcactctggtttgtcgtacttagttagggaggttaaagatctactgattggaagggagtttaaactctgtaaggctaagcgtagtcaaaacagagttagtcattgtttagcagatagagctcggtgtgagcccggcctatccggtatttgggctaacaatagctgtaatttcattacatggttagtcttcgagaactccgtgattgagtaatatattctcttttcccaaaaaaaaaggctcattcacgaggatatgaacgtttatgttgtgttgtgtagtgatgtgagcgtgtgtgcgtcataccatgtaataaaaaaatagtcgaccaaatattaactcatattggatcggtggctaccaggaggggagctgcgacgaccatgtctatagtagtggttatttgttaatagaaaaaaaagaacaaaggttgaataaaacattgattacaagctccaaattgacttagtcgagaaaactgaaatgacctatattcataatatttgtactccttttatttcgaactacaaatcaaatattttaatttttatcatccttttcaataaactttatatagtttaacatcgtaagatttatatttttagattcaccgtaagaaatatttccataatatatagtttttatgttgttaagctatacagatttaaaacttcaatggtcaaatatacttatatttgaactagaataaacttagaatgataagtaattttaaatggagggagtatataaagttaggcacataatcagaatattgcatcgttgcaaataaaagtccagacataggatgatcacatatacatggcactgtagatggaccgcaattatgagtgccaccccttacatgaggtcaaatccgtatgcatgcaaatacgagcacgagaattgaagcactagtgaactgttatccatcaaccacaaccacgatttactgaacccacggttttacggttaccgtgaaaaccgtgcggttatcgtgaggtatatataattttaaaaactgataatgttaccgtatctaatagccacggtaaccacacaattttttaaacattgatcacagctctaccaccatgtgaaatttatttttacaagatatcacggtactaacacatacgcttacaatgtactcacactcacctttataaatggacacatgcacactttatccctattagcacctaaaaaaaactagcatgataatatattttaaagttgttgaagtcaccacgaatatctcattgtttgatgaatacatcacccaacattgaaaacaattagcagtaattaaatacctatgttaagtttaggactctaaagtgaagtcgcagtacaacacagtttaatggtcaaggttcatttcttttgttctctaaagtagtctagcttattttcaactatgcgcacgggagttgccagtcttttattttggccccatctgcactgaaaagttaatcttgatatgtcacctaagggcatcaccaatatactatgacaaattgatctatagatgggacccatataaatagattttactttttacatatagcaatctccacaatatatatatatatatatatatatatatatatatattgtggagattgctatatatatatatatagacaaacacacacaatatattattagaagaagagagaagagtagagatagataatataatttatttcatatgggtagtctatatgcatatggatatcttaatagatggctgaatagaatattgtattgcttatacactacttttacacatataccctaagatgagtcacgtcatacattaattcatcaccattggattgagaagtacaacaaatcataacagttccatccaattaaaaagagaggaagcagtaaaaaagaaaacttcctatgtcagaaaaagaatctaggattggatgcgatactccctccgtcctataatataagggattttgactttttatttacactttttgaccactcgtcttatttagaaaatttgtgcaaatataaaaaataaaaagttgtgtttaaagtactttggataataaagtaagtcacaaataaaataaataataatttcaaattttttaaataagacgaatggtcaaatagtgtaagcaaaaagtcaaaatcccttatattatgtgacggagggagtatgattcatagtcgttgattttttataggatgaagggagtacccagcatcaaaccataggcttcccagatgattccatacccttcccttcggtctgggggagagcagacaaaaacaaaaataggaactgctacatcattgcacacaaacagagttaggatgtgattgtcttttttgtattttagtcctaaagtaaattgtaatttagtagtacaaactaatcctgcaagtactgaaattttgtattggtacaaaatgtatgtctatatgattaatttatattttaccaaataacgaggcatatgctctgtgcaagttaggatgtgattgtctttttttattttagtcctaaagtaaattgtatcttacaaactaatcctgcaacaaagaggaatgtatgtctatatgattaatttatattttaacaaataatgaggcatatgctctgcgagttaggatgttattgtctttttttattctagtcctaaagtaaattgtaacttacaaactaaggttgtgtttagttcctgataaaagttgaaagtttagggaaagttgaaagtttggaaaaaaattgaaagtttatgtgtgtaggaaagttttggatgtgatgtgatgtgatggaaagttggaagttgggggtagttggaggtgaactaaacacggcctaagggcatgtacaatggttgtcaatagtggtctcttagcgttgctaattaggaatatttgttgacatggaggaaagagaaagaggagagacaaaacatcgttgttatgcatgacaacggcttaacaacgattcttagtcattataatatggaaatatggttgcatgaggataaaaatatggaaagaatattaacaaaaggaatattttttgagttaatgattagagcctttgtcgtctcaactattgtaaagacatggtctctaaataattttgcattgtttaagagatcatacccgtctctaccattgaacatgtcctaatcccacaacaaagaggatagttatggttgcgcaaatagggaaagcaaaaccatggtcaagatgaatagaaaatgacatttcacattacaagcgtattcaaaatactataaatgacacatttacgaatgtttggtagattatttatttttacaataataattaatcacaaattaagataaatatattatgatatagctatagttactgcaaaaatgcatgtttcacggatacttatttaagctaattaaacaacacataaacacatctaaatctaatagagaggaaggttataatcacgcgaatgggtgacttaataagctagtacgaacaatggtaaactctgcctttttcagaaggtaaccaaacagataggagtagtacgatgacttgtcttcacggtaaagatcaacttaatcaaactgaacttttgccaacttccattttacaacctcccagtactcttccattactcccctcaaaaaaaaaaagtactcttccattacattgctgttgcatatgccgtcacttgtcacgtctgccatgcacgaaacggatatactataaaaaaagcagactaacagagcatctagatactcctacgaggaaccgaacgaccgagttgtataatgcgaattgcgaaccgtgcacattgcctcccacggaaccccctcagaacccccaacttgcccaattccccctcgttttctcgtctcgtcacccacccaaacctaaaacgcacccgctcgacgtgccagccagctaacccaccctccccctcctcccttctcgttgacccgcgccttccctcccacggtcacacggtactcacctccacgggtccacgggtccacgcctcttccacctcgtcgttctcgttcaccgcccccgtcccgctacccccgcgtttttttcatatccattgccccgtgacacagccacgcccgtacgcagctacgtacgcacgcatcagccatcacaacccgccgcactcgtctcccgcgcgcgtcgtgctcgtagtctttaaaacttgagctcgaagcatcacaaagtcctaaccacacctaggactgggagagaagcgcgcgggcgcggcatcccatcggtcgcaaaacccacaccggctaccgtcgcgtggccctacttaaactccactttccctcctcctacctttgcgccatctgaaccacgccacgccgaatcgtccgtcgtcctagatagtgcttcgctagctgtgggtgtgcatgccatggcgcgcgcagtgcacgaccgcctcccgttcctagccacgcccccgccggcgccggcgaggggcaggaacccgccgctcgctgagatgctccgcctcgtcggcgctgccaccgtcgactccgacgccgccgccgccgccgcggatgaggaggccaacgcgctgtcgttgccactgccgcgcggtggtgttactcctcctccgcctggcgggcggaccatccagttcaggctggcgttcaccagcctcacctacagcgtccgcgcggcgcggcgggcgaggcccggcggcggcgatggcggcggcgggtttcgcctgcctctgcagaaccggtgcgaccgcgtcaccgcggcggcgcccgacgcgcactcgtcccgcgcgagggtgctgctggacggcatcaccggggaggcgagggagggcgagatcctggcggtgatgggggccagtggctccggcaagtccacgctcatcgacgcgctcgccaaccgcatctcccgcgacgcgctcaagggctccgtcacgctcaacggcgagccgctcaccggcaacgtcatcaagtccatctccgcctacgtcatgcaggacgatctgctgttccccatgctcaccgtcgccgagacgctctccttcgccgccgagttccgcctcccgcgcgcgctgcccgccgccaagaagcgcacgcgcgtgctggagctcatagaacagctcggcctccgcgcggcggcggacaccatcatcggcgacgagggccaccgtggagtctcgggaggcgagcgccggagggtctccatcggcaccgacatcatccatgaccccatcctcctgttcctcgacgagcccacgtcggggctcgactccacctcggcgttcatggtcgtgcaggtgctccgcaacatcgccgagagcggcagcattgtcatcacttccatccaccagccgagccagcgcatcctcggccttcttgaccgcctcatcctcctctccggtggacgcaccgtcttcagtggacctccctccgccatcccggcctacttcgccgagttcgggtacccggtgcccgacgacgagaaccgcgccgagttcgcgctcgacctgatccgcgagttcgagtcgttgccggcgggaaccggacagctcgtcagcttcaacaagacgtggcaggtcatgcacgcggcgaggcacaacccaaacgatgatccgtgggcgccaaccatgtcgctgaaggaggccatcagcgcgagcatctcgcgcgggaagctggtgtccggctcggacgtggccggcgaggcggcgtcgatgcacacctacgcgaacccgttctgggtggagatgaaggtgctgacgaagcggtcggcgatcaacacgcggcgcatgccggagctgttcctcatcaggctcggcgccgtggtgatcaccggcgcgatcctcgccaccgtgttctacaagctcgaccagtcgcccaagggcgcgcaggagcggctcggcttcttcgccttcgccatgtccaccatgttctacacctgcgccgacgcgctcccggtgttcctgcacgagcgctacatcttcctccgggagaccggctacggcgcgtaccgccgcacctcctacgtgctctccaacgccatcgtctccttcccgccgctcgtcgtgctctccctcgccttcgccttcaccacattcttcgccgtcggcctcgccggcggcgtgtccgggttcgccttctacaccctcgccatcctcgcctccttctgggccggcagcgggttcgtcacgttcctctccggcgtcataccgcacgtcatgatcggctacaccgtcgtcgtcgccatcctcgcctacttcctcctcttcagcggcttcttcatcaaccgggacaggataccggactactggatatggttccactacctctcactcgtcaagtacccgttcgagggcgtgctccagaacgagttcggccgcggcggcgagtgctacgtccgtggcacgcagatgttcgacaactcgccgctggccgtgctgccggacacggtgaagacgagggtgctggcgtccatcggcacggcgctcggcgtcaagatcggccccaacacctgcgtgatgaccgggcacaacgtgctccgggaggcggcggtgacgcagctcggcaagtgggagtgcctcctcgtcacggcggcgtggggcttcttcttccggctgctcttctacttcagcctcgtgctcggcagcaagaacaagaggaggtgatcgagccgtacggacgaggttgcacgcgcgcgcgcgcatttgcgcacgcgtttgaacgtccgggggcattaaacgcttggggagaaatagagagaaaatgatggcctagttaatttgaagctgtttaatttatgcaattgttaaggcggatatgatgtgatttcaatttggacccctttttgtttcctgtgatttgtagctaaataagtggcttatagtccactacacttttttttcttctttttctctttgtagtcgctgtgttaaagacttatatatgaaatgatgaagtgttttgatgatttcttgctttatatatagtcttgttgattggttctacttccatggcacatcatccgtaatgctctgtacgtgttaattgttccttgtgtcttggtgcaaaagggagaaacttcccctttttgttgacgttgaaacgaataaagcagaaattcctcgtcaaaactttatcaaccaaaaataaaggagtaaaatatgctgttcttgagcttgttacatttgttcctttgtgatctgatcttcttaatttagctcatgacttccaagcaactttcattgtctcggtgaaagtatgaaaaaactagtacgtcgtaccagtacatatcaaacttctgagtgtttagatatttatgtttctgtcaactgtcatatggtacattgacatagataaagttagataagaacagtgaaggggttggttatggttaggttaggtacatcacatccagagccaaagaggtcataccggtattggcgggtcttaataaatgactacatgatgagttaaaaaaactatactagcttacatgtgtgctctgatttgcttcttatgactattactcctttaaaaatcactgctttgcttgtgtaaagtaatcaacttgctagttctagaggagtttgacgacactattatattcgagaatttatcatagatgatggatgcactgatgtccatacatttcattgggtctttttcacagttcttaacggtgacatatatattacagcaaacctcaacgaaattttcaacttgacaagtttttctaggatacaaatttaaacatttgatgcagggtataaattactagtatgttcttgttgcactgcctttcttgtctgcaaaccaaaactaccctgctcctcatggcagccagcctctccgtaattgagttactggttagtggttatcacttaccatctccaactggtaatagcaccatgtacttgctgcttctcttccaggttaggacagaagaaaacagcaaagtggtcctggagcctggaccatggagttgaaaaaaatggatcatcctcgtcacgatatgcgagagggggccggttgttgggcaagcaagcaagcaagcggatttccaagggaagctaagcaagcaccagagcatatttccgggcatcacctgcaaggctgcaactggcagctgatggctatctgaaccgaggcgtttaggtcagatgatgatgagctgcaccgtaccaaacccggtgttcggagagagacagagatgccgatacggcaacacctgtattttggaaaaatcgcaggcttggcgtttggaaaatgctccgagttcgcagcatgcagcggtacgctgtactatattgtattcgtgcatacgatgggcgcctgggtcctcgttgtaggtcgccgatcgctcgccaaacgagcaccggaaaccgtcgcctgtcagcgtgacggctgcgtcagcagcgccggcacggttgccgcatgatgatagttaactcgtttattgtgagtcaacggtgcttgggacttggggttggggaagggggaggaatcaagtgctcagaatattcatcggttcagcttgagtagtagtactagtttcgagccactgactgtctattgctcgtggagatcaccaagagtcgagaggtttaggactttgggtgtgttcagttcacattaaaattgaaagtttggttgaaattgaaacgatgtgacggaaaagttagaagtttatgtgtgtaggaaagttttaatgtgatgaaaaaattgaaggtttgaagaaaaagtttggaactagccaaggccatgtagggtagcaattctacgatgatagtcatcatgatatcataagactctattgcttgtggaaatcaccgagtgtcaagagggttttggactttatagggtagcaattatacgatgatacttcttgataccataaaactgtctcatttgcttgtggaaatcactaagagtcaagagggttttggactttatagggtagcaattataggattcggatcagctgcagtctgcaacttaagcagtagtagtgcatgtcattggatggtccagattgcatgctgtatagtacatagtactgtagcacaatactgtagcacaaaatactgtagccattactactgtagcgttcgatctgaaccgttgatcgtaaaaatggatggctaaaattgtgtgcagttttatcttgcagttacaggtgtaagtgcacccgatctcaattcgcaattatacgatgatacttcatgataccataagactgtctctgttgcttgtggaaatcagcaagagtcgagagggttttggactttatagggtagcaattctacgacgatagtcatgataccataataggcggctcttcatcttgtgctttcactttcctgacgcaatttaaggggtagtcgtgtcgccatcgggtagttgcgcttggttcggccttattgggcttagaatgatagcttccaatgtcggaataagatcactttaacttccttaactagtgaccgaatttgatttgtgtccttcaatcgcaatatcaaatatctcgacccctcaactattagaaccagtgcaatttgactccctcggtatttttggaggatgatttcactgacgtggcgtctacatggcagtgttgacttagtatgtggtgttgacgtggcgcttaggtggcattagagttaaaaccataatatgggacccttttgtcatccacacacagaaaaattgtggacccactgacatatgggacccacatgtcatcctctcctcactccttcctcctcgctctctcccttctctctctgtctctttctctccccttagaatgcatcgccacctgccgccgaactgcgccgtgctgccgcccgccggtgccctctctttcacctcccgctgcatcgccgcttgccgccaagcgcacggcgaagggtaagaagtcgtgacggcgcggggcgctcatggcggtggaggacctgctggatgttgctgctcctgt

SEQ ID NO: 3719 - DNA, 730 bp, Oryza sativa
ttaaattgattatcctttatttcctgggccaggcttatcttacaggatggaaagacgaggaacttttttattttatttttaataaaaaatttataaaaatgttttattttacatatttaaattgatcatgtgtgcttcctccattaggtcctgtttagctctaaccccaaatttttttcaccatgtcacatcgaacgtttaacactttaagaagtattaaatatatgcttaaaaaataactaattgcacatattacgactgatttgcaagacgaatcttttaagcctaattgctccatgatttaataatatggtgctacagtaaacatgtgttaatgatggattaattaggcttaataaattcgtctcgcggtttaccgacggattctgtaattagtttttttacagtgtccgaacaccttatgcaacaccatatataatacctgatgtgacacgccaaaactttacaccctggatctaaacaccccctaaataggaaaccctagccaccagagtgctagcaatgtagagtttaatccagcccaggatatacttgatggtgcaataaaaaggggggcctccgatgcaaaggtggattctcgatctcgaccgcacataagagatcgaacggatagtcaagcacgttgtatggccgattcgcaggggaataggggatacggcagatcaattcgtaaggagatcgactctgatcaaagccggtacatatcagt

SEQ ID NO: 3720 - DNA, 721 bp, Oryza sativa
tcggcctggatggtgctggtgagatcggagtgccagaggttgcggtagctctggcggagctgcatcttgtcgaggttggcctgcgacgacgccatcgcttcttcttctcctctccgccgccggcggcttgcacgaggggatggatcggccgtggactctgcgggagatgtggggggggggggggggggatcgcacttgcaccaagccactatccttctctctctctctttttggggcgcgggggaggaggggaaaagaggggaggaaaacgacggtgtttcggtggggtttcggccgttggatcgggtccgatttgtgcggcctcgttaactgatggccatggcccgccggtcaacgaggcggagtcgtccaaagtttttccccaattttcttttcttttttttcccttggttgtagagtgttttggacgtgatcgaccgaggtaatggacggcacgaacgacgacggcttgcacagacggcgggtgaccggccccggcgacaacgatgcgagtccatttggttcgtcgccactcgccaagccagcaaggtgcaggcgtgcagctagagcggatctgcggagacggggtggggtttacggaacacgacgagcgacccaacgatccaaaagtgacaaaacgtggaatgtaagactgggcctcatagtctatcagctgggctagatggtagtgggccttgatgggttccatgctgttggtatg

SEQ ID NO: 3721 - DNA, 581 bp, Oryza sativa
gtctctcggcatcaaggctcccctgataagctagttactcagcaaggggtgttccattccacccatgtggtcgtacttgtcttatgtttggatgaaattccaaggaatcggtccttaagtgcgagagcgggaaaccgtacacccggtacgttccccggtccgcggttttggaaattcatttagttcgcaagcaccgacccaagtgtcgggttttccgagtcttttgtaaaactccagttttacccaagttgttactcagattttaagtttgaaggcgaccgtcgatactcgcacagagtgcacgagtatcaaggcgcaactgggtggttacaaggggacatggcatagcaattaacaatggaaggatcaaatgtgacaatttaggtaagtccgccaatctgcttcgcagacgggacaacagattaagtgtgatcctatcaatgcataatattttgcaagcaacatacttaaatttcaaatataggctcaagatgttcaaaggtggcttgccttgctcgagatctggagcttgatcctcgaaatcctcgcactgcgggtcttcgggctccgaaactacatgc

SEQ ID NO: 3722 - DNA, 5957 bp, Oryza sativa
ctttagctcatgtcttcatcacctccaccactattttcagctttacttgctccttcccgttcagtgcttgcggacattgctgtagaataaatgacagtttacatagagcgaccaccaagtgtccaagtgtgaaatttagactctaatctttcatagaatccttgtctttgagatagatgctatttgttctagagttcagattagtgttaaagaggagcgtaggtttatgactactgaaacagatgctatttccacattaaatcttgttagtgatgtcttgatgtacgaccagttattcccattatagtgctttcatactgttcaaactattttaacccctgtaaatactcattaacaaaatattattcctctgactaaaatatgcatcaaggaacaagtatagtataaataggaagagagtaccctagaaagaatatatataaaaaggaagagagtgcatatcagaagggaccatatacttgtgtgcatacatcatatctgtgagtggtgcgtagatatactcaagaatttgccaacttagctatgactgatacaaacaaaagcagagttacaaaagggggacagcccactgagatcaattgttgatttttgtagcagatccatgatttatgattttcttccaggctagataaacagagaagttctttgcattttatgcaaagatattccagccatcgattttatcagatggaatgagcagaactgtgaggacccaaatcagagcactccaggctcgagctgatgtatcatggcctgtactgggactcatgagtgccattatattccactgcaattccaggtatgtactgtgttgtactgtagtgctactcaaatttgcatcctgctcaagctgattaaactttgtaccagtcaatcaatcgttccactccactctagcactgttgccatgcccttatttggaaagtgatagccatttatgatatgaaattctgagaatgttatctccctcctatagcaatttttcatgtagttgtatttgtgaaaaaaattcagaagcacacttcagcgtgagttacctcaatatattgctgtactttcaattggaagattttattcattaagcagcatagacagctctctcagctaaagttcagtatatctcctgaatttaaaacatcaattctgcatgacttctataacgtatttatgttcttcttggtttcttcaattgaatcagcgtgtccatcttgattccgttacagtgatagtaaaagcaaactcactgctgtcacttaaaactctgtttgaatgtattctcatgtccaggtattgctaaatgaggaaatcagtgccaagatgaatctaatccatttattatgatgagcaaattgaatctttgtcccaacctttcctctgagtgctggattgaactccatccacagcctgtcacaggaaaagtcagaatgaattcaatacctgctattagaagacgaggacatgccctccttggcctggtcattgttctttagtgagaattatgacaagttcaatcacattgaagaagtagatgtttatagctggtgcttatattctttatcgtatctttattcagccatggtttatgtttatagttgttgattacttgcaggatatgagccaattgttggtcttgagttctgcaatccactcttcgtctcacaatgtaagtgttacaggtcaagaaatgtgtcatgtgctgtgcattatataagttttgtaaaagatatgaccaataggtcaaactttcatgacaaaacgtatccatacagtcctcaaccattattataattcaattgctttgcaatcatatgtagtttaacaatggcagacgatctgcataattcaagagaaaacctttgctagaggacattttttgagcaaatgcatatattcaagcaaactacaataaaaaccatgtttcttttcaaagtgcttaaggttatcataacctacaggaggaatcttgacttgaggagtacaaaaagttccacctctccaaattgctgtctcaaagcctcaaatttggctcaaagatgctaatgttaatttggatctgtagctgtggatcaactcatgttacacagcattcaaacagtagtaatgctttagtctaaaacttgcatcaactattagtctaaaggtctactagttgagtaaaaggctactcttgacatcctgtctgtaaatcctacagatagcacatgagcttttgaccaatgctaaacatgatatggtggtgttttcttcctaaatgcatcaggtgagtaccaataaacagaagtagaagctgaaatagtggttggtaataactgtagtgtgataatttcttaggattctaggttgcttcgtgctccttggagatagatgttaatgaggtatgaggagcgcctaaggcctaagcttaatacatacttaccaaatgcattttttcaatgtaaaaaatatgcttgcgttattatttgagcttttgaacaccaaattgttgaaaattagtacattactgaatgaaaagatatatagcgttaacgggtggtgatttaaatactttgataacggcgtagatagaaaacttgatccacccggtgaagaaccaagaaacaagtactcctgttctttaactttttcgctacatgtttataactatgctaatatgcataacttgctatggtgttcttagtttagtcagttaaattgttcatatctcaaaccccatgatttcttatgtacttattggtatgacagggtttaattcggctatgacatttgttactggggagcatggatgatatggtgagtagaagctattttgggccccaacctttttacattttcatttcgtaaagtgtcactaagatttatgttatgatttgactccatacggtgaactatatgcaactttgtactgtactatgaaatcagcaagaagaaatagatagtaatcacctcctcaactgtcaaagagaagaaatcagacggtgatgcttccattttgaagacaaggctcaccaattatttgacaatcttacatgcgctgcaagagcggggtgcacttctagttctaggcaggcaactggcagaaagggccatcagggtacaaacagtttgatcagatgggcatggatctcttactcaactctaaaatagggaactttacattgctaccagaaaaaaatttacaaaataaaaatgaggagtttactgccagtcatgcaatgggtgttattctatatgttctacgatacttaattcttttggaggaatagaagcttttaactggtgcttatggattagggtcaacttaaaaaattattgtgtatcgtatttcaccttatttgtttttataagcaagttactcactttgggtagtaagaagtgattaattgaggtaatgttgtgcacaggcagtcaggcatgacaatagtagttccttttttttaaagagaggatgataatagtagtacattaatagtataaactgaaaacatcgattgactgttctgtccatgacactgtttcaacttggaggtacgaattatgatcaaactccattgatgataatcatatgaccaaagcaaataacaaatttctgttatttacctttgtgtttctagtatctagttatctactatgacattgatatctgagcaaatatgatcaatatcctactcataatttgagcattttgttttgcagctgggccgaagatgcaccggttcagcttgtactggagaacctgttgtgccaaggtttgaactgggatgtctggctggctgggttgctacggaaagagagttctgtgtatctatctgactacacgctagttgaggttgcaggaaatccgtctccaacgttgcaactacatgctgctctcaaataaccaagattgaaagagcatcacatggcatgttttttaggctgctttagctagattgtttagtgtactggaaatgcatttggaaatgtctgggaaagattgaaatcatatttatcagagactctacatattccgaaaccaactactgtgactgttgccgtttgatgtgttttgtgttgtacgtgtatcttctaatccagtgcatgcttagtccttccaatcttcatctgatccgcaacttttgcacaataacttacgaaatgcaagagaagtgcataactttgatcctgacaacaaatttgtctgcagttcaaactctgcgcatgcaattgttgcagaacataattcttagaacacaacaggaacaattcaattacaaagcaagctgaacactatatgttcacacgaactcataattactcttgacgtgacgaatttggtcacataaagaatttcgtgttctcttgtacaatgtaaagaatttcacaactaatcttcactacaatttacagctcttcatcagatggtggtagtctttcagagacaccttcagccactgttggtcaatttgatcgtcgcccatgtccttcagaagcacacggtagcccccctgcgactgcttgtcacatccacctcttccgcgacgactgaaggagcgaacacatggcctcttagcatgctcgcaaaatcgtcctcgccctcgtcttcttcgttggtctcgaacggatccttgggaaaggtcaagatgggtggatgaggcggcggcggtggcgccatggcgggccaagatgccggtcgcggaggaggaggagtcgcacaccgcggtggattgtcattgccgtcctcttctcctcctccttgtagcgcgtcctccagttctttggcgagctcgtcgtattcatatagctgggaagggaggatgccgtcgactggtatactgtccaggaagctcataagctcgtccatttccatgccgatgtcagccggatcgggtacataagcagggccttgctctggcgtcgcagggacagacggctgagtcaccgaggcagctggcgccggtggctcgaacgggtccgtcgggtaggtctggaatggtggatgatgctgcgatggcgccacggcacaccggggtggcgccgcggacgccgtcacgctgctctgcggcgccattggttttgccgagacagcgcctttcatcttcttggtggcgcacggcggctcggcgaccggcgcggcgggcctcttctggggcggcgcctgctgctgcgtgatcacgggcacttgtcgtggcggcgcaggagcttgcggcgccgcctgtgctgcaggatacggcggcggcgcgagttcttggggcggcggcacgagttcttgaggcggcggcagggcggctgattcttggtgcgccaccgaatcaggagccgccctcggggagacgtaaatccggcagacgacgggctcgacgacaccaccggcttctttcccgcagaggtgatactcctccatcaaccaatccgtgttgttgccacctttcttgaagcggaagttcttgacctcgccgatcttgatgccctccctgttcttgagatccttgctggactgcgagacccaggtgccacccccggcggagcgggagaacttccctttgacccgcttgcaaccggtgaagaagaaccggtcgccattggggctcctcgccacgggcgcgtacttgccggcgaggtccctgggctcgtcggcgccgtagacgtcagcgcggtggatgtacccctcggtgtccttgggcgggtggccggcgatgagccgtggcaggtagtaggtgatgacctcctcctgagacgggttgaagcgaaaccctagcttgaggagaagatcgaggctggccatgtcgatgggagaaggcgatggatggagcgcgcgggaggaagaagcgagggaaggaagggggtgctctgcttttaaaggcagcggcgggacgggagctagggtgggtgcggatccgattcggactccgaatccaatcgggtcgacgctaattgtttggttttttttttttggattt

SEQ ID NO: 3723 - DNA, 2060 bp, Oryza sativa
atatgggctatgatattgatttatatgggctttgcatcttctttttgggctgggtttatatgggcccatttttgttgttctgtgggtcccactttcactgttcaccactttgaaatcaacgcctacttcatccgttgtatgggtcccaccttgaccatttactcccttcatcccataatataaggcatggtaaaagttgcacggtcttcaaaactaatttttaacttataatttctcatatgctataaggtttgtagcaataaaattataatcatatgaaagtaaatttaaatgtcaatctaatgatataatttttaacaaataaaattcatttcatattacattaaacgttggtcaaatattttaaaggttaaatcttgaaagcgggcacatttgaaatgcagcagtagtgagctcctatagaaaatccaaaattcaataaaaggtcataatggtcggaagctgttcactacttcagaaccatccagaaggcaagagaaaaaagcaccccattataacgacacgagaacgcagtcaggcgtggggtgcgagttagatacatacctggatctacttatttccagaaaaagaagaaagtgatcttgagctggggagaaggttttcggggtgaaagagtaagagatcaatctcctattatgtcatgaccgagggtgggtatctcagtcgcatatctagagcccagcatctctcctgaacgacaccttctacagactctactggtggtattccccgaggcgagggtaaatatgtgcattcatatcggttaggaaacgacaatgactcttcttctttccgggaagctatgggcacctcacaattcttagacgacattagtggaagcgaacattcgtagcattcattgtcaccgatcattgacaaaagaagaaaaagaagccgtacgacaacttaaggaatctttacatttggcggctatagactcaaagggcacagacaggctgctggtactgtttttttagctaactaaagtctaacttcctttgccgaaagaggatgaaacggaccacccgataccaatgaactcaccaaaagttcactgatcagatcaaccactgatcgctgagaattccaaccctttctatcccagcttctacttcacacagttgttctcgacttctactctcgatacttatcgtagtttatttttctacggttccttcaggctagggttagtgtcatttccactacttttgggagtgttatgatcagccaagctcgacaattctctcaatagtacctcgttttcatctaaaacactgcttaaagctcgatgggccgtatggccaaagtttttgaactcatctcccccaatatgatggggtttagtaccaactaagcggccatcgctgtcatgaattgatattcgctttttactagtaagtcccatggtgatatgaaatttcttatattgaactaatagttctgcccaattcctgtggaattgtttctcataggtgtgtgtgcctatcgcctgccttgttgtttttcctgttcaaccaccccaacttgtgacgtataacgatgcaggtatctggccagcattgaccgttcgagttgatgagcggaacccagacccatatgccaactggacacccgcaacgtatgtcagaaaaataccacgtttgcattgaaggaatgtcgcaggaagctgtcgatccgcgatttcaagtagttcgtgcttcggcggcaggggagggtcggagtcccaagcaaagaaggattcgaaatatgacgtcgaagtgatcatagtagaatggacgcggtgaagatgcagcaactagcacaagtgcctccaattgcacatcaggagaagatgtcactacagatcctgcggtcttctccttcctagcttttagatagccctgattctttcttggattttaatacacttagccgtgtacgtatcttggctaaactcgaacctatagttctattccacttcccgggtgtatggaaaaatctttaaaagaaataaatcatgcggtacttcttgttttaatcactcttcctttcctcttccg

SEQ ID NO: 3724 - DNA, 3582 bp, Oryza sativa
cctttacgagatagggccgttcacatgaaagataagaaaaaatccattcttcatggtcgggcgcatttctccaaatcctccaggatcacaagtggaacgctaagcaagggtggggaggctgcgagctccgcgttgaacagaaagaagcaagcagggggtgttgccgtagcgcgccggggagcaaagactccttttgtactgagaacacaattcaccttctcacaagaaggcaaaccttgtacgttgatcgaatcttctttcgcatccagaaataagtgcacgccttatattatgggatggagggagtatctcgtttattcctacagaatccaagggagagagagaagcagctgagagagagagccaagaccagcgatttcaccgagatgaggagcaggcgagctcactgcaccgtcgagctagagatttcgtcgcggcgtcggcggcattggagctactggttcgtgattcatcatcgttgctgttggtggttagtacttgctcccttgcttttgtttttctttcccatcgttttctgcagcagtagccatcaccaccgccattttttggctgcattttttgcttgtgttgtttgactagttgatcgatttttggtgccaccttcgattttgttggtggagttatgattcgttgaagagtttttgtgttgttctcaaggtgatttgttgtgaatcattttgttgtttagcagcgattagatctgacttctagaacgatgaaaacacacacccttgagtagagcacatacatgttttatgtttgtttaaacttcattgatgcttgcatgatttattctaactctaatttgttttgcaggttttttgcttgtattttggctctgttttggtgtttcaatcacaaatctatcattttcatctaaggtgagttagtttttttttgtttattttcaacttgaatgtgtgtggttctggaattttttgtgggttttccttttaaacaatgagctagtggcttttgagcaatttaatggttgatgtgaaatactgcttgtggatgtatttttattgtgtatgtgaaaatgtaattctgcatgtgcatgtgcatgtttgtattgatttttttccacaaatgtgttctatgaggtctccatgaatcattatttttattttttgttcattatattattttgctattcctactgcttgtatgtctgttgaaaagtgtttgtttaactttgtgtttggtatattagatattgagtttactgtgtttgagatgtatattaactgatagtaagaaaagctttatcttaaattataaataaatattgtaacttgcttgtatgagtatatgtctagttgcatgtctgagtgtctttcctttgtgaatgtttagtgatttagtcggctgttttagttcagttttatgaagttagtggacgaactgcttctggattttgtgttggttttagttgattcattcggctcagtttcatgaagttagtggacgactctgtgtatgtttgtggctgggagcattatattgttttatggtctttctggttaatcaaagcaaaaccgtatttgttcagttcatcagcacacatgcacagcggcgagctcatgtgtagtgaattagcgcaacagtgagttctaactgacaaatacattgtacatagttgggcattaattaggtgatgagggcaaatgatttttgcttagtgcttatttgcctatgattttctgccagcctcccttttgggagcaagtattcagttatcattaaattgaatggttaacatttgaatttgcctaaaagtggatgccgatggcaaatatggggttaggtcggaaccatctacaagccacacccagctgggaaccgatcctgaaagatgaagcagacatgcactgctccacgaattgtttctaaaatgaaaattcatttctttagcctttctttgttctagtagtattattgtctaggctgcagatttttgactttggttttgatcgactaggtgccacttcagatcttaattgtactatgccatcatcaaacatatataaaaattttgtgaaacacaataaaaacatatggtgaaacatatttctatcacgtatgaaacattaagtttttatggtttgaaacatatgtttttctttcatcagaatataatcatgtgatatcttattgtaaagatttaattataacgaattcaacggtatgatcgaatcgctcatcagttaagtagtttggaagaaaaagatttttaaaatcattaaatagttgcatcttgcatgcatgcatggtgtggagagaaagtcaataaaatgtatgagagaaagagagtgaggcatatacttctcatactttttcagtgtgaagcattatatgtggtgagacaaaaaaatcagttactgaacatttaacttttctatgaaacataatgaaagcttacaatgaaacatattgctaccgcgtctgaaacattaaacttaacagattgaaacatacgtttttcttttatcggaatgtaatgatgtgatatcttgttataaagatttaattatagcaaatacaatggtgtgatcatatcacagacttgataagtagatcagaaggaaaattattttgaagatcattataacatgtatggatgtgtggagtggattggaaagcagtagtttgcctgtctgatttttgtttgctgcgtcagacgtctaataggaagcatttccggaatgttagtcctacatattgctctgttaaacagcatgatggcacaagaatattttaagctattatatatgataaaacattgttattgttgtttttaactatttatatggtgattagtttttttaacttttgttttatttttccaatagatggttaatcaaaaagcaattgatgatatttttagtgatgagatgtcatcagattctgaaagttctccaaatgatgaagaattttgtaaggatagatctgacagtgaggtatttttgttttaataataaccaaaagttcatttttttgtcattttgcttaatcttacaatttattatactattttttaaaatttgtgtagtgatgtaaaataagctgtggtgaattatcaaaatatgagctattacgatcattaaaagcaaaattgaataaaggaaaattttcatttgatggcaacttgaaggtatccaatctactcatttgtttttaactttttattagaaaaaattggagtggagctgtgtaacgccctgaaaattcgaccgacaaaaatcaaaactctaaaaatgcggattttcaaaaactttttaaataaattgcatcatgccgattttattcgattattttattggagtttgggttcggagtttataaatcgcgaataatggataaatggttaggaataaaccctaaaaagtaaatggacaaactaaataattaaagtgcaatttaaaataagatttggtgaggatagaaatgagtaaaatattattacgaccatatttatatccatcaaatttaaaagcaatggaatgagaattaactcaataagttcaagtaaattacaataataatatataaaacatggaa

SEQ ID NO: 3725 - DNA, 815 bp, Oryza sativa
ctcggagtatttcgcccaaggggtactgtgaaggcactattactttgtgggcctggaagtagtgcttgagcttgcgcgaagccatcaccagggcgtaagcgagcttttccatttcgatgtatcttgccttcgccccttgcagtgcttcggagacaaaataaaccggtttctggccgaactctgtttcttggacgagggcagcactgactgccactggtgaagctgctaagtatagcagcagttcgcttcctagtgttgggcttatgagggctggtgggctttgcaagtattgctttagctcgtcgaatgctgcttggcattctggtgtccaactgaactttcccatgccccggagggtcttgaagaatggcagacctctttcggccacctttgggaggaaccggctaagtgccgtaattcggcctgcaagcttttgtacctcatgtacacttgacgggggcttcatttgctgaatggcgtcgattttctcggggttcgcttcgatgcctctttcggaaaccaggaaacccagcaacttgcccgcgcgaatgccgaagacacacttctcaggattcagttttatgcccgctgcgcgcaagttgtcgaaggtctcctacaggtcggacgcatgatcgaaagccttacggctttttacaacaatgtcgtcaatgtaagcttccacatttcgcccgaactggttgtaaagaccttgtacactagtctggcgaaggttgctccggcgttcctcaggccgaaaggcatcctgaggtgacagaaaatgcccaacagggtgatgaatgctgttttcgggatgt

SEQ ID NO: 3726 - DNA, 1153 bp, Oryza sativa
atggattgtgcaacgggactagactaatggttagagcttttcaagataatgcaattgatgctgaaattgttggtggacaacatgccaacaaaagggtgttcatcccacggatccctttgcctccctccgacgatatatcactacctttcaaattcaagaggaagcaattcccaatatgtctcagtttcgcaatgaccattaacaaatcacaagggcaaaccatcccaaatgttgggatctatcttccagagcccgtgttttcacatggtcagctatatgtcgcattgtcaaggagtgtgtcaaggctaacaacaaggattttggcaaagccaaagaaagaagttgattcaacagggaagagcactaaaaatatcgtgtataaagacgttcttgactggtgagcaaaggtaggttcgcatgatctaaattaattcaaaaaaatattgaatatagtaaattgctcatcgaatgttactcaccattgtcctctttttttgtacagcacgccatcaccttttatatggaatgccgtatgatatcttctacatactttctcacactagatgcgtcagttttcaccaggctgtcatttgagattgtaattggtctgtattatattaatggatacatatgcttacaaaagtgttctggattatttttttctatatggttcatccatacaatttaaatggataatgcaccgcagacaacccacaccaccgccatggtcatcgccatcgccatccaccgcatacagcccgcaccactgccatcaccatcacgatcaccgccgcctccgctttcctctgctattttttggggaaaagacagagagggagaatagggctgacaagtgggccctacgctttttagtttttctcctatcacttacatgtgggcctcatcttgtaaagttttattgtgcccacgcaatatcatagtattgcactttacatgaaatatattttatgtacgatataaattgaattaaagttcaaatgcatagatcatataaatttttttttgctaacatgaaattttaaaaattattaaagacagatagaattgcaccgtagcgtttagcacgggcatattactagtaatattagttacttacataaaaagtattattttgaacttttctcttcttctt

SEQ ID NO: 3727 - DNA, 2011 bp, Oryza sativa
catgttgaaagtcaaacgaggcaaaatagtaataacacgggagtgtatagcgaaaagagcagtcttactgttcattccctcaaggaggaccagcttaggcaagccatcaacctcttcgctcggatcaactgtaacctgccatgattgggagaggggaaagacgcgaagcatgcagaattcctccaccaggtcgcggcagctaaggcgagaacaaacttttcacagcaaggcgaaccgtgcctccatagcgccgtccacggcgatcctgcgtttccgattcggcacgataaccctgcgccggcaccgaagagctttcgccgagtcagagccggcttcgaaggggatggtgtgatagaaccacctcgccatccaatggcggtcccacttcgacatggcagcgttcaccggccagaggtcggaccgttcggggcgaatgttaaagttcacactcccgaacaccgtcttctttgttccagccggagtaaccaccgtcttcgagttcacggtggcaaagaatatggcgccgaagagggcagcgttgggttcgaacccggaagtccggcgtgcccagtcgaagatcgagatccgaaccagcgctgacgggctcaactgagggagttccacctggaagaggcgaaggatctccggcaacaacacattgcatggaaaccgtagcccagcctcgaaaaagacggtgaaaaccaccgtccggttgtctacaggcttcggcaccacgctttccctggggcgaaagcctgcccctcaaccaacgccccagagctgaccaacttcgccagctcgtcgtcgtccataagagagacccccaaaaaggaggtgttatcgtcgtcgacccgactagggtccggtccgaccgcctgaacagggtttggtttgcgaggggccgtggcgaaaggtgtgtgggaagtggcgaaacaagagggtaggcgaagcgccaatgagttcaagagacgctgtgaaaggaaacaacggaagaggagagcgcacgcagtaaaagtggcaagtgtggcagtgaaaaagaaaggggtgggaatatatagcccaccaggccgacgtttcgcctacccaccaatcataaggtgccacatggcgcaagggtaggcgtaacggtaaaatcccatcatccgaacagcacagtaaaaaacccataaagcgccacatggcgcaggggtaggcgaaacggtaaattcgcatcatccaagcagcacagtaaaaggcccgtcaaaggaaagcccaatactgttcccttccggcccggtaaaaataagaatattttatttgcaggagcagtgtaggtttcggtaggagcatcggtcgaaagggggcaccacataccataccacatggtttgcacggtctcggccgaagctccactctcacccttgcccgtgaggggctcgttggcggatggcatgaggccattcgaccaaatctgccgaaacccgtggcgcaggctatgaaccaaggatgatgcaaggcgaagggtcgcgtgagtacctgccgaagaaggacgacttcgccatggccagttcgccctggcatccagctcgaagaaagacggcttcgccatgtccagttcgcccctgcaagggccaaagaagcctttccggcccatcaagcttaggggctatagggccggcgatcgcccgacggcccatcaagggtccataagcccccttgacattatgtaaccctgtaaatgtccctttcataagggcaaccatataaatttctcagtgtaacctaaaccctagtagtaagaatctgtaatggggctataaatagccccctagggccatgtaataaggggaccggaaggagagaaattccaaaaaaaaactaatacacttcgtttctttccaaccactattaagtaaccacgtctttcgacgtatgtagttgtcgtttcgacaacagattgaaaactttaaattagttttaaaaactttctacttaagatttaaactttgaagtcaaattttgaaaactttca

SEQ ID NO: 3728 - DNA, 731 bp, Oryza sativa
tggatggcgaggtggttctatcacaccatccccttcgaaccgggctctgactcggcgaaagctcttcggtgccggcgcagggttatcgtgccgaatcggaaacgcaggatcgccgtggacggcgctatggaggcacggttcgccttgctgtgaaaagtttgttctcgccttagctgccgcgacctggtggaggaattctgcatgcttcgcgtctttcccctctcccaatcatggcaggttacagttgatccgagcgaagaggttgatggcttgcctaagctggtcctccttgagggaatgaacagtaagactgctcttttcgctatacactcccgtgtttttactattttgcctcgtttgactttcaacatgactccccctccttgcctttacagtgctaaccctcgaccaagctgaggccgaagcccgcaagatgatcggcgatgtgtcggtcgtcgagtacagccagttgctgacacggcaggcagttggtcgagcgaactaggtttacaatggcgagttgcctcctcgggcgaatccccacaagaccaatgacgaagcaggaccttcgcggaagcacacgcgcggtcaggtaaagcttgcccctaggaagcatagggctcctgcttcgtcggactctgatgctgatgacgaggaggatgctgaaggacgtgacggcgaagaggaagggggggaagaagaggaggtggagaccgtggttgaaaaggcca

SEQ ID NO: 3729 - DNA, 1197 bp, Oryza sativa
tcgctccgggggtttggcggagaggcagttcaagttcttggccaagcacttttgctgatagctttcggctcgggagaaaacagacgcgaagagcaagtactgttcgatgtcgtcgacatcccgtacaactacaatgccatcctcggccgtgcgaccctgaaccagttcgaagccatttcccaccacaactatctcaagctcaagatacccggcccagcgggagtgatagtggtcaaggggcttcagccttcggccacgtcaaaaggcgatctggccataatcaacagggctgtgcacaatgtcgaagccgaattgcacagccggccgaaacacgcgccaaaacccacccctcacagcaagatagtaaaagtgcagattgacgatgccgaccccgcaaagctcatatcgctgggggacggcatgggcgaacaagaagctgagggcatcctagcggtgctcaagaagaacattgatatcttcgcctggagccccgacgaagtgggggttgtttcaacagacctcatcatgcatcaactggcaatcaagccggatgccaagccaagaaagcagaagttgtgtaagatgtccgccgatcgtcaagaggcggcgaaagccgaagtccaaaaactactcagggctggggtcattcaagagattgaccacccagagtggctggcgaatccagtactggtgcggaagtcaaacggcaaatggcgcatgtgtgtagatttcacggacctgaacaaagcatgtccgaaagacgatttccctttgccgcggattgatcagctcgtggattcaacagctggctacgaactcatgagtttcctggacgcatattccagctatcaccagatccatatgaacccgcccgacatcccgaaaacagcattcatcaccctgttgggcattttctgtcacctcaggatgcctttcggcctgaggaacgccggagcaaccttcgccagactagtgtacaaggtcctttacaaccagttcgggcgaaatgtggaagcttacattgacgacattgttgtaaaaagccgtaaggctttcgatcatgcgtccgacctgtagagaccttcgacaacttgcgcgcagcgggcataaaactgaatcctgagaagtgtgtcttcggcattcgcgcgggcaagattgctggagattcctggtttccgaaagaggcatcgaagcgaa

SEQ ID NO: 3730 - DNA, 1967 bp, Oryza sativa
aagcactgcaaggggcgaaggcaagatacatcgaaatggaaaagctcgcttacgccctggtgaaggcttcgggcaagctcaagcactacttccaggcccacaaagtaatagtgccttcacagtaccccttgggcgaaatactccgaggcaaggaaatctcaggcaggcttagcaaatgggcggcagagctatccccgttcgacttgcattttgttgcacgcactgctgttaagtctcaagtgctaactgacttcgtagccgaatggacaccagtattcgcctctgaacccgagcccgtcgaacaaccctgggtaatgtgctccgacggttcgtggtcgcacaagggggcaggcattgcggcaatactcatttcgccgaatcgcatcccagtttggtacgccgcaaggctgcagtttaacacaaccaacaacgcagcagaatacgaagccattcttctaggcctaagaaaggcgaaagcactgggagttcagcgcttgctaatccgaaccgattctaagttggtggcaggccatgttgatagatcctttgaggcaaaagaagaaggaatgaaaaaaatatttagaggctgtccgaaccatggaaaagtacttcaccggcataactgttgaacacttgcctaggggccagaacgaggaagcaaacgccttggcgaaatctgctgcttgtggcggaccgcatttgcctggcatatttttcgaagtactgcacacaccaagtgtgcctgtggacagtttgacggtcttggcaatcgaccaagtgaagttgggagaagacccaaatgactcgcgaaccccgtttgttaaatatcttgaaactggttggcttccggacgacgaagcagaagcaaagcgcttgcaaatcagagccacgaggtataagttggggggaagacgtacccgaaccgccaggctttttatagcagagcacccctcatcgaactcattcagttcggtgaacaagcttagggcactggcaggcaatacaagattgcttaccccctccacaaaaggaaggaggtccgcctgtgtctcgaagtcgccaggggcgaagcggggtaccgcgagcgagtattccgaagcagatgtctcgacgaccgctctctttcccttcgcctcaatcagcggcgacgcaaccagctgacatagaggactgccgaatacttttgctgcggctgtcatgattctttccgcagaggccgaagccccagcggcagtactaccgcctgctccagcggcgccgagtggaggaacgggggcagccgaaagatccaagctgcggccagcgggcgaagtcggagtcccgtcagaggactcatcgccgctaaaaacacgagcgacatcaacgagtccttttttcttagccaccttcttgacaagacctcccttcgccgctttgcccgaagaaaacgcaaccagggccttcgccccgtctaagtatttttggcgaaggggggagctattcgactccaccccggtctcgttatggccaggactcggagtgggggtatagccgggagtcacagcgcggccctcaaccgcctcgcccttggccttttcaaccacggtctccacctcctcttcttcccccccttcctcttcgccgtcacgtccttcagcatcctcctcgtcatcagcatcagagtccgacgaagcaggagccctatgcttcctaggggcaagctttacctgaccgcgcgtgtgcttccgcgaaggtcctgcttcgtcattggtcttgtggggattcgcccgaggaggcaactcgccattgtaaacctagttcgctcgaccaactgcctgccgtgtcagcaactggctgtactcgacgaccgacacatcgccgatcatcttgcgggcttcggcctcagcttggtcgagggttagcactgtaaaggcaaggagggggagtcatgttgaaagtcaaacgaggcaaaatagtaaaaacacggg

SEQ ID NO: 3731 - DNA, 2065 bp, Oryza sativa
caaggcaagtcatgcttgtcacttgaacatgttgatcctatattgcaaatgctctattgttttctttcaaatactgcattgttttataatgtttctatggggtgtttacctattgtcatagccatgctagtgttgtaccatgtctctttgtcagcttggggttataacatgactagagattggactagggattgcttagccatgcttagttcaactagtgcacaatggggaaaatcttattaatgtttagactgttggtcctaatggcattgttggattagtgccaccgctttggtgttggttaattaaaataaatcacatggtgggctgtgggtgcatggttttgctggtcgcacccatggcagttaaggaccggttcgcgggatgccctggaagaacttatcgtacttaccacaagccagcgtgggcaacggctgggcttgtaacgtagctttcctctagccgacgcatccaggcaagggtgggcgtgatggagtttggatgggccctgcgacggcttctgcggcttccggattcacctaggcacgagaggggactgcccgctgccttgcgaggagtaggggtgaaacctgaggtgtggtgtgcttggttagagggggttatgcgaagggtcctgtcacggcctctttccggtatgtcgtggtggcatgtcggcgcacggaaacgtgtcgtggggctgtgtcttgtgggtacagttgtacacctctgattagagtaaaactattcgaatagccgtgcccgcggttatgggcggtcaaccagattcactgtgattagtcccatcttaataaatcaacccaatacactgtagtataggtgggttggttgggcctgttcaacgtggtgtagcgttgatcagtggagatctaatttcccttaattattcaacagttttactgttttgctcaacaaattgttttacaaccgcctttatgcaaatagccacaagtcattcttgagtccccttgcacgtctgcatcgttggtgtggcctgctgagtacggtggtggtactcagccttgctattattcccccttttcagaagtgtagtgcttctgagctgaagatgatgttggaagaccaaggctcagaccccagttgagttttgcctatggagtggagctgaagccccgctaggatcgccagatgtctcgagcacgcagctcaacaagatactagaatgtctaatactgcaattatcccatcgactgagctagtggtaattaagcatggctaagcatatagttctagctaggtcacataagtaacatacgctaggtgatttattacccatggttgacaaagaacagatatcaagtaaacatgacacaagcgagcaaataggtaatacccggatcccatgtaattagcaaaacatgcatatttatttgcaaacagtaaaacatttgtaaattgggatcaacatgctcaaggggaatgtgtgacttgccttgcttcttcaaacaatcttccgaactcttatccttgcgaccgcgatcttccgaaacgacgggaactacacgctggcacgcaaaacgaggaaaaactctaataaaaaccaaggaaacagtacataaaaactaaacaaacatgtagactcaattttagatgaattttgcaatttgaatggcccaattcggagttcgaatgaattagatatgaattttagaagttttgagccatttatatgaatttctagaattaaatacgatttatgacgcgattaataattattcttccaaaggaaaaggggatgctgacgtcatcatgggggagaggcggcgccggcaagcgggccccaccggtcagcgacacaagggcgccggtccaccgtggaccgggaccaccgaggcggtccaccaccggtccacgggaaccgacggcccggatcggcgcggctggggcacggcacggctcaggccgccccagccgagcgatggcgcgtggcagcgcggccatcggcgacgacggccggcgacggcacggggaggagaggagggatgctcaccaagggcggtgacggcgagactacaacggggaagcc

SEQ ID NO: 3732 - DNA, 3616 bp, Oryza sativa
gcgggttcataccccagggaatagctccacttcggttcaattcagcccttctataacaatagaaattcaaagatcaccatttctagccaacctcattcttctcgaatccaaagacctagatgtcattcttgggatggattggctgaccaagtttaagggagtcatcgattgttcgaatcgcacagtcaccttgaccaacgagaagggagaaacagtagtgtacaaatcaccagactcaccaaagcaagggatctctttgaatcagattgaggcggaaatcccagtggacaccgtggagaagaatttgaggaaattggaagatatacccatagtctgcgagtatccagaaatgttccccgaagaccttactaccatgccacccaagagagagattgaattccggattgacttggcaccgggaatcgctccaatttacaagagaccgtacagaatggcggccaacgaactagcagaggtcaagaagcaggttgatgagcagctgcagaaaggttacattcgaccaagtacttcaccttggggtgctccggtcatttttgtggagaaaaaggataagacgaaggggatgtgcgttgattaccgcgcactaaacgaggtcacaatcaagaacaaatatcctttgccgtgaatcgatgatttgtttgatcaactgaaaggagctaaagtgttttctaagatagatctgcgatcaggctaccaccagttgagaattcgggaagaggatattccaaagacggccttcaccactcggtacgggctatatgagtgcacggttatgtctttcggacttaccaatgcacccgcattcttcatgaatctgatgaacaaagtgttcatggaatttctggacaagtttgttgtggtattcatcgacgacatacttatctattcaaagtccgaagaagaacatgagcaacatctccgtctggtactcgagaagttgaaggagcaccagctatacgccaagttcacttctggttaacagaggtcaaatttctgggccatgtcattacagctcagggtgtggcagttgatccatcgaacgtagagtcagttaccaaatggaccccaccgaagaccgtgtcgcagatttgaagttttcttggacttgcaggttattaccgccgattcatcgaaaacttctccaggatcgcccgacccatgactcagctgcttaagaaagatgagaagtttaaatggacagctgagtgcgataagagttttgaggagctcaagaagaaattagtatccgcactagttttgattctgcccgaccaaatgaaacacttccaagtctattgcgatgcatgtcgtcacggacttggatgtgtcctaatgcaagaaggcagagtggttgcgtatgtctcgcggcagttgcgtccacacgaagggaattatccaactcatgacctggaattggcagcagtggttcatgctttgaagatctggaggcactatctgattggcaaccgctgcgaagtatatacggaccataagagtctgaaatacatcttcacccaaccggacctaaatctccgacaacgaagatggttggaactaatcaaagactatgacatcagcattcactaccacccgggtaaagccaatgtggtggcagacgcattaagcaggaaaagttactgcactgccctatgcatcgagggcatgtgtgaggaattgcggcaggagtttgagcatctcaacgtgggaattgttgaacacgggttcgtagccgctctggaggcacggcctacgctcgtggatcaagtcagagcagctcaagtaaatgattctgaaatagcagagctgaaaaagaacatgagagtcggaaaagcccgggatttccacgaagatgaacacggcataatctggttgggagaaagattgtgtgtacctgacgacaaggaactgaaggatctgatactcaccgaggctcatcagacccagtactccattcatccaggcagcaccaaaatgtatcaagacctcaaagaaaagttttggtgggtcagcatgacgagagaaatagctgaattcgtcgcactctgcgatgtttgccaacgagtgaaggcagagcaccaaagaccagcaggtttgctccaacctcttcaaatcccggaatggaaataggaggagattggaatggactttataacaggactgctccggacatcatcgggtcaggattcaatctgggtagtcgtggatcgactcactaaggttgctcacttcataccagtacataccacgtatacgggcaaaaggttggcggagctctacctctcgagaatcatgtgtctacatggagtacccaaaaagattgtatctgatcgagggagtcagttcacctcaaaattctggcagaagctgcaggaagaattggggacccgtttaaatttcagcacggcctatcacccgcaaactgatggtcagaccgagcgagtcaatcaaatctgggaagatatgttgagagcttgcgctcttgattttggtggagcttgggacaaaaacttgccatatgcggaattctcgtacaacaacaactaccaggccagtctacagatggcaccgtttgaagctttatacggccggaagtgccacacacctctcttctgggatcagacaggcgagcgtcaactattcgggacagaggtattagcggaagcagaagagaaagtcagaatcatcagggaaaggttgaggattgcccagtctcgacagaagagctacgcggataacccccgaagggagctcacttttgaggcaggagattacgtgtatcttcatgtcactccactcgagtttcgtcgccggaattcgcatcccctcgcgctccggtgagttcaacccctaccgccaccttcggctatgaatgccggtcgccgtggttcatctccctctctctaatctctctctcttccttccttagggcaccccgaaacccgtccgccggttcccgtcgtcctcccgtggctagccgtcgccattcgccgtcgtcttcctccgcgccggccaccctcggtgaggtttcctctcccatccattcccctccctctccttcctagccgccgcttagtgccgccgccttcgcgtcgcctttgcgccgtcgcctccgccgccagatgccgtcgccggcaacgcgtttgcgcgcgcgcgccgtcatcatcgccgcggccggtaggccggccttgagccaagccgagccgggtcgccgccgcccatccgatcgaccccgagggcgatctgggccgtcggtccggtggaccggcggtggaccacccgcgtggtcccggtccgcggtgaaccgccctcccccttgagtcgctgaccggtgggccccgcatgtcggcgccgcgcctcctcccccgtgctgacgtcagccctgggatttattgcgcaatgaatgatttaaggtttttcttttatagtaataaaacacagtgaatcttctaaaattcataactaattcatccgagctccgtttaagcccattcaagtctcagtaaatcaagaaaaatgtgtagaatccattaaaaatggttttgttccctgttgcagtagtcttatagcctttttgcaatgtttgccttgtatgtcg

SEQ ID NO: 3733 - DNA, 4114 bp, Oryza sativa
tgaggtgtgctgtgcttggttagagggggttatgtgaagggtcctgtcacggcctctttccggtatgtcgtggtggcatgtcggcgcacggaaacgtgtcgtggggctgtgtcttgtgggtacagttgtacacctctgatcagagtaaaactattcgaatagccgtgcccgcggttatgggcggtcaaccagattcaccgtgattagtctcaccctagtgtaatccttagaatctggatagtataggtggatggttgggcctgtcgcaacgtggtatagcgttggacagtggatgattaatattaattaattattacaactgtttaaatctttcaacttctgtttataaatgctcgctttatgcaaatgaaccactccagctctcctttggtaattccctgcatcatacccctattccggtatgacttgctgagtacagtgggtagtactcagtcttgctctatttttcccaaccccagagtacgagtatgtggcagatggaggtttctctgaggagtaggcttcgtccgtgccgtcgaggatgcctgtggagtggtgttcccactgcagttctagtcaagacttagctcctgttgtctttcgttttccgctgcatttatgtaagacttttatgatgtttgtaagacgtggatctgaatgtcaacattgtcgtttgtgtaccccggccggtcctggacggggattttaatgcacattctgcttggaattctattcgggaatttctgggcgtgacaagttggtatcagagccgaccttgaccataggacaagccaaatggaaaaacctaagagccctctgaatccttttcattgcatatgttctttgcaattggatttgttccgggaaaattgggatctgttcttgtggttcaaggggaaaaatcttggtcgctcgtttaagtgagatttgtcaaaacaagtcagtctagggttttagtaaaactattgagatttattcgtcagtcagttgggatttgatgggtgaaatgcattaggtcctagctcaggaacatgggttgcaaggtatttatgctcttactgttactattagtatgtatctaatttccccaatattttaccgttatgtaagtctgtcttatttattcgctctcatgcaaaatgatctatgcataaaatttcgctcttattcgattctcttatttgagtcctttattgctttatttaaatttggatttgagcatgcattgattctactcctttgtcttctctagatggccggccacccacccaaccaccgcggagaaggcatgattgactttgtggcagagttggcacgtatgacgctggtggtgggctaccccaacgcgccagagcacacgactgttccaccgctcagtggcgagcttcctcaccgtgttcgcctggaggtccacggctacgtgggtacctgcctagctaatatggtggttgaggcatccggaggcacagcagatcacgcctgtcaggaggcagcatacctgatgatggccagactacgggagcgccacaactacatcttccacgacacggcgtaccgatttcaccctcgtcgagctagcagtgatgatgtcagtactttccgtccgacagccagcgagaacgacactacctttggtcacatgtgtgctgtgatgaggggattggataggatgcactcggacttgcacaaggcgtccaaggccttgaatgatgggaagctcatgaggatcgtcgctctgaaggacgagatagcgcgcctgaagagggagaaggctcagttaaagggtcttcccgcgccagaaggagtccggatccgcactacgccccacaagacgacgactgcacccgtgcgcatccagcttgcgcccaggaacccacctccatcagcaactcccgcagcacctccagttctgcccgcagctccggtagttcctgcagctccagtaccagctccagctcccgttcacgtgtcagctcccgcgtccgctctctccttcgctccagcatcagccgccaggggtccagccagtggcaacggaggttggttgcctgctactcccagtggcagccacgatctcagcagcagtagctccagtggctcagagccgggcagcggcgagacttatctgccaggctccaggagtcgctcagagggacctggtgacgagcaggaggacgccctcgactccaccgaccgcaggagccattccgagcattaggctcgttttccattagtttatcgactgtctagcatttgtttgttagtttgtgtgtttaggttgcttgcttgtgggtcagtcgacggtcgatatcatgtgcctatgatatggctgtcttaataaggatttttgcttgctttttaagtgttttaattcagatcagaacaattgcagtttaaattcctatataataaagcttagttcttgagcctcttttttttttcttcttttccccgtctgcttttcctccagatggtctacaccaggaatggtagccgcgcaacaggcgagggcagcaacggcgaagagcgcactgagggtgtgcatcccaacagcaattccgacaatggtccgccaccacttcccgagaatccgacgctagcccaagtgatggcacatcagactcaaatgatggcagccatgatgcagcagatgcagcagcagcaccagcagatgcaccagcggatgctgcagcatgcggaacagcagcatcagcagtttggtccccctccccctcagtccaaattgccagagtttctacgtgtcaggccacctactttctccagcaccaccaaccctatggaggcgaatgactggctccatgccatagagaagaagctgaatctcctgcagtgcaatgatcaggagaaggttgctttcgccacacaccagcttcaaggtcctgcgtcagcttggtgggacaatcacatggccacccgcccgccaggcactgaagtcacttgggcagagttctgtcatagcttcaggaaggcgcaggtgccagatggggtcgtggcacaaaagaagagagaattccgagcactgcaccaaggcaacaggacggtgacggagtatctccatgagttcaatcacctcgcgcgatatgcaccggaggatgtccgtactgacgccgagaagcaggaaaaattcctagcaggtctggatgatgagctaaccaaccagttgatatctggagattacgccgatttcgaaaggctggtagacaagacaatccgtcaggaggatcaacgcaacaagatggacaggaagaggaaggccgctcagttcagggcacctcagggaagtcaccagaggccgcgcttcgctcccgagcagcagggtggacctaccaccatgatcgtccgccagtaccgcccgttcaaccctagcaactttccccagggcgcaagtggcagtcagaaccaccatggaggtcagcccaaccgcggtgcagctccgctcccaccaatggcaccggcacagtcaggcccgtccgcgcaagccaaggaggagactggagcaaaaccagggtcctgcttcaactgtggcgagcttggccacttcgctgacaaatgcccgaagcctaggcgtgccgggccaaggtttatccaggctcgtgtcaaccacgcatctgcgaaggaggcacaagcagcaccagaggttgtactgggtacgtttcctgttaactcaatccctgcaacagtactttttgattctggtgcaacgcattcgttcatttcaaagaagtttgtcgggatgcatgggttaataagagaggaacttagcacaccaatgcgggttcataccccagggaatagctccacttcggttcaattcagcccttctataacaatagaaattcaaagatcaccatttctagccaacctcattcttctcgaatccaaagacctagatgtcattcttgggatggattggctgaccaagtttaagggagtcatcgattgttcgaatcgcacagtcaccttgaccaacgagaagggagaaacagtagtgtacaaatcaccagactcaccaaagcaagggatctctttgaatcagattgaggcggaaatcccagtggacaccgtggagaagaatttgaggaaattggaagat

SEQ ID NO: 3734 - DNA, 558 bp, Oryza sativa
tttcaaaatcatgaaggagagaatgtataaaatcttctcaaatgccattgtcgtcagctactcacacaagctgccagttgtgccgtataatgcattcaatccgcctccgcaggtatgtatctgaaatcttcaacttatgaccaaaatagtatcttgtcttcatgttgagttaactaaccatggaggcatctcattcaggaatacgtattgatgaaatctgatcccccaattgctcagcgccgatctcctcgccagcacaccattcagggaagcggagggccgacaaacaggtcagacccacaacctcaaacctccaaaccagctggtcagacaggtcctcgtaagagaaagctggtgcttaatgacgacgagggcgatgacagcaacaaatctggggacaagggcacgcccaacaaactcccaaagcataccatgcccaggaaaaaactggctggccgtcaaatgccaaagattagaacatcttccaggtataaacttctcggtaccgtctccctttgatatgcttctctcatagaaattatactgaatatcgaaagg

SEQ ID NO: 3735 - DNA, 1021 bp, Oryza sativa
agttcaacctctaccgccgccttcggccatgaatgccggtcgccgtggttcatctccctccctctaatctctctcttctccttccttagggcaccccgaatcccgtccgcccgttgccgtcgtcctcccgtggcttgccgtcgccgttcgccgtcgtcttcctccgcgccgaccaccctcggtgaggattcctctcccatctattcccctccctctccttcctagccgccgcttagcgccgccgcattcacgtcgcctttgcgccgtcgcctccgccgccggttgccgtcgccggcaacgcgttcgcgcgcgcgccgtcgccgtcgccgtgaccgcttggccggccttgagccgagccgggtcgccgccgcccgtccgatcgaccccgagggcgatctgggccgtcggttccgtggaccggcggtggaccacccgcgtggtcccggtccacggagaaccgttccccccttgagtcgctgccgagtgggccccgcatgtcggcgccgcgcctcctcccccccatgctaacgtcagccctgggatttattgcgcaataaatgatttaaggtttttcttttatagtaataaacacagtgaatcttctaaaattcataactaattcatccgagctccgtttaagcccattcaagtctcagtaaatcaagaaaaatgtgttgaatccattaaaaatggttttattccctgtttcagtagtcttttagcctgtttgcaatgtttgctttgtatgtcgctagattccggttcctccgacgctccggtgttcttcgaaatagtcgccgaggttcctccagcagcagagcaagtcatgcttgtcacttgaacatgttgatcctatattgcaaatgctctattgttttctttcaaatattgtattgttttataatgtttctatggggtgtttacctattgtcatagccatgctattgttgtaccatgtccccttgtcagcttggggttataacatgactagagattggactagggattgcttagccatgct

SEQ ID NO: 3736 - DNA, 1190 bp, Oryza sativa
gaacgttgcaacgacgtaatgacagagattatagaggaacttaacgtgccagtggactttgaccatttagacatatacacatcccttaatgatgagcagcgtgcaggatttgatgaaatcattgatcatgtaactaataagaagagctaggtattttttatcgacggcccaggtggcactggcaaaacatttatgtacaaggcgcttcttgctagagtgcggtccgagggattaatagccattgcaactgcgacgtctggtatagcagcgtcgattttgcccggaggacgtaccacgtactcgagattcaaaatccctattaagattgctcacaacagcatgtgcaacttcatgaagcaaagtgtcaccgcggaattgcttcgcatggcgtccttagttatttgggatgaagctgcaatgacgaagcgtcaagccgtagagacacttgataggtctcttcaagacattatgtgttgttcattgccatttggaggaaaggttattgtttttggcggtgatttcagacaggtacttcccgtggttacacgtgggacaagggcccagataactgatgcacattgcagagatcgtatttatgggaaaatattaggaagatcagattgtcgcgaaacatgagggctcaatctgatccatggttttcggaatatctccttagaattggaaatggcactgaaaacactatcagagatgattatgttcgcttgcctgatgaaattgtgattgcttatggggatagcgaggattcagtacacgaattgattaatcatatgtttccctcgcttgatgatgaaaagaatgcaagctctgcatcttatatgagcacacgtgccattctatccactaaaaatgattatgtggacaagctgaatgcgaatatgattgacagatttctagggcaggccaaggtttatcacagctttgactctgttgatgatgaccttcacaacagttatcctctggactaccttaactctatcactccaaatggtctctcaccacacgagctaatagtaaaaatcaattgtcccgtgaatcttcttcgcaaccttgatccaaataatggattgtgcaacgggactagactaatggttagagcttttcaagataatgcaattgatgctgaaattgttggtggacaacatgccaacaaaagggtgttcatcccacgg

SEQ ID NO: 3737 - DNA, 6189 bp, Oryza sativa
ttgcaaaatagccctgagcaactaatgtctttaaatgctgtttactgcaaccctaaccctttatagtataactcctttgtactcccttgcatttattctgcacttgtgggtgtgtcttgttgagtacggtggttgtactcagtcttgctcaatttttcccaaacccagaagaggagttcctggaggatgaaggcttcggtgtctagctcgtgcctgccgtcaagtgcctgtggtcgtcgccctagtcttccgttgtttctcgtttgtctttgtgtgtgctgggccttcgcttcccatgtaataaattaactatttacgcttccgcttgttaaactctgaattgtatcaacttttggtgtaccttgcctcctgggacaaggattaatgcacgcacgtaaggaacgcccgttgggttatttccggtcgtgacagcccgctgctaacagcttggtcaattcctccttgatcgcgtccttcctgtcttgtgcaaagcggtggagtcgttgtttgatgggtttagcgtcttccttaacatgcaaagagtgctcaatcacctctctaggaataccaggcatatcggatggtttccacgcaaatatatctttattattttgaagaaaggcggtgagcgcgctttcctatttacaatctaacttggcgcctattacagcagttttagtaggatcagaaggatctaggggaattttcttggtcttggcttcactttctccactctttgagatcttggtcgtaggcacttctccttcgcttgccgtggttgcagccagtcggatgtcttctcgggcgatcgcgatctcgcgggtttaggccatctcgcagctttccttgtcgcatgtgacggcttgtttgatgtcgctccgcagggatatgactcctcgagggctaggcatcttcatcatcatgtaggtgtagtgtgggacggccataaacatgactaacgccgggcgtccgagtatggcgtgatacgctgtctcgaaatcagcaacttcgaagtagacgttctctgtgcggaagttctcccgagcaccaaaggtgatcggaagagtgatctggccgagtggtgttgcagatagccctgggatgactccatggaagggcgcattactcggcttcaactcggtgcgagggatctgcatgtcgtccagggtcttggcgaagaggatattgagtgcgctgccgccatcgatgagcgatctgcgaagcttgacgttgcgaaccactgggtctagtaccagggggtaccgccctgggtggaccactcggtctgggagatccgagcggtcaaacttgattgttgtctccgaccatcgaagatattagggcgtatcgggttgaacagcgttgatctcccgttcagtcagcttttgctttcttttagactcgtaagccagagggccaccaaagatgtggttgagttccttgcgatgatcttgaaaacctgtcggggcatcatcatcatcattcttctttttcgacgtgctttgttctccatcagacgtcttccgtgcattcttggcatattgctctgcaaactgcttgtagacgaagcaatctttggcggcatgattggagttgggatgatgcggacattgggaattcatgatcttgtcaaaagtgttgacgcgcgaacgttgtcgggaggagtgtgtggtagtcgcaacaagttcctcgggcttacgcttgtggtccttgtgattgttacttccaccccctcccgtagtcggcgcatctttctttggcttccaagtaggacccgactgcttggatgcgataatggcgtcttcggctttggcatacctgttggctttttcaaacatctgtttgactgtcttgggaggcttgcgcccgaacttgccgactagatcttcgtggcaaatccccttggtgaaagcggcgatgatgacgtcgtcggtaatgtcggagatcttattacgttgttcagagaagcgtcggatgtaatctcgaagggattctccagacttctgactgaggttgtagagatcaaactgtgtgccggggcgttcaaaggtgccctggaagttggcgataaagtggtcgcgaagttccgcccatgatccgatcgtgccacggggtaacccaggaagccaggaccgggcagaatccgctagggccacaggtaagtagtttgccatggccttactgtctcctcctgctgcgcgaattgcgagaccgtagacggtaagccaagactccggattagtggtgccatcatccttctcgattccagtcggcttgaagctggctggccaatccactcgacgcaggtcgttagtaaaggcagctattccatccacgtcgtcgtcgtagcgatctggtgaatggcggtgggcatggcctcgtgctgcacggcgctggttcatcgtatcgcgaagatcgatgggacgacgacgaggtggggagcgaggccattcaactcggcgctccctgtgtcgctcaggaggcgagtgaacagatcgctcgtcgtggcccctgctcctgtgattggatcctgcgccggcgatgctgagggttggctggtgataatcttgagatcggagatggggaacctggctgccagtcggcgtgcggacacttccggagttaaccgggactgaagcggcaatcatggtcttggtctggttcaagatgttgacgacgtgatcagcttgattgagtgcgtcttccttaaggagggtgtcgaggagggtgatcgccgcgacagcgttctgttgaggggtgcggaagaccgctgtcccctcaacgtcttgctgcccgatgagatctcgcgctcatcgccctgcgtccaaggctcgttgtcgtcggtcctcggcctccattgcagcccgttcgcgttcttgttgctcacgctgcagccgttcttgctcttgtgcttggcgctcctcttccagtcggcgttgctcggcctcctgctgtacgcgttgtgcttctgtttctcgggcttggtgttgttcttccgtctcgttgtcggccatgaagacaccgaagtagaaaggggtgtaattatcttcaaagctttcgtcgaagttgtcgaggtcgcgattgtcgtaggggtagccaaattcgtcgtactccacgacctctgttggtcgtgagtcgacgccaggagagctgaagtagccttccagttgatccgtcgaaaccgtgccgagtggctggagtatgacgtcgacttccctggagctaggcaggatcggtgttgaagctgaattctgcctagtccttcaggaaggagatgcccttgtagtgaggacggcagccaaattgtcggggagtttcatcaggattgacgggtaggccccatcatctcgatctggtggtgttggagtagatgggatctcgtccgagtggttggaagccgactcgatcttggccgagtttggaataccgaacggggctgagacctggtctctccctgactggtttaaatccaagtcaaggagagagatcttgccgaagtcgttggtgatgaagtcaaggctgccgaaccggaacgcctgcccaggagggaagacgaagtcgtcgatgccggagaccgaacccattgcactgattggcgaaaaacttgacgcaacccctacctggcgcgccaactgtcaaaacaagatttcggcaatactaaaagggggtggctattgtggggacaccatatttaggcttggtgccccgaaaatccactcgtgatcgtccaggatttcgatcacacacagattgatatactgaacaactttcgattgtttacacaaatttgtttatatagactaattatacaactgttaaagggtgaaaaaatacaaactaatacatccttatttgaaatacaagaaaattcaaagtgctaaactattaaactcctaaactcttcaactactaaaactacagctaataaagtccaaagaattcaaagaactccacaggcaaaagctcgagtgtagactagcctagacaaacttgtcgttgccgtagaatctcgcttccttctgatctccttgttagcacgtttccgctatatgtcaaattatgcaagggtgagtacttatgtactcggcaaaacatattataaataattaaaggtgaatagatatgaataaataaacaataataaagtaaaggagtaatgaaaaccataaatcatctttatcctcaacattttaattttaaaactacttatacttcaggaataggaatcaccctgatgacacaactccagaaccgagagtacggcacattcgaatgatttaattcacctctgctgagactgtccagttttacccacatgatgcccactgctagctgggctgagaacaatagagccgttcgaaggtcccacttactactagttactgcacgagtgggatattgatccgtcctagtagccgggcacttgttgggcctaagcaaggctacttggtcgctgctttcacgggttccaccgttatgaaccatgcccccaacctccttacgcatgcgttcaccccaatcctgctcctagtgagccaaccaacagtctttcatatagtgggacaatgtactaggctaagttcaattacttgatcgtgtggatggacgcaactatgtcatttccatggtataagggggtaattataatccggttaaaccacccaaaactttccaaactccccacaccatcttcataattcaacaacattcataaacacaatattcacaatctcaattcataaatacccattttaaccagattcctaagtttgtaaagaggtttgaataataaaccacataaaatgatctcgaatgtatctttcaataatatcatgcttaaaagcatttaacatctatccacgagatgttaaaagagcaaaaatcatgcatcaaatttaaatatgaagattatatcaaggtttctatatgatcaaaattttaattatgtcttaccttgcgcctcaagatttcccgtggcttcaacgtagccatctgggtccatgtcagttccttggattcgatagtcgaacttgctgtatggtctaacttacggatacgaaaagatagcaaataaagtctataagcaaattgctacaagaaacgataaagccaaggaataaataaaattggagcgaggcgagaggaaaaaggaatgggttcaaaataagttttaatttgaaaataaaagagaggtgatggtttctataggttggaaattgaataaaaacgaagaaaggataattttggataggtgggatttatttggtggatttggttttctagccggtgctagaatggagtagcacgacggttagatatttgaagtggttagccgatgctaaggttggtagcataacggctaaatatcggctcgtctaatcgatgctacaattaagcagcacagtgactagagagttgagaaaatttgtgcggagcggaacagtgttactctgcagccgtgagtgacgacagagcggctagggtcgcatatagctcaaggactagtgtgcggcgtgctgtggaggtcgagggagtagtgagcctacaacaactatacgtgttgaggcgtggggtgcgaggagcgacacttcgaccttaggattaggttatgccgggttttgcgaccaacgatttgacgacggggtttgagaccacacgaacgtctccatggaaggcgtaaagttccaacagcggttatttggtggctaagggatggttttaaaaataaaaagaattatcaagaaatttgaaataaataaataaataaataagtttaaaatagattaaagaaataaaatttaaaatggtattttaaaataaagaaaagggcatttaaagaaattaaaggataattaaattttaaaaaagtttttaaacgataaatttaaaattaaagggatataaagtaaatcaaataaatttaaaataatttttaaaggttaattaaaataatttaaaattagaaagtaaataaataaataaggaaaggttttttttaaataaagaattttaaataaaattttaaaaataagaaatttgatatcaaaacgaagagtttgaaattatatgaatttaggttaaagtcttactgggattggatttgtggttggaaagatatgggtgtctaaagattgaaattgaattaaaatcaaataaaagaaaaaggttactgtgcagggggcccacttg

SEQ ID NO: 3738 - DNA, 3558 bp, Oryza sativa
acgagtctaataacctaggctatgacccttacccaatcaaaataagcatataacatgccaagagaatgactcttaataaactagtcatctcgaatcaacccaaacagcttttgcaacctaataaagcttacaaaaatagtataacaccttcctgtcgggcacatttttatttgcgtcgtagtaattccaaagaattatctaaccgcgttaaaaaggattttaacaacatcgggtcacatcattgtgtgcacaaattgccaaagcaaaaagcgcctaagtccctagggatcataacgggccacgctggtaataatattgggctgaagtactgtacaggcccaggcccattagcactcccgataccctaacaaaacaccgaagtccaaacgacgcttcgtcttcctcgccgagactctcgccatttccccattcctcgctacagtacaaaaccgcgccgacgaagctagggttcatcaatccactccaatccatcctcagaaactccacgaaatttcaccgcgcgtccaccgcaccgattccccatccctctccagccacatctcggaccaaattagaccattcagctcacattcatggcggaagagagagaaagcttcgagagtcagtgggcgccctccggtgtgacggaggagaatctgaaagaaatggtggcgcacggtgtttttccggcgaaggaaatcatcgggtggcgaccagcgttcggcgaagtgttcccaacccctaatacacacgaagtcgtggtattttctcacttcttttgtggcagattttctcttccaacctcaagattcttccagggaattttgaacttctatgggattagcctgcatcatttgaatccaaagtccatagttcacatcgccaatttcattcatgcctgcgaagcttttctgggcattaggcctcatttcgctttgctctgccgcatcttctttctcaagccccaaccgaacaagagcaaaccatgcgttgttggggccgctggtttccaactcagaggaacactgagccaaaagtatttctccgtgcccttcaaaacctcaaacaaaggctggcacgcaaactggttttatgtccaaaaccctgaacccacactccccgagtactcctgtctccctccagtctatcaggatacttggaactcgctacctatgggaaatgaagccgctcaggcagtggaactgatggaccgcatgataaagctgaaagaacaaggtcttcaaggagaatagatcactcggcatttcattaagagccggttagctccaattaaggagagatctcgcacggcttttgaatttgacggcaagcatgatccaaatcgtgaagatccagattcccttgattttaaggttatgaaagaaagaatgtacaagatcttctccaacgctatcgtggttagctattcacacttgctgccagtggtgccgtacaacgcattcaatcctcctccaccagtacgtattcaaacacttcaaccttcctcaaaatgtgatcttgtcttcttgttaaatcagttgacaatggaagatattatgctcagcagtttgctttgatgaagtcggatcccccaatcgctcagcgccgatcacctcgccatcaaactggtcaggggagcgggggaccaaagatccgatctaaagcccaaccgaacacctctaatctagccggccagccggattcccgcaagaggaagttagtgctgagtgacgacgaaggcgatgatgctagaaagcctggagataaagaaacaatcggaaaattgccgaagcaagccaatccaaagaagaaaacatccagtcgtcctatgccgaaaatcagaaagtcttccaggtacaaatcatatagcgatcttccttgtattgacgctcacttatcatgaaaacaatgctgataatataactcaaacttgtaggaaaccatctgatatagacccttctgggaaagactctgatccgactaacatggagacgagttcctccaaagaaaccgggccaactgcaaaggatcatccgagaggcaatcagccggcaaccgacaatgtagaatccagcaaccaacctccgactggaaaccagtcggccgaagctgaagtcggagttaaccaggagcccccgattggaaaccagtaggacacagggccaagccaagagattcctgaggttgaaactcaggcaaacagccctcgcggacaggatgccagcaatggcccaagatctggatctcctacaaaggcacaagagtccactcgtcctcgtccggaaatcatcataggtaaacacttcgtctgaaaccatgttgatccaactgactttatttgattgttcgacctttatccatggatatattaggaccaatgattggtgatgaagaggagattctccgaatacgagcagctgaagactcgcgccctcccattctggtcaagtggtgggatgacgacatgcaacctcaaggaatcgtaataaaccggaaaaaagaggatgaagaggtatgcctacagaaaaaggcacttagccaggcgactcgcatcgtaaacgtaagttccttgatgcctgacctcaaccatcttgttcgccatttagctcgagcactaataaaactgttttgcagaggattcaccttaggaatgaagcaaaaaccgcaaccttagagaaattagttcctcatctcggaacccttgaagctatcagagatcaactgcacgaggcaaaagaacttgccaagaaaaccgagcatgatctaagggatcggatcgctgagctccaggagtctaattttgaactgactggctcatcaaaaggtacacacaaactctgtccgactaacttgtgctgtcatctttgtaacttcaattaaccggagtcaatgtagtgcaagccgccaagatatctcaactggagaagcagattcagactctgggaaatgacaaggcagaactggcaagatagagggactcagctttgaaggatgttgaaggtaccatcaatcgatactccaaaagccattatcttctatatgctgactcattaatgtgaatctgttgatgcagaccgtaagatcaagtcgcaggctcaattcgacgtcctagtcggcaaaatcaagaggctcgaaggggccagggacgaagttgctaacgctgctaccccactcgtccaagcgatgttcttcaataacaacggtccgagtacattcgatgcttctgaaatcttcgacaagctgagagttgctccggatacatatttcaagaacatcaaagaggtcgggagtatgggagcgagcctagcgttggcaatgaccaagtccctttacccaaaaatcgacattgatgccgttgatggctttgcagacgggacgagcgaagaagctgctcttgaccttatcaatgatgcgcagaaagccgccgacaagacagtggttgatgtagtcgagaggttccaggacaccgatctttgaccgactggtcctgataactccgatgatgaaaaaactgatactgattgatgtaatgtgataacaatgattttgatgatgatg

SEQ ID NO: 3739 - DNA, 3126 bp, Oryza sativa
atgtaattcttacacaaattgactgtaattttttattttagtcagctcatgtttttttggttgaatctgaaaggactgaagcaaaatcttgtttgtattatgactgcatacacaatattcagagtagtgcagtatagtgcaacattcagtgttttcagatctaacattttttctaatttcagatccaacattttttctaattgaaacattccaataattgaaaattgaaatttataagtctagtttcagtttttatgttttgatacagtgtttttcactgtaatttgaatttaattttgtaaaacagatcttgatttacctgttcttgattcccatgcattcactccactgatgccttccttcttttttccttctacaattcctctatgttcactcaaatcctgtttctttttggttgaaaccgaaacaatcaaaggaaattgtgtttttttcttttaaaccataatacaaacattcaaagtacattagaaatgaactacatagaaagtgcattgtaattttgaaactaacgaatcaaatttttgtttcttttttgtcttgagcattttgctttagcgagttgtgttctttattattgaattaatcttgttagtacttctacattttagcatgtcagtttgtatttagttagagtaggttgataatgcctcggattttcacttagacttgtagctgttgagatactagtttatttcattaatctggttttctagaacctttcgatttatgcttgcttatgtttgtatcagtccaaacatgtgtcctatatatgatcacaatattgtctttctttgtccagcatattactagatcaaatgccactgctgttgttttaaacataatagaagtgtattagataggatgtccagagttagttgttgaacatgctttgcccataatttagctggagactagaaatcacttctatttcacatgttatcaaaagtagttattttcataaaaaatattcacatctacctgaggactaggtaaagatattctaggcctaggaatagaatttttcctagtgttgttaatctaagtgtttagtttgtcttttaggccaatagtcatcattttgtctttaggccaatacagtatcttaggtgttgtttttgtcatgttatagtacctgaattagaattgaactacactgtctttgtttttgttgtatattcagggttcctgtgtgcattgtacaagttttgaacttttgtcacatttgtctatgctttttggttgaaactgaaatagtaaaatgtaaatgttgtttgtacttttaatccatagtacttcatgatatccgtatattgctttttttctccattgtagtgccaaattcagagtttgcagatacaaattcagagtttgcagatacaaattcagagtttgcgttatgtcttcagaaccactgaacaagaaaataagatcaaagcaatagattatttactcagatcccaaaccacactgaaacaaaattcagatccagccaatttttttgatatataacatttcaaagaacaactttttgtggggatgtttatttttgctgcccaatacgtgtctacttattttctctctaaactctgttttgttctaatttaccagaggaagtattttgcaagatcaaaactcaaagaccaacatgaagtaaaggaagatttcaaaagaaaatctacatgtgtagttggttacttgaagaaattcagaagaatcacaggtaccttccgatttgcgcttttcttgaaatttgattcccaatctttctgcttttgaatcttgtccagaagaatcttgttcttttatttcatctccaattttgagttccttttccttcatctccatctttttccccagtttcttctcttcaatcgatctgtgtttatctctctgagtttttgcctgttttgttcactggttacgtgtgtttgtcaccgatctacttgcattgcaagttttgtatgtcacgtgtttgccccttctttttgggctttatttgggcttgactttttttgagctcataatctgttttatatctcttcatcttttttttctgggccttaatttgggctttttaagttgggccaagattcgtttgtcaatgtctatgtatttagttttttagttgtcaaaattccgggctgttagatcaaaatctagtggttcaaaaattcaacacatttgagcccctgttttctgtcgacagaacagtagacagtccctttttttaagataatggaatgaaacattccgacctttgctcaagagttacagccaattattacaaagtttacacaaaatcaaactcacacaatgtgtatgttgacaaagtaacaaaacaaaaagtaaaagcaaactaataaaaccaagcaaggtaaagagctgcatgatcgtggactcaagtttacgacacgcatcttttattagcttgatatgatcatcatgcctttgtagttgagctcattccctgagctaatatgttgccctggaaagaacctgcaaataagattttgaaggtgatctattaaaaaccatttcatttctactaagccagagagcccaacaaacagcggaagctccaacaagaataagatccttgatcttattattaacacccacaagccaattcccaaacatatgagatatactatgtggagggtgtcgaaacaagatttcggcaatactaaaagggggtggctatcaagttagaaaagtggatgggtttgaagacaagggattttatacaggttcaggccttcttagttaagaagtaataccctattcttgtccggggatgattccgccgagtgtattattgatcgtatgatctgggagaaaatcgtgtccccagagggacccggacccctccatatatagggggaaggagtccatattacaaaatacagtttatatccctaacggaatatgtgattacagataaaatacaatcataaccgactaggatcccaggtatttccttgacatacaagtttaaaaacttacccgagtcctcttaaagatattctatctatatttggtacccttgacctaaccagactatacatgccgtgtagatattgggtatcataatcttcacagtagccc

SEQ ID NO: 3740 - DNA, 1995 bp, Oryza sativa
attcgagctcgttaccctatcatagtattgcactttacatgaaatatattttatgtacgatataaattgaattaaagttcatttttatagatcatataaatttttttttgctaacatgaaattttaaaaattattaaagacagatagaattgcaccgtagcgtttagcacgggcatattactagtaatattagttacttacctctttagtattattttgaacttttctcttcttcttccttggcaaatcaaattccatgtgtttaaatggacatgtgggaaatgtgtggtctgttctaccacaatgactacaatgatttgtctctttttcttcaatttgctcattaatagtcttgtttctttgtcttggccttccttttgaattttctatatcaggatcttccaaatattttcgtcattcattgtttgttcctccacatcaatattctcggaattttcattgacttctgcttttccattttgcaagatgttatcctcaacattgatattttgatgttcacactcttgaatcgttgaaatcattgatttcaatgtgctactaattttgtctgattcttccaacaagtattgatatgtttcaactgatttggaacctcttgatatattaatgttacattttttaatatattaatgttacattttttaaatactaaaattacatttttttctatgtaattcttatacaaattgactgtaaattgtatcgaaattattaaacatttcaaattgatgtttgtctttagacaatagtgataattttgaaagatagtattattgattattagaagcaaacatcaattttcttaacaattgttctcaattatattttttaagttctaaaatgacagggtttttttaatgtaatgatatttcaaattcaatgcaattttaattgaattttataagacagatcaaaatttacctattcttgattcctgtgtgttcactccactcatgctttccttcttttttttccgtaacttcactcatatcatgtttctcttttgttgcaactgaaacaatcaaaggaaattgtttatggacaatacatttaacttgaaaaaagaaattaaagtagtagtaatcacataaattttcatttacatgtttttagtactaaatttacagttttttttctatgtaattcttatacaaattgattgtaaattgtattgaaattattaaacagatcaatttagtacttctaaattcatttttgaatcatttcaatactaaaacaataccagaaattgtatttaatatagatagtaatgataattacaagtgaacagaaatttttgatcatttgattccagttacatgtttcaagttctcaaattacagtgcagattctatgtaattcttacacaaattgactgtaatttgtaattttagtcagttcatgtttttttggttgaatctgaaaggactgaagcaaaatcttgtttgtattatgactgcatagcacaatattcagagtagtgcagtatagtgcaacattcagtgttttcagatctaacattttttctaatttcagatccaacattttttctaattgaaacattccaataattgaaaattgaaatttataagtctagtttcagtttttatgttttgatacagtgtttttcactgtaatttgaatttaattttgtaaaacagatcttgatttacctgttcttgattcccatgcattcactccactgatgccttccttcttttttccttctacaattcctctatgttcactcaaatcctgtttctttttggttgaaaccgaaacaatcaaaggaaattgtgtttttttcttttaaaccataatacaaacattcaaagtacattagaaatgaactacatagaaagtgcattgtaattttgaaactaacgaatcaaatttttgtttcttttccgtcttgagcattttgctttagcgagaaaaaaaatttattattgaattaatcttgttagtacttct

SEQ ID NO: 3741 - DNA, 23756 bp, Oryza sativa
cacataaatgatctagcaatgcacagtttcacacacattcagacaacgatgaatctgcatattcagctagaaacccaaagggaaggaagagatgacagtgaccttgtgggcttggaagcagtggcgtagctttgttgatgtcataatcacagcatagagtagcttttggatctgtgggtatctagtttttgcgtcgtggagggcctcgctggtgtagtacactgggtattgtactctttccctctcaacgacaataaccgtactcacagattaaggtgtggcaatgatatacaggaataactcttcattaatttgtggagcaacgagtacaggggggtttgacaagtagcgcttgagcacgatgaacgtgttcttgtcttcttagctccacttgactatgtcctgcttcttgagcagggtgaagaaaggttgtcctcgttcacccatccttgcgatgaaacgactaagcgaagccatgcatcctgtcaaccgctggacctccttgagtcttgtgggtgacttcatgttctcgattaccttgatcttttcagggttggcctcgattcctcatcccgagactaggaagccgagtattttccctgacggtactcctaacgtgcacttctcctggttaagcttcatttgatatcgtcggaggctgtcgaacgtttccctaaggtcgttgattagcgaatcgctcgtcttggttttgacggcgatgtcatccacataggcctcgatgtttcgtacaagttgatcaccaagtgctctctggatcccgcgctgataggtatttcctgtgcttattaatccgaacggcaccttggcatagcagaatacaccgaagggcgtgatgaatgccatcttctcctcatcctcttttgccatgttgatctggtggtagccggagtaagcgtcaagtaaactcaagagctcacaaccggctgttgaatccactagttgatctattcgagggagagggaagtgatccttgggacacgccttattgaggttggtgaagtctgcacacattctccacttcccattggctttgcgtaccattactggattagcgagccacactagatggaagacttctttgatgaagccagctttgagaagtttgtcgagttcttctcgtatggcttgtttccgatcgggtgtgaatctctgttgtttttgcttaactagcttggcgtcgggtcgtaccatcagttgtgctcaattacctccctggggctcccggcatgtctgacatttgccaagtgatcacgtctgcattgtcgcggaggaaggtgatgagcgtgagttcctatttttcgtccagtgttgccccgatcttgacggtcttgtcggggttggagctggtcaacggtatgattttgatcgcgtcgtctagtttcggcatcttgttgggcttgctcattttcttgggttgctcagttgtggcgagcaggttaggattatgctcgaccatgtcgaggttccgcttatcgaactgtaccaccaacttttccctggatagtagttgtcccttttggtcctggcattttgagcacttgataggaatagtgagatgctgccatgaacttcgtgagtgcactcccaataatggcgttgtatgtactgtcgaactctgcgacatcaaagatgatatgctttgttcggaagttatgggtttgtccaaaagtggcaggtagtgtgatcttacccaacggcttcaatgatgattctggagtggttgtcagctcgctttgtggtatccccatggcgtctaaggtactggtgaaaagcaggttgatggaactgccgccgtcgatgagaacccgtgctaccttgatattccgaatagtgggctcgaccacgatcagatatctgccaggtgtggttgcaatttttgggtggtccgcctctgagagctcgatcttgtgttgggaccatttcatcttggtagccgccccctgtgatgaggagcatacttcgcgttctatcttcttgaattccctcttcgaggtgtatgatggaaaagcgctgaagatatgcatgatatggaggtcgaagtctgggaatgcaaagttggagttggggtggctgcttcagtagtcgcctcgacaacacgtactcgcttccccgtctcgattactagttgtcgcgcaagttccttcttgaagacatggcagtcctccaaggagtggttgtttgtcttgtgtatggggcaccattgttttcatgagtcgtctgtctgggagtttgggcgtgtgtttggaccatctcatcttggcaatagcccccacgacgtggagcagacttctcgctctatcttttcgtactccctctttgaggtgtacgatgtagaaccgccgaagatgttcgaggcatggaggtcgtattctgggaatgcggagtccaagtcgggagtggccgtctctacagccgtttcgacaactcgtactcgctaccctctctcgattgctaattgtcgcaccagctcctttttgaagacgtaataatcctccatggagtgattgttcgtcttgtgtatagggcaccattgttttcgtgagttgtcattctgggggtttgggcacatgggtgggtccgtttgcttggcagcatggacctctcccgaaggtttgcgcttcccactcttatgacttctcttcttgctcgactctggtgcgtctttgttggctggcttattctcttcccctaccttgctttttccttccttccatcttagggcgtcgtctgtgtgagcgcatctgtcgataattttgaacagcttatctcggacgcctgacttgaatgcatggataacaaaagcatcgatgatttcatgcactcattgaagcaccggatatagtccctcaatgattcaccttggttctgagttagagcatgtaaatagtcctcgatcgcgtggcgcttgtttgttacttggaaattggcgacaaattgctgccataagtcttcccatgagggaattgagtggggcgggagatggaccaaccatgattgagcagaacctatcaacgcagctggtaaataattcgctggtgcgttgttgtctgcgccagcagcgtacagaattgtggagtagacctgaaggaactcctctgggtctgtacttccgttatacttctcgatcgctcctggtcaaaacttttcgggccatcgtacgtctcgtagtgtggttctgaatgctctgcatcggccatctagagcaaagggtggcccgcatttctggtgtcgttgagttggtctgtctgatgaagaatatgacgtagatgaagacaagggatcacttgggtcgggggctcggctacccgatcagtggtcgtgtcgtcggtctcgtcccaacgcgggagattgagagttacgttcccatctgtcgtcgccatctcgcctctgatctcgaccatggtctccctgaactcgtccatcggctccctgatctcgccgattgtcaccgccaccgtcacaacaatcgttatctcggcgatcattgcgggcctgcggatctcgatgttcattggggcgtccttctcgatcgttgttccctcctcaacgtgaaggggagcggtgtcggtgtcgacggtagatggtgttccctccttgtcgagagggagaacgacgccgatgacagtcagtgtcattccgatttcgtcgttccctctgccggtcgtctacatgttcgcgaaggttgcgattctcacgaagtggcggagttggatatcgtgttgcccgtggtgactgagcacggtgaggacgctctccaatagggttttccgcttccgcgttcccattagctggttcaccatttcctcgtgatggatcttgaggtgaaggctcgattgttgtatctgcaaacgcgctattgagattggtcacagtctctcattgtcgtgttgcccacatatcgacgtcagggtttaggatggggtcaaaagggctttatctcaatatcacgtcgaggttctgcagttgttgagcaggcgtcctagctgttgcggacgtacttgtctcaccaatattgatcacgtttacatctcgtggcaaactcgacgaagaggactcttgatcttccaataggtgtagtacagatggctcgtcagggttgacactgacaaaacccacgaaccaatctgaagtcattgctacgtctcgttccttggcaacgcactgaagttgaacttgtggttgttggacataaggacacgtcgacttgagtattttaaggaagattttgcaactcgtgagatagtgagatcttgacttatggattgggcagtatgtgacacccgtcggtgaagtgcgttgaatcccacgctcccaacaggcgtagagttcggccttcgtgtggagtatcaccgggcaatcttgtacagtatgcttggatgtcttatgaacaggacaccaagatctgggtttctgggtagatatccttgtcggctctaggtttctgtgcagccacttgaggatttcttccaggtgttggggtcgtcgatattccgttctccacttgcgtgggaggaattgtcggcgagatgtcatttctcgaagtcgagattggcgtaacggtgtagactagagaggcaatagatccgacttaagtccacaccagcaatgtggaaactccttgattgacgccagtattggtactgttggtactgttgtcaggatggcttgaagtcatattggcagaaccttgagcaccaagtccccctacctagcacgccattatcaacgagtgatactcgtagaccggatgattagggtactggggtacgttgtgttggcaactttttgtgacaagttgacaagcatgattgcaacacctgaacaccttgcggtgatcctaaagtcgccaaccacctcaatctagcaaaagataaatcaagatgggttttgataactaaaccggctagcagagccgattctagataactacccgtctcgtgggcaaaacggaaggttttcaagacaaacctacaaaggggtgtcacactctcgcagcggtggcggacaatttacagcgcaaattaacaaagatggacaaactaagagaaaactaaaagtaatatgaaaaacgattcgattgattgattgtagattgattagttacaattgaaccggccatgtcccttatataggggttggtcttgccctctataagccctcctacatgtccaactcaggatataatccaaaggaaacccaaaacatgccttcccgagcaaggaaacttcgagacccgacgaaacagtccatgactcggactctgccggtcagaccggcccacacaccgccggtccgaacggccctcactcggcggtctgaccagcctatacacggcggtcagaccggccctcacataggaaaaccgacagactttcaaactttggcaattttccctattttactcctaggtgccaaatttgggtgtaaacacatgccccctgccttttttatgaacaacgtgaatctaaaagcacagaacatgttttttggtcttagggcgataatccaattaccgaccattgaacctcctaagcatcttgccaaacgctcgggaagtatttcgtcaagtatttcccattaattgctcgctgaaaacgctccccttgaagtgtctccaaaaaatatgcgttccctcaaacaatgccgcatactcaataaggaccttcccaactaggagaccacttactgaacttcctggatcgagtacccaaaggcaaaattgtcttccaaaccaagtctccaacttgaaacaactttgctttcacccttttgttgtacgccttggccaccctcttcttctctggtgtatgtagtccattatattgtttaagttgattaagtaagcaacctagtataattacacactcagcactgaactacaacaatgttgggaatgcaaccatacctacacacaagcaagcaacaaacgttctaccctactaactattcttcaaagtcactttggtggtttaggttctatggtaggatccaaacttcatcccattatgaaagctctgcacttcagttcgaccgtcatcttcttattccttgattcacttgacttggcctccataagtaaaccacattgacgtcttcgggtttctccaataagtttaacaactactcaagttgaaagagggaggcgagaggatgataaaatgatttgcagagaattctggagaaagaagaaaggaaatttttcacaaatcatgttttcggaaaatttgtccttaaagtttgaccatttggcttatcctacagtccagatggctctgataccaacttgtcacgcccggaaattcacaagtaatttccaaacttatttgtgcataaaatcctcatccaggaatcagccgaggtacacaaactggtaatttaatatacaaatccatcataataataacattacatacttacaaaagaaaagaaaaacaagagcagcagaataacggtctagcgaagctctggctctactcccacaggtagctcaactggggtataagccaaacgtcttctccttctggatccttcttcttcaactgaggtttgattgattattgtaaggtgagtacatggaatactccgcaagccacacaacaaatatgcaagtgcacaaggataccaaaggatggtataatatagactcgtttgcaaaagcagcatttagcaaacatttaagaattgtaatacaatagagtaattaatcatcaatattaatcaacactgaacagcacatccatgctgcacaggcccaaccaaacctgaacaaccaaccccggtcgtacagatcaaacctccaaaccagaaattagccattccaaaccaggagccaaattaattatcacattattatcattaatgagcagtgtgggactaatcacgaaaaacattgctcaccccgcccataaccacaggaacggctattcgaatagttttactatagccagagatgtacatatttacccacaggacacaactccacaaaatgtcaccatatcattatgtgcccatgctgaacatgtcaccatttatgtagttgtgacaagacccctcgcataactcaactcaaagtagtgcaccttttctagatcataatcaccccctgaataaccagaggcatcacgcacttctcgccgcttcacagtctggcgcaccacaatgagccttgctacacaaagtgtccagccattgcccaagctggcttgtggttagtacagttaatgtctcacaacagtagctcgcgaatcgttccttaattgtcatgagcacgaccatcaaaactatgtgctcacaacctaccattaatcaaattttagttggcaagtaattaataaccaatcacgattgaccatcgtgagctaccattaaatatccattattaagtaacagtgaaacattaatcatcccaatagtgtgctagtgtttctaagcatggctaagcatctattataagcatctagctgaaccaaaccaatatataaggttcacgctaatcaaattataacccataggaaaataaagtcatcttcggccataattaaatgggaaaggctcaccacccgatgacattcaaaaataatgcataagttgaaataaaacaatagctttaaacgggttcaatatgctcaaagggttatttgggatccgtgtgacttgccttatgaaaatcaatcaaacctcagttgaagaagttgtgaaggagaagacgtttggcttataccccagttgagctgcctatgggtatggagctaaagcttcgctagattttattttccgctgcagttttcttcgtggtgaggactaagtgcctcttatataagtatttattgctttagttattttgataaatccgtatattaaattgtcagtttgtgtacctcggccgattcctggacgagggttttaatgcacaaattagttcggaaattactagtgaatttctagacgtgacatgtggtctcctttgcagttttgttttgttgcaggaaattctgttttgtttccttttgcaattttgttttgctgcaggaaattcgattttattttttggaaacatgccgaataatctagtgcatgaaaacggaataaagtccgaataagttacgcacgacttatctagttcggttgcgcggagtggagatcgtgcaggtgcccctgatcaagcgtcctgatatctctatataaatcgagtcaccgcctccacgtggcacatgcaaaatcaatatagggttgcctcctcctctatattatgccctcgctcgtactctactccatcccgctcgccggcgtgcaccggcgatcgggagaacaggtctccggaaccttcgccttagacgtccttcaccgggaaaaggcggcaataaggattttagaaagcgctttgcacgactgcttcatattcgtccacaacggctggtcttcctcttcgctcgcgtgatgtgcactgtcgtcaacgcatggtaccacgagtccttgctgagaagctggttttccaaaaaccttcggtatgcattcaacatgtttcacatattcaatctgttcatggtttgctgtctagtttacatgtgtagatcgtatgatacgattatgctagtttacatctgcaatattgttggtatttcttagcgacattaatggaaatataattcccagcaatagcactagaaataatgctggtatattgcggttacagatatgatccgcaagcgcatggatataccattgtagcatttcacccggttgtagagggtgggaggagagggccaggaacgtaacagcagatggacgcggatgtcgaggacggtgcgaccagcagcgatggatggatgcgaagaacaggatcgagagaggaggggagcacaggagaagactttgatttgttgattgtgcccaaaaagttttaaatattttttcatcaatctgaatgccatgtcatttgccacgtaggctaaaaccatcagatctgaaactgggggggttaattcagcggttttgacagttggagggtgttgaatacccggttttttagtttgggggtgtagtttagacaaaagtaatagtttggggggtgtaaaatggacttatccctaagatttgcttaagttaaagttgtttcctctttctttgtcaaactttgcatcaacatggtatagtttacttgcttgcaatttaatttctacatggtcacaaatggagcatgagtttcatgattatttcaaagatgcaagcttgatggagcaaagaccgattgatcattcatcagtcatttgtgaaactatttcggttacacctatgcctaagaccagaattgttagtaatcctcttcatattagtcctattgattttgacaacaagaaagtagtgattcagtctagtcaaaccgaatctacgaaagggaaaagtgttattattggggattttcggcccgagacaatgaagatcaataatgtgaaggctgaagatcgtaaggttacaaaagatgagtcatctagttccaacaagaccaaaaagccgaagctcacttttgagatgtttatggctaagtacaaaaaaggattagctggtcaacgatttgataatcaaactagtgattcgaaaagaccaagatcatctcgtaggaagagatttggtcaaacaccaaagcaatcggagccatcaactataccaacttcatacaaacctctagttttaacaccgtgttatccatatccaatgtcactatacggttatccttttatgtattacatgccgtggatgcctcaaccatctatgatgtttcatcaagaatggaagcaatcacctaggtcagtaccaagtcattcatttaactctagtcaagaccatttcccacaaaagaatcggtccagtggatcaaaggtgaaaaaggtgaagaaggtgtgggtgagaaaataagccaaagctccggaggtcgttgctatcaagtaggagtctcaagatgttcaaagacctactggagatgcggtggaaaccatacaagcaaaggagatcggagccgacaccgtgattgtcaaaagtggaggtctgaccgagacatctcgccggtctgaccgccaacctgtggccggtctgaccgaccctactgactggtctgaccgacaacttgtagccggtctgaccaggcctagaggccgatctgaccggggggaattggagaagagtgggaaaattgagagtaacacaggagcttctacttcaaccaaatacatcaagaatcattgcttggttcctgaaaaacaaccacagccgaagtggataccttctggcttatctcgctctcaaatgaggaggctacagcgtcttcgagccataggtcaaaaagaaaagaaggccaaagatgtgaaggacaaaactgtgaaaatttagagcctcgaacaacacctaagcaagtgtgaagacctaaagaagtaaaagttaagagaccggtgatttcccagagtagtggtaagttcatgagagaagaatcatcggtcattagagaaaactctcctccacatgatgctatggatgttggtgcggtgttcatcttgccttcgaaatcgtgcaatcaagagagctgattttgctcgggggggcaagacattaatatgcttatgaagaaatcgagagagatgaacggcgatggatacaatgtcacatctttgagccgccgtttgttggatgctaaggcaaggtatgggtttattgtgttcatcattatattatatgcctatgccatgttagaacattgcttgctatctagcacatgtgtgtttttgcttatcaaattgatattatacatacatgttgcaaatgctagttctaagtagtggaattggtaagttggcatatgatttgtttaaagtctaatttggctcatgagtctttgatatttatttaaagccaaatcatatgtgtttttatggatcaccatataatatatataattcatatttattgcaccatgaaagttttgcttattagtaattcgtctaatgtcaatggtcaatgtgatgatttgttctagagttgttatgtttcgaacattggctttgttttaatattttgccaacatgctcaagccgattactaacatttgtagtttattagagttcatgtgtgagaggcatatgactttggtgattcgttattgatcatacttcaagtggctaagtgttttgataccttgatgattattgtttcaaaagccacttaaattggtattcatctagacatattagttgggtgttataattttctcatatgtctagaaagaaggaattttagtccaataatttgatacaccaagcatctggttaatatgtgaagaaaggagtatttttgatattagaaaagccagtgcttgattttaaatctttgggcaaaattggtgaagttccagattggggatggcctgaccgtcgcattatagccggcctaaccgcggatgaccggtggtctgaccgggtagacagggcggtctgaccggcattgcgtggccggtctgaccgatcccgggcagagagctggggggcatgttacaattggttcaaaggccaaattaattgtaaattcagacatttgtgcccaagagtcagaagaaaactagagaatccctttgatggaatatttgaagattctagttttagggttgatcaaaaattcggcggcaagcattcaaatacactttgcttaatggagagttatatcgccgaaatatagacgaagtactttttctaaagttgctatgggagtacttaaagggattcgtggaactcatcaatcggctcataagatgaattgattgcttaggagagcggggttctatcggccgaagatgattgatgattgtttcaagtactatagagtaaagcttgtcaacggatcggcaatgttcaattggcgcctaccgctatattgaatcctatcatcaaaccatggccgttccgaggatgggctttgcatttcattggtcaaatttatccttcgacatcaaaagggcatcggtccgtgctagttgcgatggattacttcaccaagtgggccgaagcgctcaagaacatgattcatatgaaggtaattgactttatcttgaagcatattgttcatagattcggtattccttaaactttgactacggatcgaggagcttcttttatgtccaaggaggtgaaatgttttgcagaatcttacgagattaagttgttgagttcttttccttactacgcttaggctaatggacaagccgagtcaagtaataaaacattgttaaaattagtcaaagagaagattgaagaacttcaaaagaagtggcatgaagtgttttcggaagtattttgggctcataggatatctaaatatggtgctaccaaagtcactcctttcgagttggtttatggacaaaaagccgttttgccgtttgaggtaaatcttggctctcttcggtatatcaagtaagacgatttgttggtcaaagattacaaaaccttaatgcgaagcaattttgaagacgtcatcgacaagcatttgaaaactttgaaagacatagagacacttcaaggacagcatttttctgcgagcaatcaatgggaaatacttgaagaaatacttcccgagtgtttggcaatatgcttaggaggttctatggccggtaatcgtattatcaccctaagacaaacatgttctatgcttttagattcacgatgttcataaaaaaggaaggggggcatttgtttacacccaaatttggcacctataggcgaaataggggaaaattgccaaagtttggaaagtgatgggtttccttcacaggaccggtcagaccgcaggtatgtgggcagtctgaccgcggcctgaactccggtctgaccgcaggtatttggccggtcaaaccgtcagggtccgagcccgagtctgtattcaacgggtctcgggtttccttgcttgggaaggcatgtttcgtgtttcctttggttctatcacgagttggacgtggagaagagtctgtagagggcaagaccaacccctatttaagagggacaaggccggttcaattgtaatcccccgaacacacaatatacttgaatcgttttctcttttatgtttacttttctgctatgttttctactttacactaattttagtccatctttatctatttgtgtcgtaaatcatccgccgccgctgcgagagtgcgacacctctttgtaggtttgtcctgaaaaccttccgttttgcccacgagacgggtagttatcctcatatcgatctaaatcggtctagagactgattttcatctctaaatcggctctgctaaccggtttagctgtttttctacaaaacccatcttgatttggccttttggctagatcgaggtggttggcgactccatatcaccgcaaggcgtttaggtgctgcgatcatgcttgtcgacttgtcacaaaaagttgccatcacgatttttggcgactccatattaccgcaaggcgtttagttgctgcgatcgtgcttatcaacttgtcacaaaaagttgccaacaatatgtagagcgagatatcaaaagcatgaaaatcttaaatcgagaaaaagaaacagtcgggctcggtctgctggatgtgctacggtatctgcatcttcatgcagaaagacaacatttagtatatcgtaagcagaaagacaattttgggctacaaaaccagaaagaaggaacaaaacatactaacaatgttcagttataacggccaattcaaaaggccagccatacgcagcaaactataacttcagagaaatgaaccaagctgctatttactgtatctgaagaaccaaagtggaaaatgcatggaaaagttggaagaatagtgtgctactattatggatgcacaccacttttgtataccagagaccgcacgaagcaccgggcatccaacattcagatttcagaccatgtggattctgtacttgacctaagaactcaatgttttcacattctcagctcactgcaagcgtaagtagacagctagagtttacaactaaatttgactgcatgcaaattcacttcggacaaatcaaaggacatccaccaaaaaaggatgtgttctgacacagaaaatttgagcacaaacatgcacatatccacacagaaattatcagctgcaatccaaaatcacaaggggaaaaaggcacttaaggcagcaaaaaggtgcaaataaactacgcatccatcattgctggctatctgcaagtgaattttgttcgaaaatgagttttgttcagttaataatactggactaacaagtaactatctctgcagtacagtatcatctacatcagaaacaatgaagtggaataaggtcaatcctactacatattaatatttctgccagctagtgctactaaattcagcactgcagatcattagcgctgcatcatgttacaactatcgatcataaagaaacagaacaatctgcattttccaattcccaagacatttgtgaacactgcaacttcagtaaaagaagcttgaattgaaatgcaaatttgagaaaaaacatgaagacagaaactaagggaacggtaagtcacctgcagatcaatttctccactgaattgagcaatcctgcttcagcttacaccagtaacaattttaacacgagaaaaccatccaaactcaacgaataaacacactaacacagtacatgctgatgaaggcatgaaagcttagcaacgatcacagactagcctgatcaccggcaacaatttcaacaaccaaaaacatgtgtcgtgcgcctcatgggagaatccaaaccggaggggagtagttcgacggaccttgctctgggaagcagcgctctacctccgctggtggcggtgctcccgaccatctcccgttgtcgctgcagggataccgccgttgggcggcatccttgtacacaaccatcgggtcgtggaagctccggtcgtccaggaagtagacgccctccatgccggggtacccatctgccgcttcgtacgatctggagcagcctcttccgacgaacagcattcggccgccaaggtcgggcagcttggtccagtagttgttgaacagctcgtcttctctctcgaacacccggaacgtcgtggtcggcaagcggccaggctcacgatctcctaacctgacgaccatgagcagcttcccccgggactccacgaggtagcgatcaaggaccggccgcccgtcgtcgtcgtcgtcgtcaccgcgccgctcgaagtagagcactgtcgtctgcatgtctccgagagggaatatcggttgacgaaacacacggatgttttcccctcgggtgaggaagaggaaggcgccagcgccatggccgctgtacaggaggtccaccacatccagttccagctcctcgtcaatccacctcgactcgatggactgcgagaacgcctcatcgcccatgcgccagaacgcgatgtgccgtgggttgaggggcctgcgtttgaagccgatgatgctggcgccgacgcatccctgatcagtcggctggctagagagggtggcggcgacgaaggcgacctcgaagtcaaatgtcaatcccggaagccggaaggaggggaaacggatcaggttggggaggttgagctgctggtgggtgatgaggttgaggaggacgtggttcgccgcctggtcgacggcctggaagatccaggcgccgttgtacgagccgaagcaccgcgcgcggagcgcggcgggcgggaggacgaaggggtgggggcggcagccgctggggacgcagtagaacgcgggcccgtcggcttccgggaggacaagccgcgggagcggcggaggcgggggccggagttgtagaagcgcgtcgcgccaggacctgcagaggccatccgcgtggtggcggtcgatctcgcacaggaggtggcggccgatcttgcggacgatgtcggggacgagctccgcccatggcggagactcgccgtcagccattggtggggcgagtagtagtggaggttccggagggatgggaggggatcgagtagtggaggtggtggcgatggcgaatggcacgcgacacgagagaggttgaagacgacgaggaggaagacgctgctgctagtagtatatatgttggatagttgcgtgctccagtttgcttcgtttcgaacaaattctggaagctgcggaggaagcggagcctgcttgcgttgcaagacttgatcgatggcaacttgcaggttgcaatttgaattcaaaactagttttgagaagcaccttaatttcgttctgtttaaaaggtattggaaaatttaagttccagagaactggcactctgcaaagtgcaaacctccacatgatctgggactgaatattgggtacagattaaattcagtggtgcagataaattggcattgtaacatttctttaagatggcgaattagcgttgtacggttgtaccaaggagtctatgagtaccggttagcaactacagcaatactgatgaaccaggacaatctgcagattaaaaaaaatccaattatctttcccccaaaaaatccaattttctgtattcctttgcagctgatcgatatgctcatctgcaaaagattactgaaatgtcaaataatgttgacgattatatcagactagcttagtagttcaattaccaataacacgagcggactttacattatatgcataaaaatttagatcattcagtgaaatgcctgacaccatctatcaggaatgcctaagaactgacaagcatattttcccaccgaattatccatttcagcaccaaaatgatgtaataccagcacaaccatttctgcatgaaacttcatttctggaacctgcagactaagggtgtgtttagttcacaccaaaattggaagtttggttgaaattggaacgatgtgacggaaaaattggaagtttgtgtgtataagaaagtttcgatgtgatggaaaagttggaagtttgaagaaaagtttggaactaaacttggcctaatttcagcggtgctgataattggcattataccttttagataatactgaattggcattggcatcgtactaggtataaaatggataatctgcagtctgcagactgcagatagcaaaaggtacaattatccattatcttatctgtattccacaccgttgagatggtctacaaatcttcagtgaagtatcaaagaactagtaactcttgtggacagaaaatgagttcatgttactcttatgaacaagatatgagttcaggttagtcagtcaatttgtttcatgtttgcagttctgctttgaccctctcatttcacagtgagttaatacctgagctaccagataccacaagcacactttacatccagcaatgaagcactgttcaattaaattttcacatggaattaccaatttcaggacaataatgatgtaagcccaacctaaccgtttctacatgcaacttcataggaataaaaatgaatagggtaccagaaaatagcaggtacagaaaacccaatgactgaatcacattcattttcagttcaaattaggaggattcctagattactacagctggcagtatgggaacaaaaacatttcaacaatctgcattgctagaatcttcaatctacatctacaggtgagatgttatcatgttaatactcttttttggtggcataacctagcttcacatgaatgatcttgcaatgcacagttgcacacacattcagacaacgaggaatctgcatattcagcttgaaacctaatcctgttgacgtttttttctcaggttttactcagagagctctgcacatggtaaatcaattaaaggaagataaacccattcagaattcttgcatcctctagcaagtcaaagtataataactccatcgatcaggaaattacatggactggccacaaaaatcaaagcataaccatgcggtacatgtctgcaaattgtccattgaaacacaaagcgctaagtagtaagctcatgaataatccaaatgcgaaagggtaccagaacaatagctcaagtatgatctaaaaaaaggagatggtaagtgcagagtaacacacacaaacaaaattcttggctacaagtgttcagttttaaaagcctatttacaaggtcaactagccgtatgcaacaagccaatacttcagagaaatgaaccaagcagctacttttcagaagaacaaaaaagggacagtgcatggacaagctggaaaaattgtgtgttactattatagaagctcacaggtttgtaaaatcgacataagaagcaccatgcatcccattaatgttcatggaagactttgtgagttttgcatttgagccaagaacctcaatgttctcgatttgagcacataaatgacttcaacggttcaaccaaggaaagtggactcaattaacatacagaaataatttgactgcatgcaaattaaaccagcttcaaataaaagcaaagaagtaaaaaggggtgtgttctgcgtcacaaaaggtgtccgcactgaatttatcaggaatcaaaaggtgtacaacaattgaagtgcaggtcgatcatagctggctttaggcaggtgatttttggtaaatgagtgcagtttcaggtttcagctagaataatttcaggattatctcaccagcgcaataccatcaaactctctatcagccactcgatcagcctcattgtgcacatgatttaggactaaatatgcagacaaatcaagttcagcagtgcagatcattacaactgtatcatgattaccaaggtataattatcaactggctgtcataaagaaacagaagaatccgtgcattgcaatatcgctacaacttaacaaagcttgaattgcaatgcaaatttgttaaaacgagtacagagaaacaaggtgaaaagtacttcttcatcttcagaatttcttcactgaattgaggaatgtttcatcagcttgcaccagcaagcaacaatctcaacacgagttcaccatcgatgatagaactcaacaagaagcttgaaacaaacaaacagcacggcattgaattgcagtgcaagtacagagaaactaagtgaatggtaattcatcatcttcagaatttcttcacccaattatgggatttttcgtcagcaaagctacaatttcagtatttcaacacgagatcaccatcgaactcagcaagaagctcgaatcaaacaagcaacacagcattgatgaaggcatcaaccacgcactgcactaactaactacttgatctgttgccaaaacatatcgctaacatgatctctaactaattaactacttcatctgttgccgaaacttatcacctcacttaggggagaatccaaaacggaggggaggttttcgacggaccttgctccggtaagcagtgcctgacctgcggtggtgatcccgaccatttcccgatgtcgctgcggtgatacttccttttgtcgtcattcttgaacacggtcgtccggtcgtagaagctccggtcatccaggaagtagactccctccatgccggggtacccatccgccgcttcgtaggatctggagcagcctctcccgacgaacagcatgcggccgccaaggtcggccagcttgatccaggagtgctcaactcgaaccacgccgtcgatgtcgttgatgcttttgactttctggtcttctcgctggaacacctggaacgccgaggtcggtgtcggcggcggcggcggcggctactgcgagcggccacggcgaggtcgagcagtacatgacttacgggtacccaacctgacgaccatgagcagctcgtctcgggactccacgaggtagcgagcaaggaccggccggccgccgccgccgtcgtcgccgcgcggcttgaagtagagctcgttcctgactcgcttcgccgtgcctgggggcgggaatatcggttgagggagctcacggatgtgttctccgttggtgaggaagaggaaggcgccagcgccatggcggctgtacaggaggtcctccaccacttccggttcctagttcatcgccggaatggacttgtcgccaatcttccagaacgcgatgtaccttgggtggtcggggaagctgtgcaagtcgatgatgccggcggcgacgcatcccggttcggttggctggcacgagagggtggcggcgacgataacaataaacttatccgcttccgctgtcgtcggccggatttggtatagccgctggtcagggaggctgaatctgaagcgcttggagttgacgttcttgttgatgttgtggaggccgtggcggctggattggctgatggagaggaagagccagccgccgtcgtaggagccgaagtagcggtggtgcgcgaagcgtggcatggggatggggatggggtgggtgcgccagttgctggggacgcagtggaacgcgtgctcgccggcgttcgcgacgacgagcagcgggagcgggggaggcggcggcccgacttgcagaaacgcctcgcgccaggagcggcagacgccttcgccgaagcgacggtcgatcttgcacaggaggcggctgggatcccgcggacgatgtggattgggaggtccgcccatggcggcggaggctcgccaccatcagccattggtgcagggtgaggaggacctggtggcgggaactcgtcagccattggagagacgggagtgggagcagtggttgtttggggatttggtggtggctaatggcggcacgagacacgagagtcgagaggttgaagacgacgaggaggaagacgctcgctgatggtggttagttacgtgctccggtttgattccttctggcttctggaaggcacggtgcacggaggaagcgagctgcttgtgtcgcaactcgcaagccaacttgcaattcaaattcaaaatcagcttcagacggattcgtatctatagattctagcacgaacaactcgaaatcgcaacctacacatgtctcattttaatttgtaaggaaaagctggttgcatatatcaggcccgtacagtcacaagcagtgtttacactttcgtttttcaaaaaaaaaaaaggattttctgtggtcaccaaatttttgggaatttagaaactcttttggacgaaattatttgataatttaacaaagtttgaatgaatttgaataaattttgactaaattcaaataaaaacaaaaagggggaaatttttggcgaaatgtgattgccgatggagtgagaaatttattatttatctatctatctatctattatctatctattatattattaagactagggatggcaattgtacccgtttgcccgtttacccgtgggtaaaaaccctattagggttgggtttgttctccattttatacccatgggtatcttattggttcaaaagctatacccgatgggtaaatgggcatgggtatgggtaatcactacccatgcccgctttgcccgtttacccgcgaaatctaacttacatgtaggctaggagcaaaatccactagaatacataagccacgttctttgttttctacggtttccttttatttcccttattatttctctcctcttactctatcgccaccagaggagagacacgacaccgagccggagaatatttgatgttttaagttcgattcgaacttagtagcttgtagactttttgttccactgcttttgttgtggcgggtaaacgggcacgcccgcgggcataaggcgccggcgggcaatgggcatgggcaaccatccttacccgtgatgtagtaatgggtatacccacgggcacaaataatctcacgggcatgggtatgggtaggcactacccgtgcccgtcgcgcccgattgccatccctaattaagacagctttgaaaggaggctccacgttcgctgtgggggctagaaattaccatgttaatcggagaaaaaagaaaaatctggaccgttagattatactgtgactagactttgatggcgtagattaactttgataatagaagtccaaatagaaaacaactaggtagtactagatcaatcggacaacattgatcatgtacactagaatacaagtccaaataggtggacgtactgctgcttctgattctttccttattctagacggataaagagttcaggggattaggattcaaacgcatggcatgcatatagattttggagctggtataattagaatttaaatgtgtttttttacctatggctgaaaaaatagtaaatacatgtgatggaagatggaagggattttttttctcatgttcatcaaaacatagcatgcaaatagaccagaaaacatgcattggtagagatacatactcccaacatccctctcactaaggtgtgttcaaaattatcattggtattcaaaactaaactataactttaaatttctcacatactacaaagtttgtagcaacaaattaaatcataatcatataaaattaaatttaaatgacaatccaatgaaactacttttaacaaataaaatttaatttataataaaatatttactggtcaaatatttaaagagttgaattttaaaatgcgtgagtatcttagtgagtgggacagagggaatacatactataaaaaggtaaatctatgcacgtgattttaaaaataaaattccaatcatgattaaaagaaggggcattgggtaggccgtaaagttgcaatgttgggatggttgacggaacttctaaaaagtaaaaaaggaatcacaacgataaggtttgatttcaaatggatatgaaaattaagaggggcagtgggcaggctgtactaaagtaccatggtgatgcttgatggaactcctaaaaacatatgaagggaatccgacaagacaatgaactctaaaatctatagggtctgttttcaaaggatccaagagaatgattaaagtcatggtaggctggacaagcaaataaaggatggcaaatgagtaagggatgatgattggtgggacttttagaaactataaaattgaaaacaccataatgataactttcgatctcttaaaatctaacgagatactatttaacatttctttttagaaaattatgtatgggtgctagccgcgcaattgcgcaatattaaaagaacacaatacgatattacttaaagttcgaaacaaaaaataaaataaattatggaattagaaaaagaaaataagacttcaactacaaatacaatttataaataagtaaaattggtgataaaaaataaagactaccgaatgaaaagaccatttaaaacacatgacaagattaattaagtaacagagtagagtgatggcgtttgatgggacatctaaaaactataaatagaacaccaaatataatcctaatgaggatttaaaggaaggacgacgggcaggtcgtgaagcaattggtcaaggcggttggcgggacttctagaaaagtaaaaaaataagccccaatgataatcatatttgatttttaaaatcttaatgactgttacgtcacaaaacgactctaaaatacatcctctaaattatgcctagaataattaaaatccgtgtgaaagcctccaaaaattaaaatgtgcaaagttaaaagtcaaataaggcttggaggatttttgtatatttcctaaaagcctaaaatgcgtaaataaattttagtggaattttcagagcacaaataataattattaagaaataaacaaagttaaaatggctttataaaaagaaaaaccctaaaggtcccctttccctccctccccc

SEQ ID NO: 3742 - DNA, 639 bp, Oryza sativa
ggttacgaacatacttcttcagaacgcccatgtacctctcgaaagaaaacatgttgtgtaggtacataggcccgagaatacggatctctttcacaaggtgacaaagcagatgcgtcattatattgaaaaatgaaggtggaaatatcaactcaaaactgacgagacattgcaccacttcattctgaagggcttctaatctatccggatcgatgaccttctgcgaaattgcgttcatgaatgcacatagctttgttattgttgcccggacattgtctggaaggataccccttattacaactggtagcagttgtgtcatcaacacgtgacagtcatgagactttaggtttgtgaacttcttctccttcgtgcttattattcgcttgatattcgtggagtatccagacggtacctttatgctctccaagcattcaaacatactttccttctctgccttgctaagagtgtagctggctggactcaagtaatggcttcctttctcctttggttccgggtgaaggtcgccgcgttgttccatatgcttcagatcattacgtgcttccagtgtatctttcgactttccgtatacacctaccaagccaagaaggtttacgcaaaggttcttagtgaggtgcatcacgt

SEQ ID NO: 3743 - DNA, 528 bp, Oryza sativa
gttctagctcaaacttcggatcttgatgaggcgctggaaagtttcggcaacaagcaaaaaaaaaccggggaaacccttttggggaaaaggggtttggggaaacccaacctggggagaagaagcggaaagatcgtaaggctctgtcgctaatccaacttcatctatctaatgatattttgcaagaagtgttgcaggaaaagactgctgcagaactttggctcaaactggaatcgatctgcatgtctaaagatctaaccagtaagatgcatatcaagatgaaattgttctcgcacaagttgcaggagagtggttctgtgttgaaccacatatcggtcttcaaggagatcgttgccgacctagtgtcgatggaggtacagtttgatgatgaagatttaggtcttttactgttatgctcactgcctagttcatatgaaaattttcgtgacaccatacttttaagccgtgatgaactaaccctagcggaagtttatgaggcgctccaaaacagggagaagatgaaaggtatgg

SEQ ID NO: 3744 - DNA, 1097 bp, Oryza sativa
tacagtacttcatgatggctatgcatgaagaggaagtacataatgatgccgattattattcaaggccccaagcaacctggtaacgacatcgacgtgtacctaagaccactggtcgaagatcttaaacagttgtggaagaaggaaggtgtccccgtgtgggacgaggacaaacaggaggagtttaatctacgagcgctgctgttcgtaaccatcaacgattggcctgcacttagcaacctatccggacagtccaacaaggggtacaaggcttgcactcactgtatggatgaaacagaaagtacgtatcttaagcactgtaggaaggttgtatacatgggtcatcgtcgattccttgcaccaaaccacccggtacggaagaaaggcaagcacttcgaacataaggccgaccaccgtacgaagcctaaacatcgcagcgggaaaatagtgtttgctatggttaaagatcttaaagtagtgttcggaaaggggcctggaagccagcatatagagagcgaagatggtcacgcggcgatgtggaaaaagaactctatattttgggagttaccatattgggaattcttggacgtacgccacgcaatcgacgtgatgcacctcactaagaacctttgcgtaaaccttcttggcttcctaggtgtatacggaaagtcgaaagatacactggaagcacgtaatgatctgaagcatatggaacaacgcggcgaccttcacccggaaccaaaggagaaaggaagccattacttgagtccagccagctacactcttagcaaggcagagaaggaaagtatgtttgaatgcttggagagcataaaggtaccgtctggatactccacgaatatcaagcgaataataagcacgaaggagaagaagttcacaaacctaaagtctcatgactgtcacgtgttgatgacacaactgctaccagttgtaataaggggtatccttccagacaatgtccgggcaacaataacaaagctatgtgcattcatgaacgcaatttcgcagaaggtcatcgatccggatagattagaagcccttcagaatgaagtggtgcaatgtctcgtcagttttgagttgat

SEQ ID NO: 3745 - DNA, 5467 bp, Oryza sativa
tttatgatatctattgttgttgtgttataaatgagtttattccaccatgcttgcaaaacaaaggtcacatcaaaacaatctcccctaatgggataaagccgtaaaagatagccagagaattaggatacttactcaatcaatcaacctgcacagatggcaagccgacgtcgggcaacaaccagcaatgacgaaactcagacacccgacttaaccactctggccagagttatggccacccaaactcaacttctgcaagccatcgcaaacaaccaaggcaaccgcggcggatcgagctttggagaatttatgaggaccaagccacccacattcgccacagcggaagaacctatggatgctgaagattggttaagggtcattgagaagaagctaactcttgttcgagtacgggaggctgataaagtgatctttgcggcaaaccaattgggaggaccagccggagactggtgggacacataaaaagaagctcgagaagaagatgctggagaaccaaactgggaagaatttaccacagccttccgtgacaactttgtgcctgccgcagtgatgcggatgaagaagaatgagttcaggagactacggcaagggaataccacagtacaagagtacctgaaaccgttcactcagctggcacgctacgcgactggagatcttgccgacgaagaggaaaagatcgacaaattcattgaaggcttgaatgacgagttgcgtgggcccatgattagacaagaccccgatagtttccagagtttaatcaataaggtcgttaggctggaaaacgaccggaaggtcgtggagcacaatcgtaaaaggaggcttgccatgaaccgcccgcctcagaccgcaccccagcgtcctaaagggacaacctcctcggcatggagaccaacagtggtgacaacgcctccagcaatttccacaggccggttaccattcagaaccgagctcctgcaccaaatcaggccgccactggaccagtaaggccaggaagctgtttcaactgtggggagtatgggcatttcgccaacaaatgcccccatccaaacaagacacctattcgcaccggagctaatgcaacgactattcacggaactgctacccctgctgctggacgaggtctatttaggactccacagactaacaggaccgctaccggatttggacgcggacaagtgaaccacgttcgagctaaagaggcctaggaggaccaaggcgtactgatgggtatgttttcactcaacttcactccagttaaagttctcttcgattcaggagcatcgcattcatttatatctctgaaagcaagtcaacaacacaaattaaccagagttaaactaaggcaaccaatgttagtacattcacctgggggtgaaatagccgtggacacagcttgcattgatgtacctattcgccttagggatgtggtgtttccctccaaccttatggttttgataccacagacccttgatgtcatattgggtatggattggttagcaaagcatagaggagtaattgactgtagacgtagagaagttaccctgaccacaccctggggatcggatatgagagcaaccatggatcaagatcctaggctaaccgaacgtgccggaggtatatttaccatgctacccctaaagggaatgcccgtagtgcagctatttcctgatgtgttcccagaagatttacctggaatgccaccagatcgtgacatagagttcattattgacctgatacccggaactgcccctatatccaagagaccatatcggatgctggtcaatgagttagaagaacataaaaagcaaattagggagttgcaagaaaagggatttgtacgccccagttcgtcaccttggggagccccagtgctattcgtcaagaagaaggatggtagcatgagaatgtgtgtggactaccgctcactgaacgaagtaactatcaaaaacaagtatccactaccacggattgatgatctttttgatcaactcaaaggagctaaggtgttctctaagattgaccttcgattaggataccaccaattgaaaattaggaccggggatatacccaaaaccgcgttctcaacacgctatggattatatgagttcaccgtaatgtcgtttggtttaaccaacgccccggcatactttatgaatcttatgaacaaagtgttcatggactacttggaaaaatttgtggtggtattcatcgatgatattctaatctactccaaagatgaggaagaacatgcggaacacttgcgattggtactcgagaaacttcggaagcataagttatatgcaaaattcagcaagtgtgagttctggttaaaagaagtcgcttttctgggtcacgtaatctcagccggtggagtagcagtggaccctacaaaagtggaggccgttacggaatggaaagcacccaagtcggtgaccgaaattcagagttttctaggcttggctggatactaccgaaggtttatcgaggggttctctaagatagcccgacccatgacacaactactcaagaaggaaaagaagtttgtgtggtcagaacagtgtcaggaaagctttgagcagctcaaagaaaagctgacctcggcgcctattttagttcttcccaacatcaggaaagactttgttatatattgtgatgcatcaaggcaaggactaggaggagtactgatgcaggacggaaaggttgtggcctatgcgtcacgacaattgcgacacatgaggaaaattaccctacctatgacctaaaactcgcagctgtggttcatgcgctaaagatttggaaacattatctgatcggaaaccattgcgatatctacactgaccacaagagtctgaagtatatcttcacccattcagatctcaacttgaggcaaaagcgatggttagaattaatcaaggactatgatctagaggtgcactatcacctaggcaaagcaaacattgtggcagatgctctgagtcgtaagagccattgcaatcatttgagaatggaagggatggtcccttagcttagggaggaaatggcccaactaaacctatatatagtatctcgtggacaggtaaacaccctggacattcaacctcttttgagaacccagatagaggaagcccagaaggacaacggagagatccaggaggtgaaggaacgcatggccactggtcatgtgaaagaattctcaatggatgagaagaaaacactgtggtataaaaagagaatctacgtacctgaacagggtggactgaggggattaattttaaaggaagctcatgaatcggcatattcattgcaccccggaagtacgaagatgtaccaagatctgaaagaaggatactggtggcccaacatgaagagagatgtgaaggaatacgtagcactctgtgacgtgtgccaaaaggtaaaggctgagcatcagcgaccggcaggcttgctgcaaccccttaggattcccgagtggaaatggaatgagataggtatggattttattgttggattgcccaagaccgcaacaggatatgattccatttaggtgatcgtggatcgactcaccaagatggcgaggttcatccctgttaagacaaattacagcagtgccaagctagccgagttatacatgaccaggatagtatgtcttcatggtgtacctaagaggattatatctgatcgaggcacatagtttacctcgcatttctgggagaaagtccatgaagccctaggaagttaccttgcgtttagcacagcttatcatccacagacagatggccagacggagagaaccaaccaggtcctggaggacatgctgagagcttgtgcgttggactttagcaaagacggggagagatgtttgccctacgccgaattctcctacaacaacagctttcaagcaagcctaaagatgtcacccaatgaggcattgtttggtcgacgatgtcgtaccccgctaatgtggtccgagactggagaacgggcggtatttggagctgacattattcaagaagccgaacaaaaggtttgcttgatccgtgaccgtttaaaagtagcacaatcacgacaaaagagttacaccgacacccgacgaagaaacctggaatttaaggaaggagattacgtttatctaaaggtttctccgataaggggaataaaaaggtttaaggtcaaaggaaaactggcaccaagatatgtgggaccattccagatcatcgccagacaaggagaagttgcataccagttacagctaccagaaaatatcgccgatgtgcacccagtctttcatgtgtctcagttaaagaagtgcttgcgagtgccggaagaacaagctacgttggaagaaattcatattagcaatgatctcacgtatccagaacacccagtccggatattggatgaagctgaaaagaggactagaaccaaagtgtggcatatgtacaaggtacaatggagtaatcacactgaggatgaagccacttgggaaagcgaagaatttttgaggacggaatacccgcatctgttcgagaactggtaagaaatctcgggacgagatttatctaagggaggtaggtttgtaacaccctgaaaattcgaccgacaaaaatcaaaactctaaaaatgcggattttcaaaaactttttaaataaattgcatcatgccgattttattcgattattttattggagtttgggttcggagtttataaatcgcgaataatggataattggttaggaataaaccctaaaaagtaaatggacaaactaaataattaaagtgcaatttaaaataagatttggtgaggatagaaatgagtaaaatattattacgaccatatttatatccatcaaatttaaaagcaatggaatgagaattaactctaattaagttcaagtaaattacaataataatatataaaacatggaataaattaatctagaataaatccatggattggaatgccacaaatattgagtatacttcatttatgcaaaatttgggaattaaagaatcaaatttaaataataaatgggccaaaatcgggttaattagaaaacggcactgttcattgcacctaaagtgttcgacgaggttccctagccctagcccctcctttgccgcgttgccctcgcgccccgcgcgccgcgcgccgctccgcctcccctctgacgacgctgtcgccatcaccgcgcctggccgcccctaaccccacgccgccgtcgccgtcgtttccgtcgcgtcaccgcaccgccgttccatcgccttgcgccgcgcaccgccgctaccgccgtgccgtcacgcgtcgctcgccgccatcccgtcgcgccgtcccatcgcgccgcgcgccgtcccgtcgccactgccgagccgtcgccgtcgtcgcctcgcgccccgtgccgcgccgctcccccgagccccgtgccgccgctgctaccgcgccgcgccgcccgtt

SEQ ID NO: 3746 - DNA, 594 bp, Oryza sativa
cagctgtacatggacatgagcgccaccggtagagagatgatcgaagcgaggatcagggacacggacttcttgcaaggagatgacattctctggatcaatttcaggggaatctacgaactataccagctggacgccctcgacgtctctattatgagttgctggattttgtaagtatatcgttcagttagatttcttactatacgtctcctttaattaattaggtccttgtatataagtagactatagaaaataatatactcccttttatcgttgtagaaaggagattcaaagggcccgacggcggagggttttcgatactggattcatcgaccctcggaaagtaaacgtcgcaatgctcgaccaatatccacaagaaacagaggacaatctcgtccatctcctgaaggcgcagcattacaagacgttcatactgttgccatacaacatagagttagtttaattttacagtcttcctacataccaaatttcattcccgtacgaacttgctaagtgtttcatatgtaatgcatcccacgcacattgcagattccactgggtgcttttactcttcgacctggaggcctgcaccgtcaa

SEQ ID NO: 3747 - DNA, 2690 bp, Oryza sativa
ttctccttttaatgcggctagctccttctccaaacgatccaccttgtcctccagcttgcaaatctttccgcgattccggtcttcacgatcttgagctgctatcacaattttagcgcgggtctcatccatggcccacagcatctcaaccaaatgccttgtggtagcatcattctcaatccctgcaggttcaaggtaactgccacggtcacttccctggggttgacgaggatggtagcggtactcggtgtcggccaaccgatcattgtagctttcgcggagctctcctatggcgatccttgccacctcctaacaagcatgattgtagcttccctctccagcctcgaacatcaccgatgggatatcttcacgattactgttcaaggtgactttgacacgacacttctcttcatcacgatcatgaggaatctgggcatacaaaggggcagtctcaaatcctatgaggaaggacatcgtacgcaactcctgaacaaatcaacatgctaagtttattccattgcagcaagattaaataaaacaatgtggtaacaacttttgttggtaaatgggccattagcacagaatagatgtacagtactaacaacaccggaataataaataaattttgaattagaacaattaaaaagatcatgaactgcatgtgccattaggttggtttaatttaaagagaaagagaggagaacagttctacttttccaatatttttagagggcttctaggggtaaccatttggcataacctagggtcaaggaggctctgataccaacttgtcacgcccggaatttctgtccaaaattccaaacgcttacatgtgtgtaaaccctcatccaagaatcagccgaggcacacaataacaaattgataatagagtacaattattactctaattaataagcgaataaaatgtcattacagaggtagatagttcctttcaatcaataaagttctaagcagcggaaaataaaggaaacagcgcagacgactccactccataggcagcttgaccagggctacgcctaatcatccacaccatcagcatcactgtaaactcctcctctgatgaatgattgtaaggtgagtatatgacatactcagcaagcctcgcagcaaatatgcaagtgcacaggataacaaaggatggcatagtatagtctcatttgcataaacagcatttaataaatatttcagaatttaataaaacagtagaatattaattaaacagtattaatccaacgctatacaacataccctgttgcataggcccaaccattctgaacaaccaatcccggctgcacagttctatctccaaaccaggaatatactattccaaaccaggagctatcaagttattaacagcatcatttaatatggtgagaagtgtgaaactaaacatgaaagacattgttagacccgcccataaccgcgggcacagctattcgaatagtttgaactctggccagaggtgtaccactgtacccacaagacacaacctcaacatcatgtcaaccatgcgttgcgatacttgacaagtacctgaatagagattgtaacaataccctctatataatacaattcacagcagtgcaccgttcccggatcataatcacccccttgtaaacaaggtatggactccccagtgactcccgtgggcttatctccaccacttcacagtctggtgctctactaagaaccatactatacagaaagtaaagccgttgcccacgctggcttgtggttggcacggtaaatgtttcacaaccgaaaatcgtgaaccggtccttaattttcatgagcacaaccatcaaaaccatatgtcacaacccaccattatcaggttttagttggcaaattaattaattaaccaatcatgattaaccatcatgaggtatcattaagccatcattaaataatagtgaagcacaagttatcccagtagtgtgctaatgttactaagcatggctaagaaattatatctaatatccagctgaacccatatataaagctcaactagtcaagttataataaccctaggtatcaaggaatagagtaatcaagaacaaaagggctataacaaggcaataggttaattccacccaatgacattcgaaaataaatgcagtagttgaatagaaacaatagctttaaacgggatcaacatgcttaaagggttgtttgggatctgtgtgacttgccttgctggccttgaaattcctcaaaatattctcctgcaaattcggactctccgggaacgttggaatctaaagagaaaagaacaaaatcaccaaaacagcacataaacaagcatgaacaatacatgtggatatttttaacatgtagatctcaattttagaaaaatttagagacttgaaccaactaaatccgagctaagatgaattagttatgaatttttaaagattaaatcgcattaaatcatttatatagattttaatggaattatgacgcaataatgaattattttttaaaaggaaaaggagattattgcgtcagcgggctcggctcacggtggaccgggtgcacagcggcggttcacggaaacgaatggccgagatcgatctatccaaaacggacggccaagatctaacggtctacgaccggtctacggcggacggcgtcgatgacgtcagcggtgatgtcatcaccgacgacggctc

SEQ ID NO: 3748 - DNA, 839 bp, Oryza sativa
aattgaagcacactccgggcttgctgccttgcttccttttggctagctgattctatgtcaaagctgcaacaggacgtggagcttggttgcggttgttgttgccagcattgttgttgaagaactgacgctgcggacgaacaacagactaagaacctccctctagcattgactgaggtcccatagcaagacgctgtctctgactattcccctgctgagccttgaagtgagcattcggcgtttcttctgctccatgcagttgtacttgtcctcctggcgaatagccttatccactaacttctggaaatcatgataatccccagtcattaatgggtaagaaagctcatcattcagaccttcgaagaacttctcctgacgctcttcatcagtgcgcacatcttctggagcacaacgggccagacgattgaattcatgcaagtattcggtgacagagcgagatccctgaatgagcgccctgaactccttcttcttgagagacaccactcccgatggtatgtgcgtcttccggaaagcagcggtgaactcaagccaagagataggttcagcagtagtcctgttgagacggaagtgatcccaccactcagaggcagggccatgcagctggtgtgaagcaaaagaaaccttctcttgatctgtgcactgaagcaggtccaacttcttctctatggcgtgcaggcaatcaccagcttcaacaggatgggtggtgctagagaaagtaggcggcctcacgcgaagaaattctgccagcttattcgggggaggtgcatggctggttccctggttctgctggttctggagttgctgcatcatcagattcataa

SEQ ID NO: 3749 - DNA, 757 bp, Oryza sativa
cttctgaccacttgtacttcacatctttctgaagcagtcgcgtcatgggcttggcaatcttggaaaaattctctatgaacctccggtaataacctgcgagacccagaaaactacaatctctgaaactgtcttcggttgtttccagttggttacggattccacattactaggatcaacggcaactcctccggctgagatgatgtgaccaaggaacttcacttcagacaaccaaaattcacatttgctaaatttggcatacaactgatgttctcgcagcttctctagtgcaagacgaagatgttcttcatgctcttcattggttcgggaatagatgagaatatcatcaataaagacgaccacgaacttgtctaggtattctataaacaccttgttcatcaagttcatgaagaaagcgggggcattggtaagtccaaaagacataacagtacattcaaacaacccatacttagtggtaaaagccgtcttaggtatatcctcctctttaatcctcaactgatgataccctgatcgaagatcgatcttggagaaaacggtggcacctttaagctgatcaaataaatcatcaattctgggcagcgggtacttattcttgatagtgacatcatttagtgcacgatagtccacacacatcctctgggtatgatctttcttttccacaaagatgactggagctccccatggagacgaactcggtctgatgtatcctttctgaagcaaatcatctacttgcctcttg

SEQ ID NO: 3750 - DNA, 550 bp, Oryza sativa
cggcatggatttcatcactggtctacccagaacatcatcgggccatcactctatttgggtgatagtcgacaaacttaccaaaatggctcatttcatcctggtgaggacaacatattctggaagccgtttggcggaattgtatatggcaaggattgtgtgtttgcatggtgttcctaagaaaatagtatccgatcgaagtagccagtttacttcaaagttttggaagaaactttaggaagagatgggttccaagttgaacttcagtaccgcttaccatccgcagacagacggacaaactgaaagggtaaatcagattttggaagacatgttgagagcttgtgctttagacttcggtggatgttgggataagaatctgctttacgcggaattctcgtacaacaacagttatcaagctagtcttcaaatggctccttatgaagcactgtatggtcggaagtgccgcactccgcttttgtgggatcaaatgggagaacgtcaggtttttgggactgatatcctaagggaagcataagagaaggtaaagatcatt

SEQ ID NO: 3751 - DNA, 750 bp, Oryza sativa
acaaagtcaaaagactagaaatatactaaaagacccgccgcttgatctctgtttgctctatccctatcatcctcttctacaaattctaacacttcaacaattgttgggaacatatctaccaaaattttgagagttttgtaaggagaactccaacgagtatctcatggcctttgaagacattgctcttggttcaacccttttccactttgaagtagcccacaacctaatgctttgctcacatgctcatcattgatgtctctaaccatgtcctgtctcttagctgaaccaccaaccacatttaacaaggtagaaatcatactcacaatagccacaactactaactgaagttggtgggcgaagcaatggacataataagctgaagtactctctcatgactagtgattgtagcccattatattcacctcgcatattactagccccatcatatccttggcctcttacttgactcaagcttagattaaaatctgccattagagcatcaatagaagccttgaggtatgaggccgttgtttccctcacatgaacaacagcaacaaacctttctttcacaattccacatttatcaacgtacctcaacaccacggccatttgctctttacaaaactatctattgactcatcaattagcaagcaaaacacatcatggccaagttcttccaaaatggaatgtaatatttctttggcaaagcagtcaacaatatccttttgaatctcaggagctatcataaga

SEQ ID NO: 3752 - DNA, 1364 bp, Oryza sativa
atcgatcggctgagttcgggcatctcatagtattcccaagcgaagcaatctctaaactcttttaagagctctatcagcttggttctaaactctggagacaaatttttgctaataaatgtcggccttggccgatcgcctggacctatgtctatttcttccaaatcatcggccgacataaaaccctgaccttgcttgtcatcgagatcatctactgtatccttagcatagacattcgaaccctccacgacgctctcaaagtaatagcttgggttctccatcttcgattggctgtatatcagaatcggacacttttagaacatctccatcccagacttttccagataaacaatcaaggccatccatctcccaaagggctaaatcggcactagcaacattaactgacctgtcggctggcacaatctctatcttgtcgccttgccattgaatcaagcattgatgcatagtcgaagggatgcaacagttggcgtgaatccaatcccttccaagcaacaagctgtacgaacccttcccatcgatgacaaaaaacgtggtaggaatagtcttgctgctgactgtcagctccacatttagaacactcttggtctctgatggattaccaccaaagtctttgagcaccatatttgttttgatgagatcctcggcattcctacccagctttctgaatgtggcataaggcatcaaattcaccgcggccccaccatcgaccatcatcttagacatcggcttcccattgacgtagccatttatatacaatggcttaagatgccgattctctgtcccctcgggtttctcgaatactgcatgttctggtgacaggaccaacttagccgattcctcttccaattcatcgacatcggcctgatcgatcccgaattcagctggcaatgtaaagaccatgttaattggtgccgctataacactcttcccttttgccaacctcttcacctcatcggctgcagcatcatcggctacaggaacctgattcttgacatgccactcctgtcttggttttggtttcctcagtcgatggttgatttcctcttcaacctcctgaaaacgctccctgctcctcaatctctggaccctccttttctgattctccgtgaaaataccagaaggacaccattgattcttcctgatcacctcatcctcttggccacgatcttgattcatcggacccaatctttgacgaacagggagtcttgcctgtctcagccgattatccctattacgtgatcggtttgagctctcgatgatatcactgcatccaaggcagttttcgatagatggcaacctcatcccttcattccagcagaatctgaagaactcgcaatcccaatgag

SEQ ID NO: 3753 - DNA, 2153 bp, Oryza sativa
tacaccatgaaaaacaactaagggcgacataacaatatcggccattgtacatcggcaaaccacaaccgattacaccatgaaaaacaactaagggcgatataacaatattggccattgtacatcggcaaaccacaaccgattacaccatgaaaaacaactaagggcgacataacaatatcggccattgtacatcggcaaatcacaaccgattacaccatgaaaaacaactaagggcgatataacaatattggccattgtatatcggcaaaccacaaccgattacaccatgaaaaacaactaagggcgacataacaatatcggccattgtacatcggcaaaccacaaccgattacaccatgaaaaacaactaagggcgatataacaatattggccattgtacatcggcaaaccacaaccgattacaccatgaaaaacaactaagggcgacataacaatgtcggccattgtacatcggcaaaccacaaccgattacaccatgaaaaacaactaaagacgatacaacagtatcggccatcttaaggtgatgtaaacacatcggcttgtatgcattcgcaatagtagccgatcattgcgttacccaaacacttgggtaatatttcttcaaatatttgccattgagcgctcgctcataaacttcaccgtcatgtccttgcaacatatatgctcccttagacacaaccttatgaatttggaacggtccttcccaattcggcgaccacttgccgaatttactatcacgagtaccaatcggcaaaatcagcttccatacaagttctccttccgaaaaatctttaggtaccactttcttattataatgccgagcaacacgttccttatccctagtaaccttcgcaagggctcgcaatcgtgactgaaccaaatcctccctttcgtcagccataagattgtaatactcattggctgttaaatcgttttgcaactccgtttgtcgagagccgattctaacttcccatggcaaaacagcctcatgaccataaacaagtttgtaagggggaacttgaatctatccatgataagccatcctataagcccataatgcttcggcaaatcgagtatgccattgctgaggataatcagaaattttctgctcgatcaacttaataaaactcttattagacgcctcggcttgcccattagcttgtgcataataaggtgaagaattcaacaacttgatacccactctatcagcaaactgaacaaactcatcggacacgaagattgaaccttgatctgtagtaatagtttgaggaagaccaaatcggtagattatgtgtttctgaacaaattgaatagcatccccagaatcaactttcttcaaaggaatcgcttttacccacttggtgaaataatcagttgccaccaatataaatttatgcccttcactcgatgttgggttaatcattccgatcatatcaattccccaacctttgaacggccacggattaataatatggttcatagctgacgccggtgctcgctgaattgctccgaacttctgacatctttgacatccctgcaaatatctaaaacaatcctctagcattgtcggccaaaagtaccctgcacgccgaagcaaccacttcatcttgtgagccgattgatgagtaccatagatcccttcgtgaacttcgccgattgcaaccttagcctgatcggcactcaagcacttaagtaataccccatcaatcgtccgataataaagctcatcattcaatagtgtatactttaatgccttatatcttaatttcctagaagccgattgagatggattacttaaatactgatgcacatcatacctccaatcatcggctgacactgctgcaatttcaactttaacatctttgatcatcggcttataccccgatgccccttgggccaaatcattagcttcaagatattgttctcgagatacatgcttcaaagtaaccagtcgaaaccctttcattagttccaggcacttctcattataaaccatcaatgtatcgttcttgcattcatattcccctgccaattggctgattactagcaaggaatcccccatgatttcaatggtatcggctacaacttccttgagtaattgcaaccccttgagcactgcttcatactcagcc

SEQ ID NO: 3754 - DNA, 776 bp, Oryza sativa
atcaattgctctctatttttttcatagatatcatgatagttttcggcaaagtaataaattatgttatagattaaagtggctaaggcatcagaaatgttaccggttggattcccattaccatctctatcgggcaatggccttccttgatcatcccttttaactgcgcaaagaatctcctgtctttgagtttcatttaaataattattccaccatccttttaattgaccagaaaacccaatgacaatcatattggcagcttttctttctttgtttccattagctatgcaggcattagcatacataatcatttgatgacataaagtaaagatttgatattcagtaaagccatctaagttccattctacaatttctttgccattgtagtaagtcatattttgaatctgaggaatttcctcaaactgtaggtctgcataagttggttgagggtaataattcctagttgtggaagtaagagtagaaggtttaaaaatcttgttgaccatatcatatttttcattatcagaaatctcattgatatttttatttacttttaaattatttagttttaaggctagctcactgactagttcttcagaaattgtgggtccaaaagccttttattttccaagtttgatgttaggatcaattgttgggacaaacataggactaacagactgagaactagaagactgagaattagagcgaatatttatctttacctcaggtcttcctgttttgtagccttccataaggattgtctctattcgatctgtttg

SEQ ID NO: 3755 - DNA, 954 bp, Oryza sativa
aatgaagaccagcatcccaagattataccatccaaagcatgctgaataaattgtagaaatatatcgatgtaattcaaatgttttacagatgatacccagtcaatctcaattcatttccaacttcctttagaatatttctattatcaagcaatgaaggttatttactcaaattacagaaagaagttatagaatatgttagtttcctacaacaaagactacgagagatgcacaacttgattgcctatgatcagttgactcttactttgaatgaactgtaggaaaggtgtgcagaagataaatgttcagacacaggttaatgtaaagaaagaggcagcccaacagggaaaaatcagatgccctatccaaactgaataaatcgaaacactgtccgagcagatcgaaaagacctaattccaagagaagaaaatcaatgttcacaaagctaatctatattatgcccccaaatgttagcatcggttgaattgagaatattcgaaataaagactaagtatagtaaaagtttaaaccggagagttacagtcttacagccccaatctaagccaaatgcaaaataacacatcagacaaacaaatctaggtaagatcaaaccaaacccccaaaaaaaaaaacaccagctattcctgccactctcttgctgtacacagccatcacggtaataaatcaaaataaatccccaaagcaaacccaccaaagcacgtctcctaacatccaaaaccggaacagaactccccaacacttcaatccaatccaatccaatccagtcgccacgaaacaatccaagcgcaaccaaagcagctacaaaaacttgaaaaacggcggcgaggtgagagaccttgggagaggaggcggctgaccgcctcgtcggggtccatgccgcagtcccgcagcgccgcgtagatctccgcgtcgggccggttcacgatctccttcagc

SEQ ID NO: 3756 - DNA, 3343 bp, Oryza sativa
  unsure (1)..(3343): unsure at all n locations
cgcgatgcgaggaggttcagtcggcggcaacagtggttgcagctatcgagaggagtgtgccattccggtgcagcgaccagcacaacgaggtgacatggcgcagccagtggtggcatgcggaggctgcccggcacggggcaccggtgtagtggtgcccacacgctggcggaggttcagatggcagtggagcatcggtgtgtcaacagtggataggcaggcggtggatggcgggtgaaaacccagcccgtccttggccgagccagcaacgatggcagtcgagcgtcactccctcctgagggcgttgtcatgctgtctcaccccctctagtgggtgaaagcgcagtcaaggttcttgagacctcgcggacagcggcggcgatgtttgttgtttctctctatcgataatatgggcccggggggtacctaggctaggaggaagagaagcctttcctccgcaacgtgcgcggtggacccagcccccctcggggggtcgtgcggtcggccgaagagcgaccgcccgtttcgcctcccgggggctcggngtaccttgtcgcgcccctcgggcccgaggggctaaaccgccccgaggccctcgctcgggcgccacgtggccgccacatgggggcttgagcggggaggagcgcaggttgccaggcgcatttatgggcagtgctccaaccgctccgtcgcatttaatgcaacgtggcaggacgtgcgccgcccactgatgggtgtgcgccaggcgaccggcttttgaccggtctgtgacccggcgatggatggatgggacaggcggcagagcacccacgtctcactccgtgtcacacggcgtgggggctggtatgccccgtcccatcgtgtgcaatgaaaggacgtgcaggtcaccgcctcccacgcgtgtgagcccatgaagtcgccaagaatttattagggaatgacgggggatgtcccccatgtcaaataaaggacttatgtgggggccacccacgggcggccgttcggatcgctgaccgcccatggcatgggacactttttaatgtaggccatgggggtccttctccccaactgggagggcagggaccctgcctgtggcatgccctttacctataaaaggatgacctcatgtcgcaagcatggggaggacggctggatgaaccgaatgctgggtataagctagtaaagccctaacttgcgctgacaggatccgaactctttgtaacctcaaaaagatcatcatacacacaggagtagggtattacgctccatagcggcccgaacctgtataatccccctctctcttttcctcacagttgacccttcaagcacaattcccaccgacatgggcacgagaacgcgctcttcagacttgcacccggtcccctggccgaactcacaaagggggggtctcacggcctcccgctagagagggtcacccctcgacactctccctggagacgctgtctaggtagcacccttgccggaaccacctaaacttttgttgcatgcttgctctagagtcacgtcgtcttgtatcggcgccctagtttatacaagttggacacatcggagggccttaggggggagcggttcattcttctctctcactccctctccctagatcccttagatgtggatagagtagtgctttgtgtcggttgtaggggttggtttctgggcgatcccagttgtagctcctttgttggtctagcggcggtcggtcacgcttagcggtggctggtccggtgctagccttctcttgggtttgcggttggcgctgtcggtgtgtgggtggtggtatctttttttttcctttcctggttatggcctactagggttgtgattttgtaattttttctactttatcaatttgaacttcgccctgtctcgtccgagtcgttaaaaaaaagaagaagagaggtattcatatttggttatgtaatgtttcgatcttatttgatatttttttatatataactattttccgatatatataagcctatgttaaacttattcttcatgctcacatactaaaaaccaacatttataaatcatgttttatacatacacaaagtaaccaacggtttagatattaagcacgccaaacggcgcgcgtattttctagtatgggttatagctcaggtgggtaagtcccgctatttggtttaatccttttgtttccgatatagcaggacaggtttggcctattgttgaatgttcctttatacatcgatgatgagtattgcagggaggaacatggcacaaattcgaagtgcagacatggcatgtgaccaaaaaggaggactgcatgggaaggaactgacaccggaaggagatttcttggttgccttcctgaggtttggttgttgtactttttactagttcattgatacttagattttctgttaatttagtcatgcatgtctaaataatagtactatttttttgttaggaggatgagcaatgcgacactttgatttgggtagatccagagtggcatccaaaagtacaaaaggcattcgagcagctttggcacttgctagaacgtaccaatccaggtcggaggcgctctgagtggacctgttatgttgaaaaaaaaacaaaggcagaagagggaatgaagctagagctggaaatggctcaccgtctttcagatatggaaatttcattcgagaagaagttgtccaaacagaaaactgatgacattagaaattggttcataagaacaatagatgtagttgtgttccttctcatgaaattatttgataatatgtactatgcttgccgttgttgattttctacatgtaaattagctatgttaaggcaacagacgtagtttgtcatctgatttgtagtaaaagaaatggggtctcaggccgttgattgtcatctcatttttctagctgtgcattgttcatttgggttgatgagtaccggatggatggttgcaagttcaggtgtactgagacaaattttccagaaaattattcatatggaaccatcacttcgacactattttgggaggctcactggaaatcagtatgttggaacttaaatctgacagtccgcaacctggcatactgccggtggaatattagctgattgcaacagcctgttgagcttggtaactgagaaattgcagacaccaatgtccttaaccagcccatctgtcacaattctctacatttcacaatacgcagctgggtctatatatcagacgaacttggaaagcttagcaatatgcaaacttagtgttatatcagtgcaggtcccattaaatagctttcagaaaagaatagaggttcaagccaagtgtcagtgagcagtactgtaccgtactgcagagg

SEQ ID NO: 3757 - DNA, 1451 bp, Oryza sativa
tggaccacatggttcaaacgtgtgttagccagcaagagggttcactgggatgaaattggaatcggccaagcacttgaccttactatagcaaactcagccaaggatgaacccctaatggcagctgcttcttacttctggtcaaacactactaatgccttcctgttcaatcaagggcctatgactccaaccctcatagatatcagtatgatcacaggtctggatgtcacctcatcagccaaccctatgagtttgaacacaaagaaccaatatgacttcaaaaccaaaagcgtaggaggttggtcaggctatgtggcagcatacatgggccagggttcggtcactcctcgagaacatgtggcctttctattaatgtggctagaaaaatttcttttctgtggatcaagttgcggccccacaaccaactggcaatttctggctgaagctctagaaacaaagagacaattccccttgggcaaaattctcctcggctatctataccatatgttgagcaatgcatcggctaagatagcagttggctcagtagttggagcaggtggaccctggtggctgctacaaacctggttaaacctgatagtcatgaaggttgtcaatcggccatccgtactagaagccgagttcccaagactagagccgattgtaggggatgatggagaagagcgtactcatcggagatgcacatcatacggagaatacgcttgtacaccaactgatgccggggcaaaactatcggctgaactgctcaaggattggttttgtagcttctatgaaggctttcaaaaagatgctagaatctggttcctttatgaagactctgcacaacttgagcacccagtggatttcagattcgaagacatcaaccatgaagtataccaatcatccagggaaatcttctcggctgcaatcagtccatgcatccttcctgttggcattcatcaaggaagaaacatccaagcttcctatgaattctatcatccaatgagctcagctagacaactcggaatgggccaactcccaatcggcttattctttgctgacaagatccaatgccgaggagggatttcatcaaccctaatgatcgattggctacttagccttcaaggaccccctctgggcagtattgacaacatagaactggcaacattcagaagcaaaagctttgacaggtggtggggtaaatggaaactgcatttattccatcaaccagcttcaatgtatatgacatacctctttccagatgttgtccctcaagtaagtcttcaactttgctcaactctagttaaataactgttcagccaattaatctcaactaatcgtccttttgatttgcagacaacagagtcttcccctcctcatcaaagcaacagtggcaaagacatccgatatgccccaggtttaattcctaacggaggtaggctatctcctccagttat

SEQ ID NO: 3758 - DNA, 989 bp, Oryza sativa
ctatagggcgaattcgagctcggtacccaattatattgtaacttgcatgtaactttataaaaatcttgtgataacatgctattttcacgaagcggaggtcatgataccaaaccctcttacttgtgtgtgcgttttgatttttgcttcttcacttgcacagatcttaaagcaaatctaatggtttcaaaatcacatgaaagttacatatcaattacgttgtaattacatgtaataagttataatgtaattacattactattgtactatatttacatttgacaaatttccaagagaaatgtatagatagtccctagtaaaaaaaaattacagtgtactccctccggttccatagttcttgatgttttggacaatgacacagtcttcaactatatgtttgactttgtttttatactataatatatacaataaataaatgtgtatgtctacttttttatatagtactttgaaagataaatctatatatgttattccagatcgtttagttcactaaacatttttaaagttactgatacttaaagttacaaaagtttaatcttaaccttgtccaaaacatcatgaattacggagggagtactaaagtaccagggctctatctagttattgaggccttgtttagatcaaaaaattatggccaaaaacatcacatcaaatgtttggacatatatatgcgtggggcactaaatgtgggaaaaacaaaccaattgcacagtttgtatgtaaattgcgagacgaatcttttgagcctaattacaccatgatttgacaatgtgatgctacagtaaatatttgttaatgacggattaattaggcttaataaatttgtttagcagtttacaggcggaatctgtaatttgttttgttattagtctacgattaattaggcttcaaatatgtgctcatatactttaaaaactttacacgtacccaaagaactaaacacaccctgattgcctttttggatatccgta

SEQ ID NO: 3759 - DNA, 2365 bp, Oryza sativa
tttagtaaatacattatacttacaaaaatacagatcattgttgtgctattggtagatacaagttttttcagttctactttggtaaataccatattttaccaaagtttacagcaactcttttttaacataattacaaactaagaatgatagctgacagttaacagatgagacaagaagaattaatccatgcatgcacacaaccacacgcaggataataaaacagtgacaatcactcaagcagcttactgatgaacatgagcaagcaatattaggtgcttatgttggttgtgtagccagtattggccagtcaaaacaagtggccgctaattgttggaaagttggccaactgggcaactgagccaagaagattatcaagccgggcatgcaaagacagaaacatgtcgcagtacacaagacaccaaaaggccaggttcatgttattcggtattgttgatatattcagttcctagccagtttttaccccaaaaagcaaaatttcaaaacatgttttatcaaacactaaataacaaatactgatcaaccgagttaaccagtgcggatcgggatagttgcgaaacaccccctacgctacacatcccatttgccactttcctagtgcatcccaaatttacccttctgttgattggctgcttctctctgctggatgctacagcagtcaatgcctaacaaaggtgctatctaccctgaagttactctagaaaaggaattgcaagggcgagcagaaatcatggtagtgacagcaccaaaggaaagttccagcaataacaatggcaagaaacaacaatgtctaagcttagctctccatcttcccgtcctcaactaatgtccctctctcctttcaatggtcaacacagcatggtccaaggcttccgcatgatgagtccacagtctcatggactatgtgcatcctctgaagctaccataacaccgatgcttactatttactcttcattcaacataaatccgtagtgttcaggtggaccctgctacctcttactgaaccatgatagactaactattaattcccgttggattgaacaacaatgaaaacaaacaagaagtaaaacggaatgatcaaaataacctctaggagcacctcccacctctctctctctcatgttctgaacacaaaagggcgtttactaccaaagtcatgaatgctgtgggaatcacaaaattacatactggacacactgtgtcataaaaaaaacactgatttcctgtgaaaaagttcttttaaacggaaagtaataaataatggatggaagtttgtcgcatcaaacataaatgaactgtcatatatattacctcaaacatatcccttccataagcagaagggtattcttcatcaccagggccaacaaaaccagcatcgacaccatcatcatcctccaatccacctagctcaacctcttccaccgcgttgttcccaaagaaagcatactgcgatgcatcaaacttggtagcgcctgcacagagccagagacaatcaaagagcccgggaatcagtactgaatggtacagcatctccccactcctttcatttaaaggtaaaaggagaagctattttgagttgggattgatggtgtgctccactcctcaagtgacaacatatttcgtggctagatctctatatacaactactgaaacgaatcaaacaaccaaactaaatcacttcggttaactagctaatccggttcatacctagaacacacatagcaaccacaagcataaaccatccgaaacactaataatccaatcaacgagaggaagatcttctccatctaggggcaatctacgagaagagacgaattgcattacccgtcgacgccgacgaagaaggctgcgccgccatccgcggctagggttgcaagttgcggcagaagatgtgggggacacacaggacactggcgcgccggccgaacggagcggaggccggagatgccggagcggatcggggagggagagagctcgagagaggagatggcggagaagacggcggaggcggaggaacgccgacgaggaggagccgagcccgctcgagagatagaatcaggtcagaggggaattttcttttttctttttctttttttttttggctggtatatgtgggagacgccaaaacgtgcgaactttttgggcttttttagattacgtgcaagtttgacgggagcggtaaaaataactgaatcgtatgtgcagttctgatgatggtagaggtgaaaagtgactgaagcgtgtgctgttttttttttcaatcagatcttatgtagttttgcaattatcaccctgctagaaaaaaatttcgagatttcaatcgagcaaaaacaaatttcagaagcta

SEQ ID NO: 3760 - DNA, 691 bp, Oryza sativa
gacttcatggagagaatctttggtgataacgctttagacctttaataaagatgtcataatatcgctttttgactatggacttatcttatctggaatagtgtagattccttatcttgaatagtgatctttgtcggggatgacaagatctttattcattatcttcgttgattatcgtgggtgctgattgcaccgtgtcaatctctgacggctctgatttctgaaatcactgagccaggcttctgtagtaacttttcttggagcattcatttccaaaatccggtttaattatgcgccctgctcccttgaagtattcataactttggttgtaatatttgctgataaaaatccttgtgatcttgttttggaaaaccagctgatattcataatctgtggtgatagcttcttcaatttctgcagcttcagaaaataatctccaattttcatgattagcaattgttgtatatatttcttcctcttcatccgatagtttgctaggaccgtcttcttgaaaattaaattgtccattcatgatatatatataatgaattgctggacgaacaggtggtgtgaattttggtggtatgaggagaagataatcctgtatcttccatttccaagtctcctgcagacatctttcacatcgcttccaaaatcagattgaagaatctgatcgagggttgcatagatggaa

SEQ ID NO: 3761 - DNA, 718 bp, Oryza sativa
gcacgcaacaattcaactggcatttccctgcctaaaaatgctgccacaacaggttgtgtttgcaatgcatgaatcacactatcgaatttactcatgcaatactctgtaagcagcccaaagaaggcatcaaatgatgcttgccatagagctctgttttgcatgctgtaggtagaggccacattctgatcagtgagaagctctgttgctctgtccagtacagactttatgatgaaagaagccccatcacctgcagcatgtccaaggggtcgcagagggggttgcagcgaagaacacacaatagctgcaaggcaagcacttagtccactcaactccaaccgaacaacacaggttgatacagcagtagcaagttttgtcgttgtctcaacagcactactatcagatggcaaatttccaaatataaatcttagatgccggaagactgccatgcaagcaattctagcaagctcactgccagaactcacaagttcaaggtaacgagaaagtagcttgcggcccttcggaagagagactattcggagaaacaccagatcatcatttggtgagagaggtgcattgttactaggtgtaagtggatcaactagttgcagcgattctgccagctgctcaaggagggcctgtctcctgtttctcagttgcaagccaccatcttgctgctggctaaattgcagcaagcgatcaatatcatctacatcaagca

SEQ ID NO: 3762 - DNA, 19958 bp, Oryza sativa
acggacgcggcactgcacggcatggcacgttgccttcgctcgcgccgctgccgctaccacacccacaccacgcgcctactatcccccccccccccccccggctgtggaggagtcgcaacctccgctcgctctaggatccgagtgactagctccggccgctgccgcagcggcagcacatgcagatgcagatcgacgcgcggctcgggtcgccgggtcgcgcgcgcgggaggtgtggttgcggtgtgcagttgcgggctgcggcggggggagtcgctcgctcgtgagtcgcgacgtgttcgactcggcgcatcgatcggtgcgcgggggcacggccgggccgggggagggggaccgagtcgtgtacgctcgggtacattgtccgttggtgttgccgggtacgagggagtacggtatcgacgaggagtgcgatgcattgcggggatgagctagaggggacggaacgagttatctaatcggttctgaccacatactccctccacccattccataatataagagattctgacattttgcttgcactatttgattattcgttttatttaaaatatttgtacagatattaaaaaaacgaaaagttttgcttaaaataatttggataataaagtaagtcaaaaaaataattccaattttttgcaagtaaaatgttaaaatctcttatattagaagacagagtgagtatatgagaaaagaggatttttttgaaaaaaaaataaactagacttatggcttgttattttattcaaatttcaattacaactttctcatttttttcgtaaacacacttttaaaaggttaaatgatacgtatttttcttgaacaagtttatataaaagtttttaaacattaattaaatctaatctttcatgtttgtaatagttaatactatttaattaatcatttgacaataagtttttcttattttgcgtgtggctgaaaatctcttccaatctaaaataacgaatgcagccttaggaaatgagccattccagccattttgcttatatagtcaaaattcaaagctaatacgagtaaaacccaaatcaagtgacaaacatttcaaaaggacaatgttaaaaaaaacacgaatattaggaaagaacctaatatcaaataattaaaaggggtgagatttcgaatttaggccagctagcctaccaccctgtggagctaggcgaaaaactctaaacgtttctctacaaggacaattgtttctaataaccacattccaaccttatctccaattccaaatttccaatcgctagtaacgaccgactatatatactgagtaacactagtaagactatttttagagagagaacgattcaatgattcatacatatagccaagtgaaaaagattggtatagatagggctaattaatcctgcccccgccgttttctctcggtttgttaatcttaaccgtggatgtcaacatcacacattgtgtaccaatcgccatctcaccacctttccttttgcactataaataaatccgaacggcctctgcttctcgaagcccggcctgtagcctcgcctcgcctccctccgccgccccggttacgcaaccaaataccgacggcgccgcccgccgacgagccttctcccttcgcgccgccccctcgcagcatcctcgtgccctcctccggcatcttcctgcgccgcgttagcatcgtctgtcggcgccgtcggaggttctgctcggagctcgcttccgatggacggcgcggcgacgggcacggagcgcctctgccctctaggatgaggggccggagacgtcgccggcggaggcttgtgcaagtacgagcacttaatattctcccctactctattccttttccatttgagaaaattagaagaagaagaaaaaaaaaactcggttactttatttctttgtgagaaatgtgggattcgataagatatggccttgctcgtgctgttctaatgcgctgtaactgtgggtgacggcggtgcgtttggtatttgttgataatgtattgcttcgtcgctgcacattctgcgagcctctgcttggaaaagcaaaccagcaatatttcggtgtaccatcactaactggagtagctgcggcttgttctgttcggttcagcatgatcttatttcagagtttattcggtggattgatatgaaaacgattttttgtacggattaaaccgcacggaaaataccgctgaactggaaattttttttgaagaaacggtggcccgtggaaatattttatatgatctgttccttataacatttgggtaggagactaggaggaacataatgtgctccaactgtgccacggcatgcaaaccatttacagatagcacagaagattgatgaactaacattatggtaattgagttctgctgcaatagtaactgacatagcttgagcgctttcgaaataaaatggtttaggatatcatgtacttacatatcatgtgttagtatgtctgcaataggcaatggtaacttcctgttcctgtggttaaacattaaccgagcttttcttgaaataatatactgatgtaattagcttatgatcccatgttcgttttattttccatttatttatttataggtaaatgatctttgcaactgtcctataaatataacttttttttattcaggtcatctatgctagcacacttgatgactgatgtcatggaagataattcttcatggacagctctttctattgatcacattagaatttctgcattcaatttcggaattgtctccgaggataacgatgaaggcaaagaatttttgctttcattggacactgttgttcctgatgatatcctggagagaattttcacgtttttacctatagtaagcatgataaggtcaacagcagtttgcaaaagatggcatgacattatctactcaagcaggtttctttggacccacatgttgcctcagaggccatggtactttatgttcacttctaatgaaagtgctgctgggtatgcatatgacccgattctccgcaaatggtatgatttagagcttccatgcatagataagagcagttgctttgtctcttcttcttgcggattagtttgtttcatggacaatgacagcaggaatgccatttctgtatctaatcctatcacaaaagattgtaagagaattttggagccccctggtgcaaagtttccagactacagcacaattgccataaaggtagatcgttcctctcataattacaccattacattggcaaaatgcaagcaagttccagaggattacgtccgatgggatttctctttatacaagtatgactcacagagtagttcatgggtgactgcggttgaggaggtgttcattggttggagagggggtgatgacagcgtgatatgtgatggagtattgtactgtttaattcactccacaggcattcttggtaatattgaaccgcgtcatagcattatcatgtatgaccttattgctgggccttctaaggcgtcactaatgcaatcgtcgatcccagcaccttgctctctcacctgtggacgtctgcttaacttgagggagaagctggttctggttggtgggattgcaaaacagaacagacctgacatcatcaaaggaattggaatatgggaacttcacaaaaaacaatggcaagaggtaggtcgaatgcctcataaattatttcaaggatttggtgagtttgatgatgtatttgctagcagtggcacagacgaccttgtctacatccaaagctatggtgcaactgctttgcttgctttcgatacgaagcagaagcagtggaagtggtccgcaaaatgccctgtgagcaaaagatttcctctccagcttttcactggcttttgctttgaacctcggcttgatattaccacttaattgtaatgccttccaatggaatcaggttggcagtcctggtctttgtgaatatatgcatgcttcattagattgttgcgtcacatgcaatgtgctctcctttgcttatcatcccacattcgtcctgatggatgcaatttcctttgcctcttttcattggattaattaatctttagaatgttgatctctctctctctctctataataatgcctgtttacaaatgtacctctattttctttaaaaacaatgcatagatctatgctatttatcacatttatctgaattctcaagttcagccatgtactgcctcgacaaaacctgcatacaatgtctttgcttgatgcaggccttagaacctgtccatataaactgaatgagctattgtccttacagcatgtctagacagataaattttgcagcgccataagttacatgtcttttcatcgcgcaacttcctgtatgtgatatctaaatttttgtcctttgcggtctcaagggacaagttcaactgtatgcgttttgtttcttgtgatacttcatcagtgatgggcctaccactgatgtttgctgctccggaacagtttgcacactggatgtacaaggcgattgaaagtcgtttgtctgtacactgaccagtcactactagctgattttgtagaatcatcatgggccaaatccaggtttcctcttgtaggagctggcccatccctgaaaccgccgtgactctgcatcgtgatgcaagtgtgagccagaggtgccattgatgagattccagctcgtcatcacagctcctctgtatgtagtgctcagttgtgacattaatagttcagccgtctcagcgtttctcagaatggtgtcacgcgctcatgctctgcatatgattttgttttgttgccttgcagattgcaatgttctctctctcttttcttttggccgtacgttttagctggttagctcactctaggtatggcaccatgatatggggccaattcgtctgctgtttttctttgttaatctttaccgtgtctctgatttgttaccagttctgcgtgctgttttaatcagaactagctgggtggcccgctcaattcgcaattgcgcggctagcacccaaacaaaatcatatattttttaagtatgattttacttaaaatttattaaatagctatctagctatttcattgtcttaagactttgaaagaccaaaccttatcatcctcgtgtttctaattatatagtttttaaaagtcacaccagttgctacctcttatgtcatctccttctctatttgcttgcttgatctaccactattttcattcattcttcttggaacctttaaaaattggattttatagtttttagagtttattgtcatattgggtttcatttctagatgtcccatcaaacgttgacattatactactctacggcccgtccactgtctcttctcattgttgtcattgagattttaaaaatcgaacataattattgtttgggttcattttttactttctagaagtcccgctaaaccatcaatggctttgctattgtactcctctacggctcgcccgctgcctcccttctttattggcattgagattttaaaatcgaacatgattatcattggttttttttttactttttagaagttcaaaacctttaaaaattggacttgtagttttattttttataatttttagaagtcccatcaaacgatgctacaatgcccctctacagcccgtccgccgccaactctttattgttgtgattctaaaaatcaaacataactgtcgttggaattcattttttattttctagaagtcctgtcaaccgtcggcggctctgcaactatactcttatacgccccgcctgctgcttctcctttttattatcattgaaattttaaaaattgaatatgattatcaattgatttttttttactttctagaagtcccggcaatcgtcttactcatttgcttcacggcctgcctgacgtctctccttttaatcgtcattaggattctatttggtgttttattaacaatttttatatctcatatcaaccgccaccactctacttctttataggcatgttacttaatttattttgtcatgtgttttagatggtcttttctttcaataatctttatttttatcacaaattttagttatttataaattgtattcctaattgatatcttatttttcattttctaatttcagaatttttttaaaaaattttagttaatatcgtattgtgttattttaatgtttttattttttattttcaatttcagttgtttcaaaattgtattcctatttgaactctcttttattttttctagttttagatattattttatttttattctaatttttaattaatctcgtattggattcttctttcaatattgcttatttttaatttcgaatttcagttatttttaaattatacttctacttggactctcctttttctttttttatttttctccaattaatgtgggaattatttttattccgaattttaattaatcttgtattgagttattatatagactcttattttaatatttcttatttttaattccgaatttcagatatttttaaattgtattcctacttggactctcattttcttttttaattttggattttattttatttttatttcgatttttgattaatctcgtattgggttcttatatggaaacttattttaatattccttatttttaattccgaatttcagctatttttaaattgttttttttacttggactctcctttccttttctgattttggatttttatatttttatttcgaattttgattaatctcgtattgggttcttatatagaaacttctttcaatattgcttatttttaattttgaatttcagctatttttaaattgtacttctacttggactctcctttttcttttctttttctttttctccgattaatgtgggaatttctaacccccacaacgaacatggtgcgtcatttcaaagttgttttaataatataatagatagatagatagatagatattgcttgacagatgtgtcctatcttacaggtttggaatcctttttgttggttaagaaagcagtaatcgcctgttgcttgctgctcttatcagctgtcacagacaaaccctttggcttctcaccctcttaaccttgttcacttttatccagaccagataatatatgaggtgagtgtttttagatgaacacaatgggaaacactgcgtatgcagtcatggaattatttttatctcttagattgttaatggcatggtgtttccttttctggatgcttacacagaaacgaaatacaaatagggaagaaaaaaagaagaagaaagggatgaagtacccgatttcattgtgtttgaatcttctcctgcactttccagtttcatcgtaccatttggccatttgagccctttaggctcgtgcttcgtgtccaactttgtagccaccgaattactgcaacttcgtggggattaatcgagattttgatgtgcactctagtctatcttggctggccatccaacttgcccttgtcctctacgggttgcaagtggccacgcacagttgcgttggtctacgcaccgtagatcacgccgctggtgtcgacgaatttaacttggttcaagatgtgccatgtgtgccgtgtgttgccttgtccgggaaagatggaaattctgaatgtgtggtttactagtacaaggattatttcatccaaagagggaaaaaaaatctgcgagttcccttcagtagaaaatgggtagcagaacattattgttttaagctgagttctagatgtgtggacagttttccatattcagatgaaattcagtccttaatttttcttctaagaaatggtttggttgagagggttagaaacagctgcaactgtgttttttctcctttctcaacgaaaggcaggattgctaccgtcggattgagaaggcaaataggtatttataatacagaaacgagtttacaggaggctataagtactaaaactcaggcctgtcgaaaaacacaggctgatgaatgatgattgaatgaacagagacaactgggccttaacccagtgcactcactactctgaataatgatcaaagcacttatttgcatgcatatctaccatgcagtaaaaatgaattctgacgtatgatcagtgttcattggaccacttagagctcattcagagtttcaggctaataataaaactaagactaaccgctccccgcgtcgctcttgcacagatttctcgggggcgaaaccctagccgcctgcgtcgccaccttccatccaccctcaacgcctcgccgtcgccggagctcgctgctgcaaaggcgagcggccaactgggaaggcggtggtgaggacatcgtgagtcgtgacccagcgaagctcgcccttggcacgagaggacggagcggcgcatggcgttgcaggtccacagcggctagagtcgatcggcaagggcgcaatggatccgacgctctcggaagtggatttggcattcccaatgcaggggcgcagacggcggtggaggttggcagctggagagaaggtggtggcggcagtggcggtggtgccggatctagagctcccagatccagttcgacagtggcgctgtgacaggaggaagcgcacggcgccggccgacacgacgacgtgtggccggcgaagcgcgtggagagtgcgacacctgttgtggggctccagagggaagaccatgatgatggccctggcatgaaggagcacgattagtggaacatggccggcgtggtggcgagcctgctatggtggagcacggcaaggtgaggtggtgcggtgacgagactgtcacagtgggaggacggaggcgaaggtgatgcgaccaggcggcccgtaggagacacgggcagcctggtcgagatggcggcaacaacggtagcatcataagaggggcgttgaggactgcgacaagctcctctctaggtgttggtcctcttgcggcggcgatttgccatcgcaagatggccacactggatggactagtgcggggagaggggattcatcttctctctgaccctcttcctctccagcccacccatgtggatgaatctggagcacgccagaggtcgagatgcttcttcgatggccggccggtggtgaggcgtcgacacggtggctgcgtgttgaagaggattagctagtagtgtctgttgaacttgacatgcacacattgacatgagaaagtaggaaactacaggcgaaagcctagccttcgggccgataacggcgacgcctgcgtcaccgcattcctctcgggacgttgttacatttctcctattctaatggtttctttaagtattaaccatgtcctggttctttaggacgggcggcggcggcgctcttagcgttgttcccttatttttagacgttgttcagaagaactattcctctggcgtgtcgtgtgcttgttttgttttcagtagcaggattagacgttgatgcgtggtgtggctatttttttctttttttttctagtcttctagaactacagacttattcttttttcctgatatatcaacgcattaccttgtgcgggttgtttcggaaaaaaataaaactaagagcagagtatcaccagttggagactggccagtcagtttctacttaagtagactctccaatctccatcatgtgactatgtctggatcactacaacttcttcgacgtatggtttgctccatggcctgaacaagttgactgggacgtgacctacgtgtcccgcctaacatttcttaagttcagaccaagcatttgcctcgtacatacgtaattacgtattccataaaaaacttcaccgcgtccaaagcagatgcagccgcgttgctacttaattatcaactgacatgagccaatgatacattgattctatagctgaaagctaatgaaatcactgatcaatggatcatgtcaaagtcatccctgattagcgggttgcgattaactggtggaggaaagtttctatccacaaattagaagtcgacatctctgcagaactggacctaatggtctacttacacgtgaattctcgcatgcagttcgtgatggtacaagttgtggccacacaaaaggctggacctgttctgttcatctcttgcagaggattttcacccgttttgtcttgtgtgaaaattgacattgcgtagtagtaaccggtaagccagcgatggaacttcagtcaacaggttgttctcatggagggattacttagcagtgtaggcaacaatgtattgaggccgtgttttctccttcggagaaaatgacgaatatggcttctgttcttaattagaactgtccttgttgctcatacatggattacttaactgagtagacaagttaataagagatcatatagagggatagtgcacagctaggagcttaggacgttcgaaaataacttccaatccaatcgattgcttgcaaagataagacgatgaaactaacacaatacggacttcgatgagaaaagggaaaaggggcgaaagtcatcgctatccaaaattctacaaagttcctttgaattggcttaggacatactccctctctttaatattatactccgtaagtcgtttaacttttttagtcaaagtttttaggtttgatcaagtttataggaaaaaattagcaatatttataacaccaaactagttcattaaatatactattgaatatattttaataatatgtttgttttatattgaaaatattattatatttttctataaatttatttaaacttaaaagaagctttactctaaaaaaaatcaaacgacttataatataaaacggagagagaaggaatttcggatgaattttaacatgagatctagtctcgtaaaaaatcatttatcgatatatcttcttattcatgtgttccttatgtgcttccctcaaacggtcatttctacatcatttctgccttttttttttaatccatggaagcccttttacgtggtgatcatcagaatttcgtatgcaaataatcttgatgatctttgtaaacatttagatggtatggttttacttccttgaagatgagcttctgattatatagtgtaataacataagacacttattatttacattggataagtaaacttcaaaagtgtaaaattttgccaaaattgaagtaacataaatcataaaagcataactttgttagatatttttgataatattaattatatgtcaaagttacatttaaatgattgtgttaatatgtctgaaacaccaaatatgagtaaggaggtttacttaagagtaaattgtaatttgagccatcttttattgtcaaaatgttactttacacacccttaaatcaacttttcttttttctactttgtactaggtaatttttgctattttttaaatatggatcacccaaatattttttctaactatgtctagcctccactctagcaaatatatagactgcacatagatggaggagttcggcggtgtgctggagccgatttgtttgaggttgttgatatatatacatagaaaagtttatttatgatgatccaaactacaataataaggatgtgtttagttcacactaaaattggaagtttggttgaaattggaacaatgtgatggaaaagttggaagtttgtgtgtgtgggaaagttttgatgtgatggaaaagttggaagtttgaagaattattttgtaactaaacacggagtaatattattattcgatccaaataaaaaacaaatagtttaaatataattcaaagcaaaactttaacgataaaataggactcaaattacaactcactttcttaatctattaaattattaaaacagctttgaaaggaggcaccacgtcctacattaatcggagaaaaagtaaaaaaaaagaaagaaaaggagagtccaagtagaagtacaatcttaaaatagctgaaattcggaattaaaaataagcaatattgaaagaagtttccatataagaacccaatacgagattaattaaaattcaaaataaaaataaaataaaatccaaaattagaaaaggaaaggagaatctaagtagaaatataatttaaaaatagctgaaattcggaattaaaaataagcaatagtgaaaaaagtttccatataagaacccaatacgagattaatcaaaatttgaaataaaaataaactaaaatctaaaattagaaaagaaaaggatagtcctagtaggaatacaattttaaaatagctgaaattcagaattaaaaataagaaatattgaaagaagaatccatataacaacccaatacgtgattaattaaaattcagaataaaaaataaaataatatccaaaattagaaaaattaaaagagagttcaagtaggaatacaattttgaaacaactgaaatctgtactattatataaattgaatatgtttttaccggtattttgttacgtcatccgtgtataagttggtttttaagttcttttgtttttgaaaagacatatccgtcatccggtgaaaaaaaagtgagaaaaaattaaaaaaatagaaaataaaacttctattgtaaaaaaaacgtccgactccgactcctccggtggaaaaaaaaaagagagacgacgggaaaaaaatcaagaaaaaacaaagaaaggagaaaaaacaacttctacccaaaaaaaaaaacgactgactcctccggtggaaaaaaaacagaaaaaaataagagaaaaaaaaacttctacgtaaaaaaaacgtccgactccataaaaaaagtccgactatctgcggagaaaaaaaggcaagaaaaaataaaaaaagagaaaaaaaacttctaccgtataaaaaaaaataaaaacgtccaattccttaaaaaagtacgattccctcaaaaaaaggactttttgtccgtaatcttctcttctacttctactatttttttaaaaaaaatctctactattataaaaaatttaagatattttgccggtacgtcatccgtgtatgagtcggtttataaatttgttcgcttttgaaaaaatatatatcctttgagttggttttaagttcgtccgcttttggaaatataggagtcgtataagaaaattcgcatgctaactttagacgaacagactcctaaccacagcttatgattttctagaaatatatagatccaagcaaattctcacagtgatgaatcatcataactaagccatataacaataataagactaaaatagttgtcacccgttgtagcgcatgggcttttctcttgaaaataaaaaataaaaatattaaaagaacacaatacgatattaattaaaattgaaaaaaaaattctgaaattacaaaacgaaaaataagatttcaatttggaatacaatttataaataactaaaatttatgataaaaataaagactattgaacgaaaagaccatttaaaacatatgacgagataaattaagtaacatgcctataatggagtagagtggtggcggttgatacgacatataaaaactgttaataaaacacaaaatagaatcctaataacgattaaaaggagagacgataggaaggccgtgaagcaaatgaacaagacgattgccgggacttctaaaaagtaaaaaaaaatccaatgataattatattcgatttttaaaatctcaatgacaataaaaaggaaaagcagcgggcggggtgtataggagtatagttgcagagccgccgacggttgacgggacttctaggaaataaaaaaatgaattccaacgatagttatgttcgatttttagaaccacaatgacaataaaaagtaggcggcgtacgggccgtagagaagcatagtggcatcgtttgacaagacttctaaaaattataaaaaataaaacccaacaagacaatcaactctaaaaactacaaggttcaatttttaaaggttcggaatttctaaaaagtaaaagaaaataatgataatcatgttcgattttaaaatctcaatgacaataaagaagggaggcagcgggcgaggcgtagagaagtacaatggcaaagccgctgacggtttggcgggacttctagaaagtaaaaatgaacccaaacgataattatgttcgatttttaaaatctcaatgacaataaagagaagagatagtggacggactatagaggagtataatggcaatgtttgacgggacgcctagaaattataaaaacgaaacccaacgtgacaaaaaaaactctaaaaactataagatccaatttttaaagtttctaaggagaatgaataaaaatagtggtagatcgagcaagcaaataaagaaggagatgacataaggggtagcaactggtgtgacttttaaaaaactatataattaaaaacacggggatgataaggtttggtctttcaaactcttaagacaatgagatagctatttaataaattttaagtaaaatcatactaaaaatatatgattttatttaggtgctagccgggagctagttattactattgcgcacaagtctgaaacaaccacccggccgtgttttagaaccaaagacagagagagaggtagtacaaagtatataaagactaaaggaaattagagtccacttcgaataattaatgcatggtttctgcaagcacaattgaaatagacaagtcaatgcatggtttcaagtcttcgttgtactgtgcgccaaactttcctggctagaaagtacactgcaaaaattgccatctagtttttcaaagttggaacggttcaattcaaccatgcatatatgcatccaccccctataaaatggccaccccgcaagccacaaactccaccaccaagcaaatcacgtagtccctccacacacctcgtacctcgatctcgaagcttaattactagttaacattaacaatggctgctaataagctcaagttctcccctctccttgccctcttcctcctcgccggcatagccgtcacctcccgtgccggcgacatcgccgtgtactggggccagaacggcgacgagggcagcctggccgacgcctgcaactccggcctatacgcgtacgtcatggtcgccttcctcagcaccttcggcaacggccagacccctgtcctcaacctcgccgggcactgcgaaccaagctccggcggctgcaccggccagagctcggacatccagacgtgccagtcgctgggcgtcaaggtcatcctgtccatcggcggcggcgccggcagctacgggctgtcgtccacccaggacgcccaggacgtggccgactacctgtggaacaacttcctcggcggcagctcgggctcccggccgctcggcgacgccgtgctggacggcgtcgacttcgacatcgagaccggcaacccggcgcactacgacgagctcgccacgttcctgtcgcggtacagcgcgcaggggggcggcaagaaggtgatcctgacggcggcgccgcagtgcccctacccggacgcgtcgctggggccggcgctgcagacggggctgttcgacagcgtgtgggtgcaattctacaacaacccgccgtgccagtacgccaacggcgacgccagcaacctggtgagcgcgtggaacacgtggaccggcggcgtcagcgccgggagcttctacgtcggcgtgccggcggcggaggccgcggcggggagcgggtacgtggcacccggcgacctgacgtcggcggtgctccccgccgtgcagggcaacgccaagtacggcggcatcatggtgtggaaccggttctacgacgtgcagaacaacttcagcaaccaggtgaagagcagcgtctgagctatagcctcaacctcaagcccccaagcctgagtaattaacttacgtgacacgtatacttattacttgcacagtggttgagttggactataaataagaggagatccgttcatacgcatctgtaatatagtagtagtaataagcagttatgtatgcacaacccacatggtgtactttgtgtaactctgtgtttgatcatgggagtgtatttgccgatataaattaaataaggagaatgatttgcattaagccagtatgttcgagtttggagagctgatcggctctgatccacgggatagccccagtgaaccacctcttcgtcttcggtgttaggtcgcgtgacctatcgcgaccaaaaataaaagaattcttgtacgaaggaccggacgcaagatagatgtcgttaggtgttttttttttttcaaatgaaactcgtgatcagaaagtcaccaacggagccataaacgtatacgcgcagggcgtatccagttgtactatacgccggtgcctagcgttaactgatgatcgtgtactacgtgcatgcatggtggaataagcgtaaaagttgactaatccaacaaaactcaatcggtcaattcgcgaagcggcagctgtctttctccccgtcagcccgcagagcacgcccaccggcgcaccgcgcacgcatgtgacgtgtggttccgctggggaaggagaaacgagggcacgcgagctccgcgactccggtctccggcgctcctatggctaagaattgaaaggcaaaagctactctcatggtcatggcgaagcttccgcccgttgcctgagcagattggacctgtttaaaagatttgttacttcactggggaatactagggatcagttgaccgattcaggaaatgaaaatcggacgtacacgcgcatgaaggagactccaccctagtttcttctccctctctcctctttaaatatttttcctactgaattacttatctaatctaagtataatttgattatattgttatattcgttattcgttgtaattaaatctttacagcaagatatcatatgattatattctgataaaagaaaaacatatatttcaaatcattaaaactcaatgttccatacgtgatagcaacatgttttaacacgtgtcttctttgtgtttcataagctacctgtccctcttttttctccacttcatgcatgcatttagtgatattcggaatgatttttctcctaactacatatccgatctatgatccaatcactaccattctattcattgtaattaaatctttacaataaaatatcacatgattatattatgataaaagaaaaacatatgtttaaatccattaacactcgatgtttcatacatgatagcgagtttcaacctgtctttattgtgtttcacaaaacttttaaatgtttaatggctgatttttttcaccatatataaattaaagtttcatctgcggtcaattgaaacatttgactgtccgtttttttacatgacattggacgttgtcctttttttacatgacatccgacgttcgatctagagctcccccctatttcacctacaacaaaatttttattcaacttgcagttgtactttttaagcactattttactttttcatcagtaggaagttacatcaagattcatgttcttttatttttatattcagctggcagttagcagttacactcagttatatagcacttgtattcagctacaatgcacttacacttggttatagcgcaccaaaattagattttactatagttttttcttctagatttatgatttttgacctttttttatttcattgaaaacagactacatccattgattgaaaattctgcaagattcaaaactaaaatctattgaaagattaataagtagtaaaaagaaaaggttgtgttgcaagttccacaacttcaaacacaattatttgcctcatgcagatatctatcaagccttacagtaattcatataataaaattgtttctgttcatacaatctctgacaaggaaacatataggcagtaatacaaatcaaagaaccctgcgatactcatgctacggattgggaacgatcgctcacaccattttacatgcaaggtaacatatttagcaacgaatatagaatcacaacaatggctctctcatgtcttgcacacaactcactaagctcacagttaaatgatgccagtaatgccagcgtggtattatcatcaggcctaaggttttgctggaagaccgtcaattcattcatgggttaatatctgtgcccgcagtcttcacatcaaaccttcctgacctgaatattatgggtggactgcgaccgccagataggttgcctgccactttgaacaagtgcaacctcctcgccttccttcaccataccatgtttctgtggaatatatatagcatcatatcaaatggtgagtatcgtatgtggaatagtggatatttggggcatggctattttatcagtctattttcagcaacaattgctttcagtggctacagcgcaaataacaattttctgcattctgctaaccccaaaagttctgaaaataaaacattctattattctaaaggcgaataagtcagctgcttgtttttaatccaatttatgttttacaacaaaataaatggtatgaatatgccattcacagcaagaccattattttggtcatttcaatgccttttctagttctatacttatttgtactggaaaataactgtgcctgttggttcgttggctcaaacattaagacttgcctcaattacggcgtaaattttttttacatctttttcacacttgaacagcaaagcccctaatggtgcaaaattatctcactagagagaaggcataatactacaatattatttggcctttaatgataattgatcatgccttaaaatatcaagatgcttttcaacatcgattttatttcccagtttacaggcaagctgtaataaatttcaattctgaggtcaggtgtcaggacattctcctgataaatgagtttaactaatgcctattaaagtgacgcagagaaaatcagaaggggtagaatatattagaaattaccagcaagtatgacaaagcgtcaccaaatgtcttctcagcatcatcagaaaattccatctggactggacatacaccttggtacaaagccaatcgttgtctaactctctccctacaaacataccatcaacactaattaggtgcttgaagataccatattataaaggaaaaatgaacaagagaaacatcatacttttagagagccaaacatttcagatcaattgtctgttataacgtcagaagtacatactgtaattatattatctaaactcagttgtcattgatcacaatctcataggaaatactatcagctgatatttaaccattacctaataatgtatcaggacatttccaaatagagccaatggctggtaaattaaaagggccttccatcttgagttcattttgctcctagactaaagcaaaccaatgctaactaaaaccatgagatatccatgtaaccatgtagcataacagtttttttctttactaggatgcaggccacaaaattacatatatcatttgatacaaatggatagctcatgtaatgaacacaattgagcataatttctttcttggttcacagaggttatcaactaagaggcttggttggccaaggcagctcctgccaaagtagtaccgctagtcattagtatatgatgttttggacaagtaaatgaactatcatttgcctaaagttgtttgttgtaacgacaaatattatagaccagaggaagtagtacagatggattggaaatttggatgtgctaaatggaaaaccataacataatcagacaaaaaaagttaacataatgtgtattttactgttaattcaagattatacaactagaaagaaattggggtttatcaagcatcagaacgaaaaaaatagaatcttactggtccgtaaaggcaaaaatggtgccagaagggcggtaatgactaagtaggatagccataaatcctgtcctggtgaaaaccacaattgatgttccaagagtgttggacatcattgttgaatggtatgcaaacatttcactcatgtgattctacagaaagaaatgtaattagaaaagggaattgaatgaggaaaaggcacaggggtatcatggcagttcagag

SEQ ID NO: 3763 - DNA, 12177 bp, Oryza sativa
acccgcaggtacaccaaacacacacttatcggggttcagttttatgcgggcggagcggagattctcaaaagtttccgctagatctgaaagtaaggtctcttggttgcgtgtttttacaaccaagtcatcgacatacgcctcaacattacgtcctatttgactacccaaagaaattcgagtagtacgctgaaaagtaggacctgcattctttaacccgaagggcattgatgtataacaataggttcctacgggggtaatgaacgcagttttttcctcatcctccctagccatgcgaatctgatggtaaccagagtatgcatctagaaaacacaaaaggtcgcaccccgcagtggagtcgacgatctgatctatgcgaggcagggggtaaggatccttaggacatgccttgttaaggtcggtgtagtcgatgcacatccgaagcttgccgttcgccttgggaacgaccaccgggttcgccagccactccgggtggatgacctcacgaatgaacccggcctccaaaagtctagccacctcctcgcggatgaaagcttgacgttccggggcttgccgccgcactttctgccggaccggccttgcgcccggccgcacggcgagacggtgctcaatcacctccctggggaccccgggcatgtccgctggtctccatgcgaagacgtcagcgtttgcccgcaggaaggagacgagcgcgtcttcctatttgccatccagaaaaccaccgatccgtgtggtcttggatgggccgtcgcccaaggcaacctccttgaccgggacctcgtcgcaagtggccatccgctgcctcggggcggtgggggcagaagggccaagcctctcgtcaccaccctcgggcttggacgcagcagcgaggcggtccgcgcgctgctcaatgcaagcaagcgcgactttaaggtcgccacggacagagatggggccaccagggcccggcatcttcatctggaggtaggcgtagtggaccgccgccatgaacttcaccaacgcgggtctccctaggaccgcgttgtagggcagactgaggtccgccacatcgaagctcacccgctccgtgcggaagttggcgggtccaccgaaggtgaccggtaggtcaatgtgacctaatggccacgtgtgccccggcgtcacaccgatgatcggttgagacggctggagcaccatccccggggccttgatagcatcaaaggccgcgggggaaaggatgttgagagccgctcctccatctatgaggacacgtcccaacttcacgttgcagatggtgggggaaaccaccatcgcaacctgccctccccgggcaatgcacggtgggtggtcagtctggtcgaaagtgagagcgacctccgaccaccgcgcccgacgcatcgcctcatgggtaggggccatggccagaagctctcgtttcatagccttgaagctccggcgagagacgtgagcacacgctcctccatcgacggtggcaatggtggccccaggttcttggaaacctaggtcatcatcaccatcatcgatgtcaacagcgggggccttctgcttggcctcacctcgccgtttgccggatggaaccaccggggacttgccctcacggcgttcctgcctcctgtcctcctcccacttcctcgttcgctcagccaggtttttgactgcacgacagtccgcgagatcgtggagggaggtgttgtggacggagcaccacctgccggcggggcgctccctgccgggagttccggcctctttctttttgtcgctcgcaggcctcccctttcgggtggcccgcggagcgccctcgacggcgaggacatgaccctcgtcgccggaacggtccgtcctcttcttcctcctcctatcacgccgccctgtctgagcggcggatccgggggcggccgaagctgccactccggaaccggaggagttccaggtccacgcttcctccttacgagccactcggtccgcgagctgaaaaagctccgcggtagtctggggctctttggaagcgatcttttcgagcatgcggttgtgccgcacgccccccctgaacgcgtagatcaccgcgtgtgcagggatgcatggtatagtattgcggacttggcaaaaccgctgaatgtacgagcgaagcgactcatcatcgcctcgctgtactgcatgcaagtccgcttcttcgcctgggcgcggatacgtgccttggaagttcatggtgaactgttggcacaaatcttcccaggagtggaccgacgcgggtggcaggttcattagccaaccccgcgcctgtccttttagggccatgggaaagaagttcgccatgaccctgtcgtcacccccagcggcctcaatcccggtcgtatagacctggagaaactcggtggggttgacgctcccgtcgtacttctcggtgatggtgggccggaaccttgggggccaacggacgttccgaagactcgccacaaaggctctacagccaacaccaccggccgggggcacggagggctgatcttcacgtccatgtcgaggtgacactctggacgaggaggctccctccgttgcacggggagtacgccggctattacaccggcgcccgatgttgaggcgggcatccggctccccatgctgatcctcccgagtcgacggtgtagacgagggagtggcagccgaatgacgtgcagccgccgccactcgccgcgccctccgccttgatgatacggagccggtggtagcggcgccggaggtcttggtggtggtggcggaccgtccaccagcacccaggcgctgctgtgccgtcatgaccaagttggccacgtcttccagccatcgttgggctggagactccgggtcatggacgacaggcgggtgtcgtaggagcgcgccagcagcttgaagcgcaccctgaggcgtgctgccgtcgccgtagacgaggaggcgacgctccccgtctcgccgttctcctgcatcacctgcggccggtgacgctgcggacttgtcgaccctctcaagcgcctccccctgcttagggctttggcgcggaggaggtggaggagtacgagctcgacggcgtggattcggctccccgtcgtcgccgctcacactcggcgagaggtcgtgcgtttttccttgctcggccattaggctgaacaagaaaaacttggggcacacggaagagtctgagagctctgaaagcacacgctgagccccctacctggcgcgccagatgacggagctcgtggctcctcaccgggagaccgcgcaggcccccctttgccagttcggccgggggcttagggtgaaatctcaagctctcactctctctgtatgtggtcagattactcgtcggcaagacacacgagacacgacgatgtatacaggttcgggccgccgcgaagcgtaataccctactcctgtgttttggtggatctgtgtatgaacgagctacaaagtgtccgctgacttctcccccgttctcagctttcaatccgggaaaaaaatcccccctctaaatgggcaaggtcctccttttatatctcaaggggataccacatgcacctttctctttccaaactggactgttctttttctctttaatgggcggagatcggtacggtttccatccgaatgacacttcgatgggacagcccacacctacctccactcccggcggagacgggcgcaacgtgggatcgtggctgcccgttgctgacgcgaccagtgtcagactggtcattcttgtccaccatgtgtcagtttaacaagatgcatgtttgcccttcttcgtgtaacaccttgcctgtaatggttaggataaagcctggtataaatctaaccagggctaacgtgccatctctaagagataacacgctagctccggcttgagacgagttgcctagaggctttcgtcttgacgggatggggcaaggcgtgcgtcagaccgccagtcgccacctaacccttgatctgaccggtctgtgactggtcacagaccggataaaagagcgtgctgtactgcgttacatgcagcgtgacacgcttgaccagactgtaataaatgctgttaggtgagcacagctgtgctcacttatcccatatatgtggcgcagacttctttaaggggtcggggtgcctcggccctcggggccggggcaagcgtaacccgaccccccctcgggggaaatcaggaggagggcggacacctcaccctcgggcccgacgtccccgaaggtgccaggccacgcgggcgattgcgtctacctcaagcctctggtcatgatactcccggtcccatatcaccgacaggaacattgagcaaagaacacagacttacggagcaaagcaactacactattgattcaaaccatggtgtttatgcagctgcataggattgccaggtcctaattggctgattctgccactaactagaaatactatacttatattagaactcacgttagatagatagagtagagcatatatagggggtttagcccctctctcctaaacacccccatagttgtgaactcccccatttagatccgagtaccatcttcttattggccttgtttagattctaacttttttttcttcaaattttaaacttttctgtcgtatcgaattttcttacacacacaaactttcaacttttccgtcacatcgttctaatttcttcaaacttctaattttagcgtggaactgaacacagccattggcttgtggcgtgtgtgagatgcaatgtgattgaattttttggaataccctcctttttatttgagaatttttcgtgcagctgtcaaacgctttcaatctggcggggtttatttgtgaccctcgatcggtcaatggccagtagcaatccatccgtccgttcaaatccctctctgggaaacggacgaaacgggagaggcgcggaaaacccccaccccccaaatcggagcgcggaggcgccgaccaagaaaccctacgccgcttgggcggcgatgatggaggcggcgccggacgaggaggccgggctggcgctccccgagggcgagcggattctggaggtcaccctcatctccgcgcaggggctgaagcctccctccggcctgcggcggcggctgctgcaggcgtacgccgtggcgtgggtggacgcggcgcgcaggctccagacgcggccggaccgcgcgggcggggtcgacccggagtggcacgagcgcctcctcttccgcgtccacgaggccgcgctcgccgacgactcccgcgccgccgtcaccgtcgagatctacgccgcgcccgccggcggctggcacatcgggggggactccctggtcggctccgcccggttcctgctcggcgaccacggcctcctgtcccggcccgtcgggtccccgtcgatgttcgccgtcggtgtgcgccgcccctccggccgcgtccacggcctccttaacgtggcggccagtctcgtcgccgcgccgccgtccccggcagctgcccacgctctccgctcatcccccgccgtctccctcagcggcctctccacggcgcccatcccagcaggccgcgtgctccgcgtcctcaaccgctcgtttccgacgcccccaccctctccgacggttcttacgaccaagaagcagcagattgcagccaagccgaacaagaagtgcgctgacaagctggacgttgcggtgaagctgaacaatggcgcagatgatcggagcgatgaggagcgtgaggagttgagagagatgggcggggtggtgttttgcgggccttgtatcctaccattaccaagaaagatccacataagcccctctgacgagaacctgcaggcctttgctagcatcttctccggcggagttggcattaccagacagagccctcgccattgaggagtccaggcatttaataggttcggttctttcagttgattccttgtggagatagcctgtttcttcttgttgtggaaaattagtttcttaaccatgaggatatagtgctgagttgtattatagcatctattgttgttactgcaaatatgtctcactgattcttttttgtgtgaatcaatggaattatagaattatagtgccacaatgaatagcgcggaatcattttgttatctgctatgctcaaagaacctcaatttaaggtttgaagatttcgtttgaagcaatataagcctgaatgcctgagtatttccactcatcttaatggcatatgtggatattttcttgttgctcaatatcaaatttatcggtgatagtgctattgtgaagaattgtcaaattggattattcctggggctgtttgctttcttgatgctgcagctgcattgcaaaattgttgcctgggttgatttgtagtagcattgcaaacttagatgttgtgaaaagttttaatgacatcatattattttcaagtattttcatgtgaaatatgtagccactgttctttaaggttaacttggccgtacatgggtattcatgtttgtcttacactttacctgatgaattatgttatgtacagacaattcataataactagacatatatctatcatttcactgcttctaattaatgtcttctgtggtcatgtggaatttagtaacagttgaacctttagtttaatctgagggactattgataattttaattcatattcagtgatcaaaagtacttaatcttagatttagtttgaaaggtgtgattgtttggtttagaggaaagatcacacattaatgattgatcagcatgcatagaacagtattctatggttttttttttacagactagctctgtgggatagttctcaagccttaatggcctttgaattattctgaatgatcccttaatgaaacataaaatgaacaaatgattattattataatagtgctgggaagattaataagcagaaagatacttcaatggtagaaccagaggattagtgcactaaaggcctgatgcaaacaagtccatagtgatttgttttcccttcttttctgagaacaaaaaatgatatcagtactaactactctgtacttggtttgacttttgaaaagtcaagtgttttggaatgattagtgtgagcttttttatgtggatatcatattagttaccatatttgttgcaaaggacaataagtcttaaaaggttgaagatgcaagtggcagattaagttcaggatgatgctatgaatgccatctggttctctcacaagtcacaactatcagcttaatttctgtaactttgtttgtattcttttgttgagatatgtttactgggtttaactgatttgcacgttcttttatagtttatgtcataattcttaacacacaaagcttctttatgatgatttggcatgtgatggttccaagtgtccaacagttttttgtccaagtcagtgattgaatgcagggaataaacatcacttgtactgttgtagctaattactatcccctgaatgtagttgatattgtttccttctaagtttacaatctgaactgcaaaatctgatagtattgtataggaatgctttatggactgggttaaaatcttgcaggccatgtttagggcccaaattcgaaatagtttctttagcctgtgactatttatgtctcgagcctgtttgtggctttttttttcatagcctaggcttctggggctttgtagtctgctgatatcgtgggacatctaattgtaactttgttgtatttggcttttgtattaccaattttctttgcattgattctgaaattacgtgcttcctcgttttctatcttacaaatgtccatgttccttttcgatgtatcggagtaagataaagacagttttggttaattgacaactcatggaaaagtatctgcagactgcaatgttaagttatcttctaaaaaccaaatggtatacttgcttaaattgttagtgattcttaatgcttccaaagttccattgtaggatcaaggcagatttggtgaagcactgagagataaagtgctgtattataaaattgtctggaggatatccaaagctcatattgtgaccttacgatctaagcattgggtggactatacatgtacagtgattttttaaccgttttgacagccctttccatcttggtattttatatattttttagcaaacggtaattcaatgaactatagcgtcaaacttttgagcatttcaatgtagttttgatatctttgacaataatttgtggactatttctatgtgattagtggatgctttctatataaacaatcctcttggttctgatgtaaagcattatgtgccgtgtcacttgaaaatgacaaaacaatattcagattctgaaaaaccatctgccttcttgactttgatgattcaagtatccagcaaggggatagcaagcaataaactcatgatgttaggtcatttgaagatcacatgttttaatagttttgtcaggatagtttgtcggctttttttgggttttggcacattttttaatttttttttctgtacctcgactattgagtatatatttttttgtcaagagctgtgctacagtacttatgatcctgtatgacgtgctgccaccaaaactatcaaagatgccattttcactgtacacctaaatggtggtttcttcaccatcaccatcgccatcctccattctaaagtcgttattatagtttccatcagttgggtcatatgtgcgatttctgctctccaaaatctgcctgctttctatggtaggatcctatgttccgatttagcctgttccctcgtataattgttttcctgttcactcatattgctttacaatgacttatcgactagggtaaactgtttgacagttcagaactggaaagggccacttgcggccgtcagatttacgtggaactcgctgttcctttgcttattgcgcttattggacactgcataattctccaaaaagaggccataaagaagtacttgacgattgtgacctcacatcaatggccacatacaaccatgtaccatctcctttgttttttccaggacttttccatctcccccttcttccaattgcgatccacacaatcctgattcaagttgcgccaccgacgtaacatgccgtctttttcctggtcgatcctttgattgcctgaattctttcttcttttttttctacgccccaactggttgatttggatcccattcgttccctctcctttaccggaagaaccagcccacttcttttttttttctctgtctttgcagcttttcaagtgcaatgttggagaagatttcttcgacggcgcgagctccaagaacctcacaaattgttccaatattccattgcacactcggggcatattggttggatcctattgttttagatgctgcccatttgctaaacacgccatgttagaggtctacttgtcctttctaggttccttttcttttgatgcgtttgcatatacggtatatatgtactagattccatggagcatagcaaaagataaccactgttgctttgcgggcatctcatagaagagaggagcttcgttgagttgaaaatgtttcaaggacaagtgatgcgaattctgtgtgatgccacaagtggaaagaatagcgcaaatgtggcaagcaaagcaatgcatatgcgctgcttttcctggtaggtatgtggcattgctaggtgcggtggtagatgtccaaggggaagaagcacaaggaggcagccgcctctagtggcctcgccactcactcacactgcccccggagtcttttgctctccaccacctcccatgtttcaaggtaaattcgtcgtggtggtttcatgccttgtgcatatcaagaaagatgtacttaaagttcctgatgccttgcaacgtactcgagtttatatatatatatatatatatatatatatatatatatatatatatatatatatatatatatagagagagagagagagagagagattatgtgacggttgattgtgtttcttccttagaagttcatatgctcacaggtgctaaagtttcggacagtcaaatgtatcggcaataccgtatagaggatgcacgttcattttattactccctccgttctataatataaaaatctagaaccagatatgatattttatattacaatgaattggacagtgatcattttattattttcttcattccataatataaaaatctagaaccagatatgacatttcatagtacaataaatctgaacaaggaatgtcctgattcattgtgctatgaaatatctcatctgatgcttacatttctatatcgtgggacacggagggaaaaactccaaagtttgtaaagtagactggtagcttcatagggtgtgggtgtccctacattctgcttatatacaatcacaaagggtatcattgctagctaaaaacagtcacagtacaaggtaatctctccgtcccataaaaaatcaatctagtactagatgtgacatattctaatactacgaatctagacatacatatgtccagattcatcatagtagatatacatatgtacatatttatcgtactaaaatatatcacatccggtcatatgtttattttttatgggacgaagagaatagatgagcaaccgggctgatttagggtgtgtttgagaagaaagagattggggagattgggaagatacgcaaaacgaggtgagccattagcgcatgattaattgagtattaactattttaaatttcaaaaatgaattaatatgattttttaaagcaacttttctatagaaaatttttataaaaaatacaccgtttaatagtttgggaagcgtgcgcgtggaaaacgaggtgctttctcaccctatatcacacccaagcgaacgcagccttaatatacacctagccaaagctacccgaccacaactgttctactaggggtcagtgattcagacattccgtactcatttgttcataccatcttcatttcaaaatattcatttcaaaatatatgatatggtttacttttcgtataatatttgatcattcgtcttattaaaaaattaatataaatatgtttaaagaataagttaagtttgtattttatttgatgataaaataattcacaataaaataaatagggacatatccgatgaaatgagctaagtgttggaaactcatgaaaatcatacttaaaagtttagtaaattcatgaaaaaaatactagagatgggtgtagatatgaaatacattctcaccaaatcccagctccaaactcaacttcgtttatttatgaaactttcagatacgatttttacgaggttttaacatttagcttgttttcacactttgaagatgagtgattaaatgttatgtaaaaaatcaacgacattataaatttggaatagagggagtatttgccttgcaccctttccgacagttgagcagacgaaagtatcgccgcgacgccgcctcgttgctttttactcctacgtggctacgtggtcgtctcctttggccttggccgattgatcgatatcaacattgatcttttgacgcgccgaataaataggtcgcgacgttcatgagaaaatccacccggtattggctttctcccttccgcgtaccggatgctcaagtgctcaacttggaaacaccgtgcttgcctgtttacacataatctttaattttctgcgatgattgcctgtgccctgacacctcgctgcccgtccgtactagctttataagccttgtttagataaaatttttttaacaaaaacatcaattacacagtttgcatgtaaattacgagacgaatcttttaagtctaattacgtcatgatttaacaatatgatgctacagtaaatatttgctaatgacagattaattgggtttaataaattcgtcttgcagcaggcgaaatctgtaatttgttttattattagtctatgtttaatactttaaatgtgtattcatatatttaaaaattttacacacataaaactaaacacaaccacagtgtagtgtgcacctaaagctgggcctcatgtcttcaggacaagcaaggttccattgttagtctgaaacagagataagtgaggcaggcagctgagaggtcactgtttttagctctccaggcgtccagctagttactgtgttggcgttcagagagtgacacacacacacaccgtggagcatctgcatgcgtcgggctcgtcg

SEQ ID NO: 3764 - DNA, 13362 bp, Oryza sativa
taatctaccatggtgtgtgaaatgcaataacagcagtaaggtatgaaactattttacaatttaataagacatgacatacactactagatcattagtgctggctacaaagggtatcacaggtggttgactaattcagaaagttaagaattttatcataaggatgtgtcatgctatcaataacatgcttcaattttgttatatatttgtcgacaaattttatcctaaaaatttgacagatgtaattacagtacaatcatagtgtaattacactgtaacttgcatgtaatttcactgcaacttacatgtatgtaacttgtatgtaactttcacatgatcttgaaccgttagatttgttttaagatttgtgcaagtgaggaaggaaaaaggtcacagcacacacacatgtgagaggattcattcccacgacctccgtttcaccgaaatagcatgttacatagagatttttgaaagacattttagttacatgcaagttacagtgtaattacatcacgatagtactataattacatttttcaaatttttaaaagaaaatttgtcgataaatgcgtaggtgatcccaacatgcttagcctgaattttcagctaccatattatggtgtgtttggtttgaagattggttccatccgtcatggtctactggtcttacataccaaggacagctgctgcctgatatattttgatgaataagtcagtcctggtgattggtttgtggggaatctaggcagaagtggctttggtgatggatgacacggacttgtgacgcagaccatacaattcgtattcggttatttagattaaacacaaatcaaacacactgttggttagagaatctggacaatctaagcaaggcttcaggtaagctcctacaagacctaaagcctcagtacagaggagatcaggagaagcttttattgtacttcctccgtttcacaatgtaagtcattctagcatttcccacattcatattgatgttaatgaatctagacatataaacggaggaagtagtaaacacagcaatagcttatcccagttcccaactagactgattctttttagcactgcacgagatttcaggaaataaacttttgttctgtatgcactatgcagttacttcagaagtcttgcgcatatttgtatgctgctacttctggagttttaatataatagtaagcctttgtacgcagttatttcaggtgtcctggcattatattatctacctaatgagcattaatagtcaaaactgtgttcattgcatcatatcttacaacaataactttctacagagcagaataaccaagaatgctctacagaaatgatctcctcaccaactgatagttcgagatgcattttaatggttctggtgcaagcaataacaaagagaacttagggaatgatccatgtaagcattccatattacagatcttccaaaaaatacacaagctatttatggacagacaggtgatggacctcactcgaacaaaataaaacacacttagatttagaaagtaccagccaaggctgtatattgcacataatttcagtttggtctaagtgatatgtatggattccaacaaaagcaagattacaaacgagaattaaacataaaggtatcaagcaaaaggcgatgagatataggcagaagaagttaacctgcagaaagccaggccataagtagcagctctcagtaacgcatgttggcgtgaaatatcaaactcatggccagcagcatctatacatgcttcaattgcctcaggcaaggaagaagaaatcaactgataattatcgtatgcctgcaagtgtgaattattgttaatgccacgtgtttgattttcagcaaaaaaaaaaaggtcatttgtgagatgtcaaaagagcaaattcccaaataagtttttttttacagcatatgaaatagcaaacaaccctgatataattcacaagttgcatactatgaatgccataaagtgcactaagctaacaccaagtccatgacaaatgtagaaggcaaacatgcactgcacaagacataggtatctacataagaaaaggaattaaacagtaccttggcactttgtttgtcataatgatctctagcatcatacagcaatgctgctggggacatgcttccaatgccaaaaattgatgtagtggaatcagggactcggtgtaggaattccatatttgagtttgagaggattcttacaccatcacactctggaatgagctttatgggttcatcgtaattatacagcaccggatctccatttggaccaaccatcaaaagagctgctgaccagtaaagaagcacgctgtccaatccacaccaagctatttgatctggtggcaatgcggactacaagattaaaaacaaataatgagtagctgtgcaaaagtgtacttatactatcagtaaaccatactaccgcaaaataaacacaaaaaaaagagcatatataacctagaattgctttgtttgcatgctatggcatctgcccatgattgtttaaagacctaggatcaacaataaatttaaaagaattatcacaactgctgcacaggttgcagttctcgttgaaaataaacagtgataacaataagattacaccaagaatgataaaaaaataatatgattgttaactcggtgagcgttgcatgtttgttgaacatatatgcatctttgattaaccagaacaggtaaggggggaaaactactactaccctaatgtatttgaggtgctatgttatcagacacaaaacagcaatgtaaactaggaaacaaattagcatattcaccgccacttcctcaaagtagtattaacctcattagatccattcagtatttcagttagctgtagtttgaatcaatctacatcgactgctgcacgcctagaacgaacagagtagacaacacaatgcattaaacaacttacatcacactcatactcgaagattatcttggagaaatccgtagggatgacgagcaggcgcccatcgtgcgcaaatgcggcaagcagcttcccattgggggaaactgccatcttctgcacaggtccaatctccagctccaacccgagtgtctgcacatcatcctcatcaaccgccagcactcgatcaccaaccgcaagcagtacctctgggctcccggacatgacaaactgcggctccaccacagccatgcacagcacctgctcgtcctggccaacgcaagggtcggcgaactcacgcgggtgagggtccgcggcgtcgatgtccgtggtcaccacgacgcggttgtcctccgtgaggacagctacgccgcctccccagaaggcagcgtcggcaacgccgccggaggacgtggggagcaggggcacgggggtggggctagggttgggcttcagatcagggaggcggaagcggaggagggacccatcggagagcagcgcgacgaggttgagggagctggagaacgcgagcgagtggaggcgggggagctggggcggccacggggaggacgcgatggggtggccggaggaggagtagaggaggaggcggcgccgcgacggctccgagtggagctgcacgatcttcgagtcgtcccggacggcggcgatcgggcccccgaacggcgccgcggcgacgatgtgcgtggagaggtcgaggcggccgagcacgccaccgctccccccgccgccgccgccgccaccggaggtggaggacgaggacgcggcggcggcggaagggggcgaccagggcagcggggagtagacggtgatgcggcggtagaaccggtcggagaggaggtcccactccgccgcgacggagacggaggaggacatcgccggcggcgaggcggcggcggcgtcgcgcgcgagatgggctgtgaggaaggaggtggactgtctcggggatcgagacgggacggttagtcccctgacatgtgggtccaatcggatgggaacgagctccacacggtagcccattgaaaagcccagatgagacgacaatgagcagcccacggatgcggggtgcgggagaaagcggcccaaacaaactaaccacacaagcaaaattataggagtagaagtaaaattgctaagatcctcgatctgcaagttgcacgggctgctattatagactacctagtgggggattaccacgtgaagtttataattcattgggagttagatttaatgcgcaactctgaaattttatatgtctatatgtaacattatatgtagaagtatatttatatttcatatacaactcttaagttctatttctataagatctggatttcatatacaacccttatattctagtattactatatgcttagattttatatacaactcttgacttctatttctctagacataattgaaatttgtatacaactatatcaattaatctatacttttaatttggacacaccatgatctaatgttaagatttttttctttgattaatgttgggtgagacgcgctgatgatggtgaatacgaattttcgtggcaggccgcattgcgcctttcgtggcagactaaatacgaatgataatagggtcaggaaatgctgggcatctgatccgcattgcgcagattgcccagctattgaatcagcagaccacatcgttctacgctgcaagttggcatctgagatttggaagaaaatcaacctatttgatcaggccgcccatcgttctacgctgcaagttggtatctgagatttggaagaaaatcaacctatttgattaggccacccagagtgcagatatactccagttcgttgaggagggactgttggttacaccggcgcatctaaaacctggatggcctatttgcttcgctgcttgttcacacaatttatggaaagcacgcaatcaaaaaacattcaaccaaagagagtatacagcggctgccgtgatgcaccaaatcagagaatgtctgcaaatgtgggagaaccgcgtcatgccacaatgccggactctaatgcgcagttgggctgccttgctagcatagcagctatatctccctactctttttatgttcttctttatattgttttctttttcgtttctctcttctttctcccttctttcttcttccttcctatatctccctactctttttatgttcttctttatgttgtttcttttcagtttcttttcgatctttgtacttctgttgtaacaccttgactaccattaataaaatggttataaggtagagcctctctacctttttcagtcaaaaaaaaacatatcgccgatgtctgatgagatgtggtggttgcgatggcgagcatccgtgagcagagcggcggtggcaacgagaagaccaggcacacacgagttacttagggtgacaagaagagtaggcaaatagtagttcttaatgcggggacaatggtggagctagtcatggtggtgacaacccccatagttgaggaagagaggcaagatgagagggaatggacgaaggaagaagattgggagaaaaaaaataaggacaattatattgaatcatggacaatgtggcaagtgagaggatacccacctcaactttgtggcaaatttactaagccacttaactatgtgaaaaactaattaagtatgctccaacttttgaggcaaactacataattttccctttaatgttaggccatgtttttttggaagctcaagatgtgacgagcaaaccggtgagaatatggataatttgggtctaatatttttactagcattttattcacagtatatgaaaaaaaattgggttgtttggaggagccagggattcttgaaggagaatctcaatttctatttcaagctatttctgtttatgcatgtttttttaagatagttctgtttatgtatgttggctggatgacttagcagttctcatgtctaccctaccccatgatgcataatctcttttgacgtaccacctttcctatcgtatcaagcttttgacgcgggtagcaatcaatttttatcatgggataaagcaattgaaaaggggaatggaaacagtattctgattttgtagagcatctctagttttgggtccatatgcaagcaaaggggagaacaactttcatggatactatactcgcttcatccttcactttttccccattcatgcctaaactataattgactgatcaatcttaaagaagtttaatgaacgtacggtatcatgatacgaccttaattacagatggcatcacattgttttttaactgcaaagtatgtctgaactatctcttttgataagttagaactagaagcatgttatgcgacattgatatcaaaactagaggtagctaaccgtgatagtgttatgatatactcatatatgtgtgagtttagtttttttgcgaaatgtacaaataaaatattctcccgagaagacgtagtatatgtgtatatgaaccatatacatatgtagcctagtgattacagtgacctgagtagcaccccaaggtcctgagtttaaatctccatagaagcgaatttcagattgggttatttgaggctaagtttctatttgataggctaagttcctaatttaaaaaggccgcatatatccagttggatgtaaatgctggttaaaaaaaatacccttctctaaaaaaaataaaccatatactactcgcatcaacataattaaatcctgagtggtaattcaatcatttaggtttagtctgcaagtagtgttttatttacagccatcattgggcataagaatgcccttttattttccttcacttggagaaaattaagttgcggttgttttttaataatggattttcattaattcagcctcaatatccacaaaggatatacacaaataaaaggatataaaagcacttagactcataccttaacaaagaaaacatacaaccataaaaagaaaaccctacgacctcggcacatccctcctttccaacacctctcctgaaaccgtcatattaggcgagtggaaatcgtctagtcgccaccgcccatagtgcgtcgttgctacaaacctccgctggtgccattttcatccgcttcaaattaagcagcggttgttaccatatcaaattgtttgaagacatgcagatcaaaaggccaactggtgcaattacaaaaataaagaagaaatacaccagcaactaaaatgtctttatctcaacctattggacttgcaaagcaagcatcttggctacctgaagaattgatttttttttttgcttcacttcaattctggcagcatgtacagttacaacttccaagttcagtgaacttcactgaccatttgtcttagaatgtagatatattcagattgggctcacaaacatgaaatttcagcagcaaatccgaaagataaccgaggttctagcgagcatagttggtatgatcgttttgcaaagcaactgcaatttgcaaacagatttataaagagccctctaacaattgtctctggtgttatttgcctccctttttctttgtgtacagataaagctaaactgatcattcttcttttaaaacggatctgttgtcacttagtggaaaagatacacttaacattgcatgttgtgcttatactattatctaaaaaaagaaacactgaaatgacagagtttgtgcaggggtcaggaaagcacttttttgtaacaaacttttgtaatcattctcttgaaacttattaggtgcaacatacatgaaaattcaccagctcatccgatattctgatcactgaaacaaggataaaagaggacaagcatgttgcatgtcttcagattaacataaatgcagaatgcagtgcctatggaagcacatcaattggacagaaactgtgggggacctgtatgggcactagcatatacaattatacatgtcatcgcaaaatcagcatcacagtttaacaaaaaaaaaagaaatatttcgaagcatcttacaaatctctattattcataagataaaaactgctaatccacaatcctaatcagagggcactaatgggtctcagcagtttattctaatcctggacccaacatgaaccgatttccagtggcgatcattggtgaattgcggttgttggaaagcggatggcgagcatcattacgcttcaaatgaaatgcattttcatgatctagctatatagctagctaccgactcccttatattctaagaaagtaagttggtgatcaagctgcagcaaccgtccgtgtatcagacattcagactatcagtgcttgcaacagcttgttgggctgaactgtatcagttttctgcaacaacatgttggtctcaattgtcctagtttgtgtgtaccacaatgcaagattggaaaatacgttgcatatcgtattcttggagcgatatgttggtctcaaatccaactgtatgtaagttgtagtgttctctggtactaacaagattcagagttgtggcattagggctctgtatgtagtgctaactttttaaaaaatgttcaagctttttgggatttagtgttgctcactgctaaagtgaaagaaatgtgcagaccaagatcaaatgctctgcctacacatctgcataacttgtgaaatgagcttttaccattgacttgtgaaaaagccagttttatcactgcatgcagagatgaaatggaacatacaaacaatataggactcattatcttaggtgtgtttagttcacgccaaaattgaaagtttggttgaaattggaatgatgtgatggaaaagttggaagtttgtgtgtgtaggaaagttttgatgtgatggaaaagctggaagtttgtgtgtgtaggaaagttttgatgtgatgaaaaagttggaagttttaaaaaaaaagtttgaaactaaacaagggctaaagcatcatgggattgactgaactttacaccttacagaggagaagaaccatataatggtggcatggagaccaaaggctgcaatgcattgaactgctcaacctttttcactggtctttcactggccatgcatggatccatggacaaactgagcattagaccaggatctaatgagtgagactgctgccttccaaactcccaagtatacaactcatagcatgtatgccatttgggaggccggcgtttcagtatgcatgctttgcgagtatataattttgccagcgtgtgacgtttgagttggagatttgtacaacattatcttgtcaattatcggtagtctcccatgtctgattctgccttggctacttaacgttaggcaaagctgggagaaatgattgtatttgggagtataaaaatggccagtcattataagccttgtcgcctaattgctgttcttaagcactttatctagctctttctataaacccatcatagcaaactttaactttttttagagtaaaagcgcggcatagacagtttgatgtaaacattaactaacaacttaacgttatctctgatcttgtggattccttcattattcagaaagtaatggttctgaaaaaaaaaaaaaggaagtgcaaatctttcactcgcggaattgcaggcaccagcatacaccaactaatttcacactccatccgcaattgatctgcctacgatgagtaaccgttacggacaatcagctcatttggtcacaaaacggttagttctgttaaggcatgattacatttacacgcatcactttttttgatgcatcactatcacatatgcacaccatcttgacatacatatataccgtcaccacttcacacagtaaaactccactcgtcataatactcactcgaccactgcagcgtcaagaaacgtaaccaatgatcatatggttttacaagtaaaaacattgagctccaaaaatgaacaactgcgagcgatagttagatgcaaaaatcctccaggaagagaagaacgaagttctcaaaaaagaaagaaagagaagaatgagacagtcagagtagggctcttgacatggactcgttaactgaacttccattagcaacgacttgctagtagctttgcggcttcatacgccatgcaaatctcccagccctatcaatcttttcatctttccctttgcagccaaaaatcacacggatcaaaatgaaagctactccgtagctagccaggaggtatcttggcaaaagccatacatggatttattgaagcatcaaacatgcagacagagagttggtgagaaggcaacaccaaatacattgtgaaatgtgttctatttatgtgaaagggcatgtagcggtgtagcctagtggttgcagtggcctgagtagcacacaaggttccgagtttaaattttcataggagtgaatttcagattgagttatttgagggctaagttccctatttgataggctaagttcctaattttttttaaaaaaactttatatatctggttggatatagaggctgggtaaaaataccattctctaaaaaaaaggtgttctatttcccattttatactgcttggggagtaaaaaagtgttccattaaatttgaaaagatgagttctatcatttctacaacgagatgatttacaatgatatttattgctatagaaatcacatctaaattgtagaaatccaatggatcgtatatatttatgatatcactccaattactagtagtagaatgttgaggtcacttttactagtgataatgttggtaatagaataccatgaaaaatgttaaaaagcgaatttctgctaccccagacacctggccggcactccagaaccaaacgtttgatgactctctgcttttgcgtttcagctggaagcacaacttcgcgcgtagctagcttagagcagcaaaccgttgctcaccgcaccgcaccgcaccgaaccaccacagcaaaagcctctctctctctctctctctttatttttttttaatacgcaagaagcgcatctttgtattaagaagaaataaatgtacgtacaaaacaggccaaaaagacgaagcaaggggatagagtacagaggagaaccaaaagactaatctccaactaaattttacgacccttctccactaacatgagctcctctctctctctctcaccttcccggcgcggccggcctaccacagccatcatcacgccatccacggagcggcaaaagctcggcgaaatgcgcccaaaagcgcctctcatttcatcagtatgatcaccacccccggttcccacacgcagcagcgcaaagtccacccccgtagtatatttgcaggagctttcgctgctgtgctcatatcaaaatctcccccacgggccacacgcggcgacaccggcacaccaactgagccctcgttgcttgatatagatcattagatcgttcccattggttggctacaaaggttgttcgccatcttcgtctctcctgggactggtagccaccgcattgtgaggagagatttcagaaggcgatttttggttctttagttcagagttcaggcaggtttctctttcatgttcttgggattctgtggcagtgagaatcttggcagagaggaagaaaggatgcctttgaggtagcatgaggtgaggtgagtgagtgaaggagaggggattcatacggatttgcagcctctcttctcctgccattgttcagtccgaggactgcattgtgtgtggttgcccttcttcagtttagcagttaatttcactgccaaggcttgatttgagggttcgtttttgaggaactcttggtgacttttatgttctaggagtggctgaattgactagcaaaatgtttgtatctgcaagaaagagactgttctttctgttcataagttctctacttctgtcgcttcttgcgccgtctgatggctcatcaaactccacagcgaatctcaatcaaagccacaacaagaccggacgtactttggaggtatcaatatttttcttgcatccaagatttctcaatcacattctaatttgtactagttctcaattatattcagggaataagtcttaagtgtttcttttaattgttttggtaaaaaatttgttagcttgctgattgcaacaattacgtttcttgcagatgacacccaaagtattatttcaactcaagatgcatgcattgttccactggtcttcttttggtttcttgatgcctgtagggataatactagccagaatgtcaagcaaatctaaaagcggcaggagcatcagagtccttttctattgccatgtcatttctcaggtctgcaccttctacaggacataacagctttgctttaaagtttaaaatgttcccttttcttgttattttatagaacaccagataatattgtgtctgattgagtgttgcagattgcagctgtccttcttgctaccggcggtgcggctctttcactaatgaactttgagaattcattcagtaacagtcaccagagagtaggattagcattgtatggattcatgtggctccagccgcttatcggtttcttcagaccagaaaggtagaagaaaactactttctcatgattcttacaaagttttgtctctaggatttatcctttttgtgtttctgcagaggtgttaaggtaaggagcttgtggtacttcctccactggcttcttggcatcgcaatttgcgcaactggcattacaaatgtctacattggccttcacacataccatgagagaaccacaaagagtgtgaagctttggaccggcctccttactttcgagctctccttactgcttttcttctacctcttgatagacagatggagctacatgatgaagcaaggaaatgcccctatcgagcagctaagacctaccgacaatcgcaaaacctatccgacaactcttcggaaggaattgggtatggtgcaagagtgagatgcccaaatgaaaagacaacttaggagggcaggtgctgtaaagtttgctgagaaagatggtaatgctgctcaatggtttggtaatttgttggtttgagaggtgtgccttgaacactgtacagttctatactttattgagattgaagaggattatggagccctctggtgctgtatcttgtgctgtgcatttaagattttgttacaaaccaccgtttgtactgtttgtgaaaaagtacagatatgcaacatttatatttctcaggcaagaaattattgtctactactatttacgttctttttgcagacgttttttttttcaagtttgcagggtcagtagaagcaacagtgcaacactttcccatgccaattctaaaatgattacaaatatgaaattatagcacatatattattttgtaaatctatatgcaagtatgcaagttgaatctctgtataacatcatacgattgtttcagtttcagaacatcattatcgtcgtgtttagatccattctatcgatgctccctt

SEQ ID NO: 3765 - DNA, 510 bp, Oryza sativa
agaggagatcccttgcttgccattggattcctctccaattcccttgactctttcaataaaagaaaggcagcatcctgcaatttctctcgatagtttaggaagtaactcatgctaggggatataactaactgtagcatgttaagtttgtagaaaaaggagctaattgtttatttcatggtaagcaaaatggaagactaagataacatatgattttcaactgaaataatgaaagcaaactagatatgtagcaaacatcacaaacagtaatagttatgcacctacctgaagtctccctgttgatagaaagaagtcctttagagcttcatgcttggaatgtctgtgagcaaaacagaaacatatgcaaccatgttgaaccagagctatgcatataaaagatataacgcaataatcagaaacaggacagaagcatcaccttgcatatgccataaacaaatcacgagccaaaggccttgcattgattacgccaaaaaaatccaatggagcactctg

SEQ ID NO: 3766 - DNA, 8055 bp, Oryza sativa
gtgcacctgcgttggttggttgcagaagcgcggggggctgttcgtacgtgcgcgcgtgtgcatgctgcatggagtgcaggcctgcgcaggcagccccgtgtgtgtctcctcgtgggggttcggctggctctgcaagcccacctgcctacacaaacaccaacatgcattgatgcgtgggagtatacaggggggagagtgtgtgtactgtgcatgtgggtgtggtactcgtgcgcagcagaaagtgcggaagggaaatcccgtcgtcgtcgtcgacgcccgtgtgggtgtgtggcagatgtgagagagaaaccatttttttctcgacgggcgagacagagcagagcagagagaccaccacaggactgggagaccagaccaccgcaggactggagtgaatacgaccgagaaaaaagagggcggggcgtgtttacctgtttacccgttctctgctctcgccctggcctccagctccctccaatcggcaatcgctagggcgtttggtttgacaggatcttttttttttctttctaagaaacttattttataaataaaccctcgaaaaacttatcaaaggaatggattctcgtggcgctagcaacaatcagcattatttgcaccgcgctccaatataacggcgtcaatgatattggcatcattcctctcgccccctcgtgaaagctaaatcactcatgtaaatagattggtgccaattacgctaacatcgagagtctatatgtaaaaaaagttgaaaatggatatttttttcataacaaactatttagaaataggtccttagcgcttaggacctatttgtaagaaaaaatattttagtttttttagattcttttttataaataggttctcggttttagtgtcattagcgtcaatcaaaatatattcaagttaatttaataaaattaatttagtgttgtagatgttactaattttttctatgaacttggacaaacctaaagaattttgactaacaaatagtcaaacgactttacaaataaaatggagggagtagcttctttaccctaagattttctcctctccttttccccctaaaactttgcctaaggttttatcataaagttgttagccattcccggatttggctagatctagcaagaacatgtgccaaagttagaaaatgaaccaaacatgttctaaccacgtttcccttttttcagaccttgttcggttatcctcaagaggaagggattgagcaggattaattttataccgcaattggtatgaaataaattcttttcaattctctcttaattttcacgagggatattaactgaacgatgactaaatgagtcgatctcattcaggccgtctttagttccacgctaaaattggaagtttggctaaaattgaaagtttgaagaaaaaaagttaaaagcttatgtgtgtagaaaagttttgatgtgatggaaaagttgaaattttgaagaaaaagttgagaactaaacaagacctcggcttatttccctaccatgggacaatcgaaggaacaaacaggatcgtgattcatgagtagccgcgtgcgcctacaagagaccctttcagataaacgagccaatagccggattttataaattaacatacgagaaaacggccctttcaaacacaatagttaatcaatttgaatcacatatagaatttgttcaatataccatttgaataaaagattgcgcgtctatggaatacatgaatccatgagagtttggacggaatctaacatgagatctaaccttatatgaaattcccttttcaagtattcgtttactactttccttgacgggagtaagcctaattataagttactatttaacatccgacagaaattttgggagcaaatctgtcaaattttgagccatatagtatgggctttaaaatccatgcacgctggatgtgataaaaatcaaaacaaattacgtgcggtgagtgtcgaaccagtcacaagtagcttccgcgtgcacacgtcccccactaagtggcacaattttttcaacctacgtaccactcatattctacttaaatacataattatatgctacttacattataatttaactatataaataatcatgtcgtagtcatatttaaaagaatttttggggatttttttaatgatagatagaccctaataataaagccaataattggctctatcttgtgtatatcatctataacaaacttttaaaacacagacacatcatttaagcgagctaacgaaaaatagaaagttgaagtttggagttaaataacgtagccttatttccataaagtttgttttaatttgtgctataacgacatacaaatatgcagttagttttgcttctctcttttttcttcttcaaacttaacacaaataatctggttggtaactcttatatcctgcggcatcaccttattgcattcgcttctattaaaacatttgtttaaagatacggagacccagtaatactcctatttactttagtactacctctgtcacataatagatgtcgctttaactttttactagcaacgtttgaccattcgtcttatgtgaaaaattagtgcaaatataaaaaacgataagtcatccttaaagtacttttgataattaagcaagtcacaaataaaataaataataatttcctaatactttgaataagacgaatgatcaaacgttattaaaaaactcaaagcgacaaatattttaagacagagatagtaaattactactccatgttgtggtgataatttagtgggtacgcagatctgaatcttgtccgatgaagttatctacgatttcaccgttacatagtatatggtgtttccccgtgagctgcaccgcactgcattgttttaaaatggcgttcccacacttaagttcgtcgcgtgaatgatcgtgtgaacgtgtttgtttgtgtcccctttgatcgatccgcggcacggaaaactttgatttggcacgtagcggtacttaaaactgaggttgatttccggtctttaattggtgatcctgaccgattgatgaatagtttttgttcgattttattaaacaaaccacagcaggcagcctcaacttctgaccgatcggcactttgatattggtcacagttctggatggatgttccccgaaccatacaggcatacagccataagcgtgcccatccgtggcgagcaaaagtgttgatgggctcatggctcgatgaaatcttcggcccgtagtccataaatgggtttcagaattcgcaagtgttctccctctcggcatcttcggcccagagtccataagtagttcaggtccttttaatttatcgctgagtctaacattcatccctgaacagaaataataggtatggcacattccctaactcacatgtcacagccattttagtctcttggcagtatagtgaccggttttagctgacgtgtcgaagggaacgcatgtgttcccacatgtcaatgcccaactgttcttcctcctctccccacctctcttcctcactcttcccaccttcttttgcaaggcggtgcacaacaggtggtgtgtagagggcgcgcggacaatgaggagtgaggcggcggctgccggcgggaggccggacgaaggaggagcagcaagagagcggatgagaccaagaggagcgagggggggttgaggatgccgacagaggagtggaggtcgccaacatcttcaaggttgtttccctcgccgatgagccaccatttgttctcggtgaagatttgcaacaggatccccacgcacttctccgtctgccggaacctcgcgcgtgctcctgcttactagcatcactgccacatcgccctggaaacagcctcttcctcttcccaaccttgccccaccccatcattccattcgccaatcacgccagtgttgtcaaactcgagcttgatggtttcgtccactcgtggccgccatcttatcgcttcccccacggtcactgctattgaggtccatcaaggtaggaggttgaagaggatggcgccctgccctagcggtcaccgccaccactgccgacctgtgcggttgccttgctccaactgctcctcctccacccgacccccaccgctccttctttcccctctcagtatccttcgctcctccctcattcttctcagcctcatccgctctctcgccgctcctcctaagcccggcctcctgcttgtcaccgctcctctccgcgcctcccactgcgctctccatgctgcccaatgcgcatcgccctaaagatgggaagagtgtcagagtgaggaagcgaggtgggagacaggggcggagctagagcgaaatggatggtggtgccacttgcttaatttactctactttatatcgagtttaaactgatgcgggtacctaagtttgtattgagggggtgcatacattgagaaaataatgaagtatagctaaaatttttttttgaccgggttcctaaggcacccccctaatatatactagctccgcccctggtgggagaggagggagaagatgtggccgatgacatgtaggtcccacttaccacgttagtgaaaacagtccactatactaccgatgaactaaagttatattgtgagttgggggatgggcaatacccggtatttctatccagggacgaatttcagactcagtgacaactgaagggatctaaagtgaacttattgcttttgtgatggtttcagcccatcggtagcggcttcggttgagagacacggacgcagtaaccggcaagcacctcgctgaggcccagctcgctttccacaattactcgtacatcgacatcggtactccttgggaagagcagctacatgtcgaacccgttgttttatggacttgggagtgatgcctgatgcggcgtttgctcaaccttgtggaggatttacgtgatcctcttttcctcagaggctcagacgtcagtgttcacgctgttacgtacgcccgcggtcgtcacgaccgcagcgagcgcagccatctccccccctcaaaaatattcagaaatgtgtgcaccgatagacacaccggacccttgctcgtcattcgcttgcgaactgaaaaccaaacgaccggtccgggtgacacatgcgttttgccccggtcagcaagacgaaaccaagacccggacaacgccaccaaaaccgtctcacgtcaaaatcgccaccggctcacggctcgcccgctctcgttctccaccttatcacccaacccgtcgtgccaatccacacacacacatcgttgcagcctcgcaccgcccgataataatacgaccaaaccaaagacagagcagcgcgacgcggggggcaacaacccgcagctaaccgcggcgacctcgtccgcaccgcgccacgcgaccacactccacacgcctttcttttcctttttcccccaaaaatccaaagcaacctcgcccgaaaagaagagagaacgcgccgcgccgcgccgagccgcgtgggtataattgaagggaagcggtgcgctcgctcgctgcatccagctcaacgcgcgggggaggcggagcgaatcggcggatcggtgggttgcgggcttgcacgtagtcgaggctcgagaggagggggggatggcggcggcggcggcggcggcggggtacagggcggaggaggagtacgactacctgttcaaggtggtgctgatcggggacagcggcgtggggaagtcgaacctgctgtcgcggttcgcgcgggacgagttcagcctggagaccaggtccaccatcggcgtcgagttcgccaccaagaccgtccgcgtcgacgacaggctcgtcaaggcccagatctgggacaccgccggccaagagaggtaccattactttgctctgcttccatcgtctccaatctcatctgtagcttggctatattcaccatcttcccctgcttctgctctctcgatttcgctacttgtagattgattggtgaccatcatccctgcttctgttctctcgttttcgctactagtagattgattggtgatttctagtagcacaactccattttcaatcaacgactccatttagtccatcattggtagaacgattcatgtgctccagtgagcaaaatcacacgcatggcttctcttgcgcatttccacaaaaacctttacgtgttcaactcgctatgcttcacttttgcgcaatggattggattggatatccctttgatatttggattgacctcgttggcttccccccccccccccaggtaccgcgccatcacgagcgcctactaccgcggcgcggtgggcgcgctggtggtgtacgacgtgacgcgccgcatcacgttcgagaacgcggagcggtggctcaaggagctccgcgaccacacggacgccaacatcgtcgtcatgctcgtgggcaacaaggccgacctgcgccacctccgcgccgtccccgcggaggacgccagggcgttcgccgaggcgcacgggaccttctccatggagacgtcggcgctggaggccaccaacgtggagggcgccttcaccgaggtgctcgcgcagatctaccgcgtcgtcagccggaacgcgctcgacatcggcgacgaccccgccgcgccgccccgggggcggaccatcgacgtcagcgccaaggatgacgccgtcacccccgtgaacagctcagggtgctgctcgtcttgactttgactcgctcaaactcatcgtcgtcgagctatgcaaattgccaccgttcacagctttgtttataccgtgtgttttcgtcactgctgattgatactacaaacttgagaattgggatcaaaaggttgcattttgaagacgtgtatttgttgatcagagatagcgacatgcattttgggaccggagagaaatgagagactaattcaagctcgacagataatttgcccaaattttgatataagccgtggcgtttcgagaaatgccacccagatagacgtgcgacggatgataatttgtgacgaacgatgcataaacaatcaaaagacgaatcaaggcaatcaaatggacgtgcgacagataatttggggcgaacaatgcataaacaaacaaaaggcgaatcgatgcaatcacgctccgacgaccataagaatctttttggtcctcccgagttacggaattaggagaaaacaaaatgtacagaagagcacatgttctgttctgatttttaatctgatggtagatacaatgtttgcctagaaatgacattgtgagtttttttgtcggtccgccttatgatacagatgggggcgaactgagtaatttaaaatattctacaccgaagaaaatgatcaatgttatggctgtacagtttaggaagctgagttactcccggatcacaacaaagtgagcaacaaatacaggtagcagaatggtctaccgtttcttatatacaaaattgagctgaatatttgtcggaagtaaataactaataagattattcctgttcgttatccacttcttcttccggttgacaaagctgtcgtcttgcagatggggcataaattctttaccatcaaccattgttttatgcaatcttcgtggtacctgtggccacagtcaagggttccaatgcattctttaacctgatactcttcctgcaataccaagaaaagatttttagaacaaggatatgtcgatttgactagactaaatgttggtggatgagaaaactacataatctgataatgcagataaggaaccagtgcaatagtatttgtttttctaagcccaattggaacttatggcttgttttagcaacccacacttgtccctcttaacacccattcaaattccttaagcgcctgacaagaaatcatgaatgatatttaccaagacgtactctcaagtaactttatacaatttgagcaccgtggacctgtccacctttgcaaatactaatttacactgcacatacttagaaatcatagtacatcttacataaaccaattctcttgtaagttttcccacctgttggaaccatactttatgggtgataaaatggaacgttgcatattactatgatataacactagccaattccacac

SEQ ID NO: 3767 - DNA, 8503 bp, Oryza sativa
accgggagtaaagagtaccccgaaccgcgcgctactcagttattatccgcgcactcctctcgatctcctcccctctcattactccttctccatcccttcctctcccctttgccctcccgttcctccccttcccctctttgagtggcggccgagcgggagcagcggcgcccggcgggagctgcggcggccggccgtctgggtgcatcaggcgggcgggcgggcgtggcgcgggctggcgcggcgggcgggcgggcgggcaggcgtggcgcttgggcgggctggcgcggcggccggccggccgagctcgtgcggaggccgcaaggatggtggccgggaggccggcggcgccctcctctctgctgccgattttttttgaatttttgattcattggatttgatttgtgatgtatgtgatattggatctgatctgggagttgtgatgtatttcttttaggatttgtgatgtattttttgtttgagattttgtgatgtgatgtattgtgatctgtgatgcatttctttctaatatgtaatatatttctttccagatttgtgatggtactttgatttggggatgatttgggaatatgatcggggatatttagggagcagatcgatttgagaaaaaaaaataaccgggactgctcctaccatctttagtcccggttggtggattttagtcccagttattttacccgggactaaagacgggtatctttagtcccggattcgtagtcccggttgtataaccgggactatagggggttcccaaccaggagtaaagcccctttctccaccagtgtaactaccaccggagaaacaactacttcggagtacttcctagcatgcatgcatgtttgcagcaggtcagcaatgctcttcagctgagtagtccttttatgtcacgttcctgtacaccatgatcgctagcgctatatatatgaatctgctagctttgctgtcccattcccatatactcatatttgccacatttaacacgaaacagtatgtgtgaatcttgtgacatctataaaaaccatacagaactgagggagagaacaatatacacaaattttgacaatttgaccctttgcaaaaactatttttactaccaaaatttattttaaatctgatcattttgctcaacgccaaatcatgtggcgctaaacttagacacctcagtgccacgtcagctggcgttgaatgccatgccacgacggatgggagactaagtcagcgtgtcaatgtacattcagcgccatgctattggcgctgaggtgtctaagttcagcgccacacgatttggcgttaagcaaaatgatcagatttgaaataagttttggcagcggttcatttgtaaaaatagtttttgcaaagagtcaaattgtcaaaatttgtgaacaatatacatgtacagcaaacaacacccgaaaactagagatttcaactggatcaacccatcgggattaaattacatgcagtaagatcagaaaatattaattgctaatactattcaccaacaaaagcttcatattcatacgacatgcacggtagactgcaggtagagtaaatctactgcagtgtttaagctgcatcacctagcatacaatcaaggtggatcccttgcaatgaacagagagcgagctctcccaatgctaatgcatacataaaaagggatcgatcgatcgatacacatacgtacgtacagtagaatgcaagatatattagaaccctagctagattgattaattattatctaaaaaaaaaagctagattgattaattgatcgacaagactggcaacacatatatatatatatatatgggccacttaactagtacagcaatgatacggattggagagataactaattaatctatagttacatgacaacaatgtagacggcgccctgctggagcggctcgacggtgacgcccgactcgtcgacgggcacaggctccgtgcggctgcctcctctgtagcggagcagctcggcctcgtcgccgtagtgcctcacgttgaagtgcgcggccgggtagaagagcggcggcgcggcgcccgcgacgctgacgcacacaaccgcggccacggaactgcccgcctcgggcgcggcggcggcggcggcggctccggcgccggagcaggcgccggcgacgagcccgaaatccgcgagacctgcaattggatcggtcgtggcagacacacatgcacagtcaaacaaacggcaaagctagtgatagtgatattaactgcacacgcatgcaatgcagaggaagaagttactgcggcgcggggattgagagagaaatcatcaaagaccacgaggaaatccaaggtgttgaactgtgacagtcactgagattgatcagagtttactcctactagtaccactcgatcgatgagatgataaaacttgaatgaaaagcgtcctggatcgttggccatgcatggcgcacggtgactctaggtagaaacgcccctgtaatgtgaaagaactttaagcttctttcatgcgtcgagcaggagaaatttgaccaccatcacctcagtcttttcaccaacgtacgtgtgtgctgctaccatactgtacgcgtgtagtactcccagttcccttctcctagctactcctaccatactgtacgcgtgtagaactactctcttgagagaaagaagccaccatttgacaagaccatacagcaagagtgttagagtggcacaatttatgagttgtgacctgtggccaaaaagccctaaattcgtagcggttactgctgttcatctaagggggtgtttgggagaaaggggctaaacttagcccttctctcaaaaagagacttatggttttaagagaggggcttctcccaaacaccccctaaaatgggtctcttttttttatccctcacctcctttaatctgtcaggtcaaaatcagttttcaagcctaaatctgtcagtgtaatctggttactagtactagtactcccagattaattattggatactgatagactagtgcatgtgttcgtgcaatgacaaatctaccagaataattttccccagagagatgatcaaaactactgcagttagcactatccgagcttccaaagtccagttttagaatcttatatggaatcttatgcttctattcctccaactcgagtcttttcatgaacatgtgaaatagccccatgcatgcccagatggattccattacggagtacttcctccatcccaaaaaaaaggcaaatcctagatttccgtgtctaactttaactgtccgttttatataaaaattttttataattcatatttttatttttgttagatgataaaatatgattaatattttatgcgtgacttgtctttttaatttttttcatatttttttttaaatacgacggacggtcaaacgttgcacatgcaaaccagggtttgtcttttttttggatggagggagcatgtgggagctgaatgcatctacatgcgatgacatgatgttccccatcaccatgaaatagcagtagtactagtagttcgcatatttgtaacatcccatcaagaaacctactcaatttgacctgatggagaacagctcacaaattttggtcttgtctaaatctacatgcttacaaaatgacaaatttcttcatctttactggaaagtctatctgcattgaagtgataagattgtacagacacacaaaagaaaaggattttacatggcctaaacttgtcttattatcattgccatgcctgggcacagggcccttgtttgagaacggctggtttggattgggccctaaaggaaactagtacagtacaatttcatgcatatacaattcttctttcagtaaaaaatttgtcattttgtagttaaatccaaacgaaactgaaattgaggacaacactacaagagaagttagactcccctgaagtgacacttctaattaatccatttaaacatgagcgtatgaatatgatgcatgcatgtgatactgaacaaaggggaaaaaatgccaacagataatctagctaaatggtggtgattcatgatttgaccagttaattaaattcttcatatcaaagaacaaaaagagtaccttgaaactgattgttagcgacggcgccagcagatatagcacttgcagcaaaatcagtcaggctagcggtggcggccacgctcgcgacggtgacggcggcgttcggcggcgacggcgaggacggaacaggaggcagaacgccagcagccgaggaggtaacgtccacgtgcacttgcggcgtggtgatgccaaagccgtactgtagcagaccgtgcttcgtggcgtcgacgtcgtgcgcctcctccggcctagacacggtggcgatcgacgccgcgctgctcttgccgaggccgagctgatcggcggagccgcaccagtgctggccgagcccggcgctccaggcgcagctcttgtggccggtgttgtttggcgcttgcacgtcgttgcagagcccccagaacatgcccgccgcgcccggcgacgacggtggctgcggagcgggcaccggcaggtgcatgtactggccgccaagaatggcggcgccgaggtcgacggccgacaggcaggggctctgcggccactgcaggaagaccggctcgtcgtgtggcacgatgccgtgcatcttgggagcaggcgccggcggcgactccagtggctggccttgatagagcatctgctggtggcacgccgcggcgagcggcgagagcaggtccatggccgtcgtcacggacatcgcctgcgtcgacgtagccctcgcaggcttgctggacccggacgaacggtcggaggaggaagacgacgacgaggtaggcgccgccacaggcgagacaagctgctgctgcggctgcaccggctggggcgccgggaggattggtggcggcggcgtgaacgacggcgccacggcctcccggtgcgccgccgccggcgcggaggcccggttgccgccgaggccgagccccgcgcggcctgtcccgccggagcgcagcttgttcttggagcgggacttgcggttctggaaccagtagaagacgttggcgtcgccgacctggccgtactcctgcagctgcatgcggatgcgcgggatctcgtcgcgcggcgggttgaccatgccggagttgaagatcgcctccaggatccggatctgctccggccgcgggttccaccgcggcttcgggtccggaaccctctcctcgcccactgcaagtacaaccacgaaatcccatatcaattccctcccgatcgatctcgatcccctgtaacctcgcaacacgaaaaccctacctaccatagtacaaagcgcgaacagtagcatgcacggatgcgcgcggcgagatcgatcgacctacctgacgagaagggcgacgacttgagggagtagccgccgccgccggcgctgccggcggaggagccggagaggagggagggcggcgacccggccatgtcaggctgcgtctgccacggctgcgtggcgtgcttcgacctgaacatgctcggccagtgcctgttcgacgacgccatgcccgcaaacctgccgatcgatcgattcaacccgatgaactctcagctcccctctgcaacaacacaagcctaattatactagcagctcgcgctcgtcgatgagagaaagatctatagctagccacagatgattctccttgaggcgacagggaccggccggattggacgagagagctaggagtagacgagctaggagtgttcctcttatctccctagctaggataggtggatggatggatggaatggtttcttgcacattgctgcctcttataatggcgagcacctacccttggtggtgcaaagtgtcgccgcccaataaatgccgactacttctacggagtagcgaccatctctttatctgcttggagatgcgtgcgagggagatgatgcagttgcaccgggagggaagcgatggggtggttgccttggccgtgtcgctgatgccggaagggtgcaaaggacactggagctgagcttcagtttcagcttcggctactaccctgcttggaagactgaacaaagtctgggccttccttccagcatttctgccatactacctcctgctggtaatggtgggtaatgcctttttgcatgagaggactcctgggacggtggtgatggtgacctagctagcttgggatgacatgtgtgtcgtcgccggttagcagcgtactttctgatcgatcgagtcatttccagaaacgaaagaatggaaattgcagttactgtgctaatcgtgcacggcaaatttacagggaaactgttcgtttcctccaaatacccactatgaaattcatccgtttcaaaggagctaggctcttcttttaaaaattgcaccaagaaggccctgttggtctagtagtatgtattgatcattggatgcatctctcattaaatctgcttcggattacaatttggaacgcaggattttacataaaggccgagtttagttccaaacttttttttaaacttgcaacttttccatcacatcaaactttcctacacacacaaacttccaacttttccgtcacatcgttccaatttcaaccaaacttccatttttagcatgaactaaacacacacccaaaaatcacatgcgcgaagaattagtttatattctatgaaatccctgcattaattataaaggagagaccttaaaatatgcttcaaatttaaaatttcaaaaaccgcttcaaattatgagcaggctctagtcatctcctaaaaacattgcacactttgcgcatggatgcctcaaataaacatgaagttagttggtggcgtgtcgagggcgcccgtttcttccaacattgtgggcttgcatgtgcctcttcacgtcaagaaaatgtgtacaaagtcacaaaaagaattttccatttggagatattcttttagtaacgaaaatgcatggtttatatttatggtctacagttggattttgtaactctaatgagacaatacaacacctatttttcgattgtactatggtctggtttatatagagtgcaattagcttcacctttggattccgtcaactttgtagtatatcgcatatgtttggaagttggttgaatggggttaaccgtaaagtaaaaaaaaatattgtttgttggcattgctgctatgttggtcggtttggctaagcagaaatgacttggcctttaatagttacatgctaattcttttgtgcaggcaattcttagggggcacacatcaaacgagactttggtcgatgttgcttaagaagagttcagagttctatttttcttatcgttggaactttataaggagaattaaagcgtaactttggttgtcctcttccttgctttttgtgcttttggtggtgtaatttcatcccatgtttcggaaggagtctatgtactcgtgttaggactttttggttgtgtaggttttttttatgtagaggccgggttgtttaatccattatccaacaacaaatggtctacagttggatagcaaaagttatatcttgttcacattgaaaagtcaaagacatacaccaagtacctccatatttaaatatatggtattgctaattttattgggtatttagtgatgacttttgactaataattttcaattagcgtagaaggacaaaatcattaatattccaaaagtatataaaggaaaatctacccataagttttttatatatgttcttagctaaattttttgtgctacctattgatggtgatagtttcacatttttaaccaattaaagttaataatatgatagtcctatatttaaacacaaggggagcactagttattactatccatttctactctagtaaagacaacatctttaaagccggtgtcgatatatctcttggttctaattgagctagtagttgttactgtatatgccactcacgaagtcacgagcggggtttacaaaaaccgtgcagttgtcacgcggttatcatgtatggtaaccttctcaaaaccacggcataccctgtgcacggtaaccacagtaagcgtcaaaccgtggggtggcggtaaccccatcctaaacggtttggtaaaccctgctcacgactcaatcaattagccaattgttagtactacgaatgttcagattcatagtttaaaagacactcttaatttagggacgaagctagtatagctcttactagtatatactactccctccgggttgataatacttgtcattttggacaagggtacggtctccaaaaaaacaactttgaccattatttttcattatattatgtataaaattgttaacaaatatatgatcatattaaagtactttttaagactaatctatatatgtagtcaccatatttaaaagacaaatattttaaaaatgatttataatcaaagattgtaaagtttgactttatccttgtctaaaacgataagtattattagccggagggagtactattatgcaatttt

SEQ ID NO: 3768 - DNA, 506 bp, Oryza sativa
aattaacaattttgtaacttaatcaaattacaaattcgtgaaagattcatataagtgatcagtccaagttggtacatatgctaacattgagatggtgacaaactgacaaataataggaaaaactgagatgttaactatgtgaaatgatgatcttctgtgtgctccaatttcagggtataagagaaccataccagtaaacttgaaaactgaggaagatgttgcacttgtatgtctccctgtgagctctccatcgtacttggttgtgttgtgtttgaatatacatgatctgaaactgatggcagattgtattgtagacttgacacatctacagcaccctgcgtcagaatatcaggctgtgaaactgaaggttcatcagtattctccatgctagtgccaattctggcttcaacgtccccatttgttgaagaatttagagcaacattgttgtcttgattcctgcaaggccggccttatcagaaaaggctaatttcttgtcatgaatacag

SEQ ID NO: 3769 - DNA, 4834 bp, Oryza sativa
gtttcttccctggatttttcacattttggttcttttaaaaaacttatttcgcaagtagatccctagaaaacttaatccaaaaatggtgcgccagagtggctggcgccatcgttcaacaggacggcgccagcctctttggcgccgtcccaccgccgacgtggcggggcgatgctgaggtggctagggggagttttatttttgttttatttgtttgatatttttttcacgcttagggacacacaagaaccaaccatagaaaaattgaactcaaatggacgtaatatgtgacatgtagaatttttcctctcctttcctctctccgaactagtgcagaggagagagatgtgcaacttttttatttttattttattttttttgatatttttttcacacttaggaactcacaggaaccaaccacgtaaaaaataaactcaaacggacgaaatatgtggcatgtggaattttccaaaactccaccgaaaaacttctctcctcgaaaacacaatcttgcaagcggaatttggaggttttaatatcgccgaacccggcaaagcgggggagaatcggatgtaactttttctgtagatgtccgttcatatattatttgcctgattccgagtccgtatgagaaagttacgcctattttaatagatggcatattttgtccgtttcggtagagttttggaaaattctacatgtcacatattttgtccgtttgagtttattttttgtacggttggttcctatgttctcctaagtgtgaaaaaaatatcaaaaaaataaaataaaaataaaaaaattgcatctctatgtactgtttaacttatatatgtcatttcatgtggttatattttgaattagattaagtaatttatatagtggtagagtgcattatgtttaacatgctgatcaaagggttttactaaaggagttatggtctaattttagtgaaggtgcaaagtagactaagtggtatgctagatattttcagacttagctaagtggtagttcgagtttaaattttttttgtagttggttgtatcgtgatcctgagtgtgaaaaaacatccgaaaaaataaaataaaaatgacaccgttgcaactccatacagagaaacaggaatagaggcggcggcgccagccatgctggcgccctcctccctagggcggtgccagcatgctggcgccctcctcctgtcacgtcggttcgtgtgcgccacggtggcaggaagaccggttggatgacggcgccagccactctggcgccccaaaaaggactatttctgggataagtttttttaggggtctatttgcgaaataagtttttttaaaaggatcaaaatgtgaaaaatccagggtttcttcctgccgcacgggagagggctgcctacacgtaacgtatgtcgaccctgccactgcagattccctgcgctcccccctgcccatgcttgcatgttgtcgtcgccggcgctagccacgagatgaaaaggcgatcgagcgagacgacggagatggaacgcgaggagaagggaagggaaggcgcgacattccacctgcagagagggtttgacgggccgcgggcggacggaccgagctagtgcggcaagctaggcgaccgggatgtcgtgggcagcctctcagatcgcgcgcgacttctctacgtccatgcgaccatgggagcgagatcgatcgtctgctagcctggttttgagagttcggtggccctgcacgaaactaaatttaaagatacgaacccttaattttacatctaaataatactccctcttaccttgtatataggggattatgctctctcagcttgtctagaaatataaaggattttttttatcccgagacaatataagtacaacaacaatcagaaattgagtacttccatccgtttacatcaggaaaaaaatatatagagagaaaaggtacatgtagtactactaatcaaaacaggaaactattttaatccctcgagaggatatccactcgttatttgcatgtcattcaaatgattacaaaaaaaaatttaaaaaaaattaagaagatgtattaacatatgatatatcactccacgaacatgcaagttcaaatttaatttctacatctcgtaacgaaaaaaacaaatttgactgtgaatatacattaactagttgtagtttaatttgttttttttcgttgcgagatatagaagttgaatttgaacttgcatatttgtgcagtgatatttcatatgttaatacatcttctcaaaattttttcataaccatttgagtgacatgcaagtaacgaggggacatcccctcgagggatcaaaatccactccctctgcaaactgcatctcccaatctgccaaacatatctagttttatttctaaactagctggatggcccgcgcaattgcgtagctagcacccatataaaattatattttttttaatatgattttacttaaaatttatcaaatatttatctcgttatcttaagaatttgaaagaccaaaccttatcatcatcctcgtgtttctaattttatagttttaaaagtcacaccagttgctatcccttacttctgtcatattcttctttatttgcttgctcgatttaccactatttctattcatttttcttggaactttaaaaaatggatcttatagtttttagaatttattgtcccgttgggttttgtttttataatttctataagtcctgtcaaacactgccattgtacttctctacggccgtccactgcctcttctatttatcatcattggtattttaataattaaacataattattgtttaatttcattttttactttctagaagttccgccaaaacgtcagcgactttgtcactgtactcctctacggctcgtccgctgcctcccttctttattgtcctcgagattttcaaaccaaacatgattattattgggttttttactttttagaagcccaagcctttaaaaaatggaccttatagtttttacagttttattgtcttgttggtttcatttttttataaattctaaaaatcctgtcaaatgctgccactatactcatatacaacccgtccgccgcctactctttattatcattgggattctaaaaattgaacataactatcattggaatttattttttttttactttctagaagtcccaccaaccatcagcggctctgccgctgtactcctgtacgacccgcccgctgcctctcatataaatatttacgatgcatctacgaattgagtgtctagtttttatgtagaaatcaagtgccaatcctctacttaggtaaggatgcacaggcctgcagtcacaacaactgtacagtaaggccctgtttagatcccacacaaaaattttacatccagtcacatcaaatgtttgaacatttgtatgaagtattaaatataggctaaaaaataactaattgtacagattgcgactaatttgcgagatgaatcttttgagcctaattgctccatgatttaacaacgtggtgctacagtaaacatttgctaattacggattaattcagcttaataaatttttttgaccgggaattcagcttaataaatttgtcttgtggtttactgacggattctctaattagtttttttattagtggccaaacacctcatgcgataccctatataatattcgatgtgacacgccaaaactttacacccctgaatctaaacaccccctaatctgcatacaactgagataacaagtctatatgcaaccacataggatgagaataaacaatagatagtacaaataggttcgtttaaaatttgtgtttcaatttatatttgacctcaaaatacgaagttaacctctctctttttttttcaccagatagcactagaaattatgcatgcactacatataaggccctgtttgacataggtccaacttccaacttcaacttatctgaagctggagctgtgccaaaaacagtccagactctctgtttttgggagtgaagttagcatagctactcctaaaaaataaaatgcgggggtggagcagggtttttctgctccacagctccactccaccccaccctacctcaaaagacccactaccctttaactttttaacatatttacacaaaaatgacacttaactactctaaactcacccttctctctccctctccctcccctactcacctctgtcatggctagcgcacaagcggcttgtggggggacggcgcgcgcggggggcgggaggggggggggtgcacgtacggcacgtgaggccggcggcgggcgacagcgcacggtcaacggcggccagcggcgcacgagctgtcagggtttggggattttttttcttttttttaaaatttcagatctagagttaaaatgctagccaaacacttttcatcttgttttcaactcccactagagtgggagtttagagctaggagttggagtttagagccctaccaaacggggcataaggatgtttcattgttttctaccttcaaatttgatttcaaccaaatttctttaaaccctaccgctttattcctactacctaaccctgcagtaagtctggttgccatggttaccactggtagagaattgaaacccttctcaaagcacccggccctagagagagaaatttcctttagaacgcaactcttccactgttgctttgttttttgctgtgatccaaacagggcctctccactgttttactgactggtggagaaatcatctttggtcggtcggccaaattccacaatagtcccggttctaataaaaaccaggactaaaaagctttagtccctgtttaacaagttgagggg

SEQ ID NO: 3770 - DNA, 836 bp, Oryza sativa
tattttgaaagtgcaagaagactcgtccaatgtactgtgcaatagtaatcattttttgcttctgcaagcccaacttgtattcagctatctcttcgggagtcttgtccttcagctactctgaccctagtgataacctcacggtatgttgtgtttgacagatcctaattggatccaggaatccgataagttcttttttctccttagcatccatgtattgcatcctacaaaagaagtttaaagaagtttgttagtaataatcacatggttttgtattgtacatatttttcatgtaattaatgtaaactcatactcacaggcacccagcagcgacatagttgacgtccatcttttcccgacgatatatggcgtggagatcttcaaaatctagccagaagtaaccgttgccgccgaaagcatctatcggtgatcgaactgttatattacttaggcctttcttgctagtgtccatataccatttatgtaaccttctcatctcccatggaccgtcatcaagtgcaaaatccggtcatatttctttcccatgttcgtatttttccgggcaatcatcaattgccaagtttttttttcccggctagtgcagcggccttcttggggtcatcttctctgaggttggcatgttccttaccccttctaaagacggataccatgaacttctccttttgatcatctttggacttggaattgtggctcctaagcactctaggcacttcagacttctcagtggccttgtcattgaccgggggttcttgcacctcagggtctttcgcaggattagggacttcaaagatttctagatctgtaccgtcccattccaa

SEQ ID NO: 3771 - DNA, 635 bp, Oryza sativa
tgagatggattacttaaatactgatgcacatcatacctccaatcatcggctgacactgctgcaatttcaactttaacatctttgatcatcggcttataccccgatgccccttgggccaaatcattagcttcaagatattgttctcgagatacatgcttcaaagtaaccagtcgaaaccctttcattagttccaggcacttctcattataaaccatcaatgtatcgttcttgcattcatattcccctgccaattggctgattactagcaaggaatcccccatgatttcaatggtatcggctacaacttccttgagtaattgcaaccccttgagcactgcttcatactcagcctgattattggtcgcatatggtttaatagtataagcaaactcgaaacatgcccccctaggggaaattataactaagccgatgccacaaccatgagtgcataccgatccatcaaagaataaagtccatggtactatctcaaccgagccgattgaatcatcacgatgttctacaataaaatcggcaatagcttgtcccttaatcgcttttggcgattcataccgaagatcaaactcagtcaaggaaaatatccactttccaactcgtccctttaatattggagccga

SEQ ID NO: 3772 - DNA, 10636 bp, Oryza sativa
ttcccaagtagtgccttacaaattaacaacagattatttaatgtacaacatagctgcgagcttctcgagttgaccgtgagttcacaacagcttgaaagcttcagccggaacagctcagaccttggatggtggaggatcctgaataccgcagagcaaattcgcgggcacggctacatcgatcatctttggataggccaagttcaagtctgcaagtggacagagtaaacgatccagatcttgtttagtgtattaaaaaagtggaggtaagatttgatctggtaagtgcctacgtgagcagaagtataatgaaaatggatattcataaattgatgcgagaagaaaaggcacatatccattgttaaagactctgaaacttactgtccataattttcttgaatgtttcctataaacataacaagtaaattaatatcagaaaaaatatagcttttattagttagatgggtgtaaagaattagccaaagtagcatgtaccttatcctttgttagtcgagcattatacgcaacctcctcttcaacagtacttacctgcaaaataaaatagtcaagtgcctggtaccttgattagtgagctttaagaaagtgagcacttactgtgaaacctttgtagtcatggccaggataaagcagggtatcctttggcaatgtgaaaatctgataaggataaaaaagtcagctacctacccttcatattatgtatgaagatgatgtgtgcctagtttcaaaatattatgtatgattgcctaaaaaaagtggtatgctattctataagctgatgtgtatttagtcttaaaaaaaggataatgcatacttgcctgcgaatgcaccgactcatacagctcatcagaacttcctccctgtaataccagaaaacaaaataaacaatctatgtttaaacagaatttctctagaacatgaattctgagcttccgtatgcaagcaaacttatgcttgactaacagacagaatacattcagtccctattaatttaattaaccacggtatctttagatttcaaacagaacagttcctgatcgctaagccattaagaagtggcagtggtaacaattacctgaaagtctgtccttccacatgcacgtataagcaaggcatcaccagtaaaagccattcttggtgaaggttgatcatcgccttcacctgttacataagtcacacagccagcagtatggccaggagtagatcgtacctaaaaagcaattttgccatttctgatatcagaaaatttcatcatatccaaaatattacatgacggatagaacaaagatgcataattttcaatgctgttttattcagcagcttggttgacagtatacgttttcttattcatattatatctgtcatggatatgctataaatacctaaagccaaactttcaataagaacacaaatttcaagaatcaacatatccacaaacaatggttgcacagctgagaaaatatttaatatcacccaaacaccatatctccataaacattcacattacctcattttgtatgaaccaagggaaaatacttttaaatttgttatacaagtctaacctacaaaagtgcacagtttttaagtcctgaattagctgtgtggacaactgtttatcgtcttactgacaaacaccgcaaagttaaaatgattaaggaaacaaaatatacatatatgaatagatcacataaattatgtctctgaccaccaccaccacaaacagaccactcagatgaccatatacagaaaaagcccttttataattagaagtagacaatccgttcatatttgcagcctgtatagagtgagattctaggggaactgctgcaattgccatactccataaaattcagaggggtgggggtggggtggttgagagttcaggattaatgtttattaagttcagccagagagctcaaaaggactagtttcaatagtccccataaattatgtcagtgcttactaaatgaaagaagaaacacatagccaaacagctaattaaaatgggattatacctcaaggaagaggttaccgaagtatattttgtccccatgctcaataaaatggtctgcttttgctttgcttacttttgcaatcacggactttactccaggtaacttagtctgcaagtacattccatcagatgaccatgttatgaccaaagagaacaaagtatcaagactatgaaaagaaaacatatcacaagatctcgagaagttcagaggttggaactatttacctttattaatcctgttccagtgacatgatcagcatgcacatgggtattcatagcatagactagcttcaagcccaactccttgataagattgagatctctatcaactgttctgtccacagggtcaatcaactgataacacaaaaccaaggacattagggaggtgatcaacaaaatggaagcaactatagctaaacatcaaatctacaaaaacagcatcaatatttttttctgatttagtttagtgcttattgcgctagtctagtctgtcacatatatagagaaaaaggttacattttttttcattttggctcaatcaatacgataattaagaaaacaaattatttgaaaatacttaagcaaaaccgtggagaaggttaagttttgggattcttgaacaaattagcgagattgcgcatttatgtaatgtagtgccaagtccaagataacatgaatatatgtaacccatcagaatgatatcaagtaatttgattatctttcatagtttataaatgcacctcctgaactggataattataatcaccgtcactgattgcaacattgccaatatcttgcgtactgtcagacattaaaaaaacgcaagatgatctttaaattagttagggataccacaattcacaggtaataatcaattattccagtcttatacctatttggagtatttagtttgctatttaatttatgttggtatctacatttctgcagtagccactgaaagagtaatcctgcttacggtatccataaaagaggcttccatttacccaactgatacccagaacaacgaacagatggtcaagagcatcaactactcaccacggcgggtttctcggggtccccgacgtcggcgaggaggtaggtgtaggtggagctctccttctcgaacagctgcctgaacagcagcctcctcccctccgcggcggagccgctgctgtaccccgccattgcgagcaccaccggcagcagccgcagtccccgcgagatcggcctagcccgaggagcgcacgacgatgacgacgacggcgcggcggcggcgcaggcggacaggtgcgggatcaggcggcggcacgagcgaagcagcgccaccatttggctcttccgccccgcccaggccagcgctatataataaggcggaggtacgcacgcgagtgggaggaggaggaggaggaggaaatcaagacgcggaagcgaccgcgcttggcttgggtgttatcggcggcggtggacctcgcggtgattagctcacgcgccggaataaacaaatggggagcggagcggatcgggtcggggtcggggaggggaggcgagtaggcgacggcagcgatgatgtggcgacaggcgaggtccacgaggtcgccggcggtgccgtggtttagctcgcggtcgcggcggcggcgggtgaggacggaggacgagatagctaccagatgggggcaggggatgttggcagttcgccggtttccgctaatgtatcagcggatacgctaatcaggcttcagaatttgttcagatacttttttttttttttgaagaagttgttcagacaccaatattacatgggacgactatttttttcttgctaaattcttactaacactgatatgtcattctataagtgcatctagattttatataactttcatctacttaaattaaacggttcagatgattgatagtaaaagtttagtaagaaaaaattagtacgtgtacaaatcacggatcgggctgttattataggttgaactaatcgtgtaccactaccactccagctaacaactactactacttactactaataacgagcaagtgatggatgacctcatggattacataatgcgaaaggaacgggggaataaaaagtgggggttctggaactccaaatatttaaaggcgtaaactgatgcagcgatgcgtgcgcgtgttttgttcgtagtacgcgcgtcgggaacaagttgatcgcttatcagttgcgggctgcactgcactagtctgacgcggacgttccgattgatagggcaaccaacaacaagctagccgcgtaatcaagcactgggctcaggtggacaccggcagtaaaaaggctctttggattgggatgtttggtccgacaatatcccgcggcaatataatatcctgttttggtttgttatagcactactaaaatattggttcgataaagttgatgggtatagaattggctgcacctgtggtacagctaacatgaacaataatctgtgttagcaatacagttctgcagtgctaatattgataatgtcaaatttatagcggaatgtttggtttgctaaacgcaacacaaatttgggtaggaaagagaattaaaacaacccttacctttttcctttaaaaatatataaatagtattattaaaattaaggggacgggacggctcgtagtatacaatcaagacgccgatattaggaaaagacttaatatgaaataattagaaggggtgaggttttaaacccatatcgtctagcccactaccttgtggagctagctagaaaacccctaagcatttatgattctccttatctcttcatcctcgtcccgctcctcatcccatagataccgcgtagtttcatctcgcgtgttccaccctgctcactccgtttgtgcgcgttgcgccatcccaccgtgtgctctagatcctcacgtttgcgttgcacaccccacgcgtcagggtggaaccagctcatagccaccttcaactaaccattgttgaacacatagtaaaaaaaaaatctaatctctatgatacatggtgttgttttaagaatgtttggtttgctaaacccaacacaaattatgggtaggaaagagaattaaaacaagccttacctttttcctttaaaaatatataaatagtagtatcaaaatttaggggacaggatggctcgcagtatacaatcaagaagctaatattagggaaagacctaatataaaataattagagggggtgaggctttaaatccatgtcgtctagcctattactttgtggagctagccgaaaaacccctagacatttatgattctccttatctcccgaggatgaagaaatcgggccagaacatcattagagttctgaattgctaaatttgcaaagaatgaagaatgtgcatcgaaaataataacatattaagactgtggtagtattactagcacggcaattgttcgatagttttcttctaaactgacacgatgatgcccaatcacaccggaccatctcgtgggctcgtggcaaatgttcaaaccggcccggttggatgcagcattaggccgacatgtaaaagctctgtatgcttgtagcccacaacaaaaactcctcgattacgagcttacggctaactccattcggccgtggacacaacggaggcctctacaagaatccaagacgcaaatgctcaaatggcctaatgaacaaagaaagggacaaatggcctggtgaccgagacaatcaggcagaacacaggagaaatacccaagaatcccttctctagaacagatcaacgccatcaaatatactccacacttccacagatcgacacgcatggatgccggattcgacactctttggccgatggtacgagctggatttgcacgcagcctcctgctacatttcgtctgtgtcgtctgtgcgctgcagtgcctgtgtgcccaccacgtactctccaactatacatgcaaaggcagccacacgtacatacactgtagtttcacccgctggctacgcccacagtttccaactcccattggacccatgggaaaagacaagcttttcatggtttctgctttgtactgatcatacagaccaacagtgctaccactgccacagtagaacaaatccgtttagccattgtaccgcaagcctaatgcggacaggatgagtacattataatctctgttagtatagaccaagcaacaattagccacgccgagtttactgtggcttagccattaaattactgtggcgttgcccatttgtagcctcatggctcggtcactccctccctctctctctctctctctcttcacgggagggcagtgtggttttggtcggattccgccaagttaggcagcacatgcgctcgccttcccctgtttgtccatagttccatacacctgcaaacaacgccctcctttccctcccttaattgtcggggcgctctcgccgcccgcgcgccactgcgctgctacacgctacgggataagccaagcttgcttgctttcgtagtcgctttgctcgatcgctcctctcgatcccatcctagattccactcggttctgcttctgctccttcgatgggttcccgcgacggatggcggctactcctcctcctgctcggcttcctgctcgtggcgccgacttgccgcgctcgggaggcgcagccgctgccggtactggaggaagaggaggtggtggcggacgcggcaggagggcgtggtggcgcgggcgctgctgccggcggaggaaacaggcgcgcgccggtgcggcacgagctgtcgctggacttctacgccaagacgtgcccggccgtcgaccagatcgtcggcaacgtcaccgcgccgcggttccgcgacaaccccgccgccggccccgccgtgctccgcctcttctaccacgactgcttcgtcgaagtacgtacgtgcacaatgcacagcccatgcacgctgcaatgcgcgcatacattgtgcgcaaattctctcgtgcaaaagcacctagatagcacaccttgaatattacactgttttgttaccgccacgtacattttttcttgccacgcatcggtgtccaattctgatcgatctttgtgcgttgtcatcttctcaggggtgcgacgcgtccatactgatcgcgccgacggccaacaacggcggcggggcgccgagggtggagagggacatggaggagaaccggaacctgccgcaggaggcgttcgacacggtggagatggccaaggccgccgtggagaaggcgtgccccggcgtcgtcacctgcgccgacgtcctcgcgctcgccgcccgggacttcgtccacctggtacgcacgcacgcatgatgcttcacatttctccaattctgtctttacaaaaaaaaatacacccaaaaggctcgttctttcacgagaaaatccgtgcattttgtggcgactgtgaactaaacaaccaaaacaactagtaactgtgcaagtacagtcctatacaaccgaaagcgccaacaaactgaaacgtaaggtacatttcagtgagaaaaaaaaatactagcaatgccagttactcttagtaattactgctgaaatgtacacttgtacagtacctggatgtacagtacagttgtacagtaatttgagagagacaaaagagagaaaaatgtgcgtggcaatacaactcccaactgtcaaagactcagagttagtgtacaagttaggagttaggaccatgtatgtatgcgagtccggggaaaagaactctgctttgctttcgcatgtggataaaggcgcattccccattccgccgatgggcggcatgtgatctgtgaagccgaagccaacgtcgtcgtcaggaacagggactcctgcctcctgcgcatgctcggctaattaactaactactagtagtagcttatagctttaaccaactcatgcatgcagctaataatcatgcatggtttttctcggcagcacgtacgtacgggcagccggtaaatttaatcaaaggtgatcagcttttctgttgcgccgaatcgatcataaaacggtagcaacagtgcggtcggtgatctattgctagctagttgatgcactggggcgcctaaagcaagcttaaatttgtggccgtgcatgtgttaatagcaggtcttggttttgttagcatcttgcctctgagacgagcgattgttaatgcaggtcactgacattgctagctgacaaaagcgatcgagtacgtagtttgtttccgtgactcgttgcctgatccatggtgacagagtcgatacctcaacgggtaattagctgctggggattcgatactcgcttggatcttagtaatggtcaccacgcagagacaaggcaccagcaggattaagttagtcaggatcgtgtcaagagcagcagcggattcggtggtgtattgggcacatggacatggttttgatcagcgtgtgtgtgcccgacgtctgtcacggcgctgcccgtgtatactctgcctctgcgtctttctgtagttaagctagctagctagatagccaactaacaagttggtctttggtttgttgtccgtttgctcgcctgtgaagcctacctctgagcaagtcaagtgtcgtgttcttcccatctctctgcctctatcgtttgatctccccagtgatgatgcctgtgggcaatagtcaagcctgcttctgcctggctggcgcctgctttgttgggtagcacggtctctcttctttgcagtgttggttgtgcgtctttctggaccatttacgcctaggtagggagggtttcacaactcacgaaaggctaaaatcagaaaagcgaggtctttggcaagtagtactgtactagcttttgttcagagtactggagtggtaatatggtgtggactgtggagtgatgagaagcatggaacaaaagcagttcatcccaacatgtcttttcctacggatctagcagcatacttaggaacttctgtttttttagagagaagcatatagacttactacatgtgacggagtattttactactcatttttcttcattcattcagagtcagttaatttgtgtgaaatctctaagaagtattacaaacaaacccttaaaaatacaataaaaacaacaattttaataacagcccaggagaattgggccggtgagactcatcatggccgagctgaattagaacagcccatctatgctaagaacttatttcagcctattacaaggcccaacagcccaaacctaaaatttcacctattttttctgtgaacaaaacttgattttctttctttgttctttgtacgcaggcaggtgggccctactacgcggtgaagaagggtcggaaggacagcagggtgtccctggcgggcaaggtgcggggcagcctcccgcgcgccaactccaccgtggacgagctcctccgcgtgttcgccgccaagggcctcggcgccggcgacctcgtggcgctctcgggcgcgcacaccgtcgggttcgcgcactgcgcccacttcctgggccgcctctacgacttcggcgggacgcggcagccggacccggtgatggacgcgcggctggtgaaggcgctgcgcatgtcgtgcccctacaccggcggcagcgcccgcgtggtggtgcccttcgacgtgagcaccccgttccagttcgaccacgcctactacgccaacctgcaggcgaggctgggactcctcggctccgaccaggcgctgttcctcgacgcgcgcaccaggccgctcgtcgaggggctcgccgccgacagggagcggttcttccaggcgttcgcggccagcatggacaggatgggctccgtccgggtcaagaagggcaggaagggggaggtcaggcgagtctgcagccagcacctgtcctgaacgtgtactggtccaaactcggacgatcacactgtctcgatcactcgatcacacttggcgttacaggagttatcttttgctgtaaactgccacatttcggaaagtattagtagttccgttcttttttttttcttttgttgggtgcactagtgctaggttgtgcagggattgttaattttgcatggtcactcgcatccgcagtgtgtgaggcttcctatttgtctgattggattggattggactggattgcagaagagagggtggtcagtgtcttttttctttttacttcaggttttatcggaagctagctcaacttaattttttaatttgtttgggacaaataagacattcatggcgtgctacggatgtactatgctgcacttcttttaatatatcgacgtgtaaagcatttacgtgttcgtttaagaaaagatgctcctatgtcatattcttgaaacatgccaacaacacaacatccatttaaattagttcttagtaattcaaaaacatgatcaaagcattaggttgtgtttagttccttccaaagttggaagtttaggtgaaaattgatacgatgtgactaaaaagttatgtgtatgacaggttgatgtgatggaaaaagttgaaagtttagggaagtttggatctaaacacagccttattgatatggccaggtcatggaggaactagggaagaagttgttctccaagactgtgtttagttcagcgtaaagtttgaattttggttgaaattg

SEQ ID NO: 3773 - DNA, 10112 bp, Oryza sativa
tcttgcttctagatcacaacatgaactagaagtttccacaaaacaagcaatatttgtgggttctagtgtcagcgatactatcaaaacatgtattgccatgggaaatgaacgagctgcactcaaagtgaagtcagagttcaaggtattgaaaatgccttcaaaaagaaaattgtggctgatgaataataatattgtaatctttctattgtcctatgctgcataggttcctgataagaggtggtactggctcaaatcatgtgctttagctacagttgggaactgggatgcgttggaaaagttttcgaaagagaggaggccaccaggaggtagatttacctattatgtatcatctattcatgagaatctgattggagaacaacattcatggttcttccgcagggataataaattcacaatattaattcatgtaaagaaatatcattaatatgttttagtatgctgatattcggtttccttacaggctataaaccttttgtggaagcatgtattgatgctggtcaaaaaactgaagctcttaagtacattccaaagttgacagatcctcgtgaacgatctgaggtatattttacacttagttcacatattacctaacaatctttggtatattttagttaacatattactccctcggtcacaaaatataaaggattttggttggatgggacatatcctagtacgacgaatctgggcaggctcattatccaaattcgttgtattaagatatgttccatcgaaccaaaatcgcttatagtttgggccggagggagtaccttctaagagttctagcagagattaagattgaagtgaaattagtttgatgcccctgagtatttaactcattaggaacgatcacacccagtgatgcaacgagaaatgcagggaatcatgaggtgtggttggattgagaaagtagtacactagtactctagaaatgcttactgcccaacgaaatatttgcaaacaaaaaaataatttgtgatagtacttttatatatgtgttcttagcgatataaaaacaaaggctgcaaaataaactttttcgatgaaaaaaccccaaagtcaactccagatgtaaggttgaaaattcaaattttgaacataagcgaaaagatgaggttaatatttgtggacagagagagtataacataacatttgctcaaaacaaattgaaaaagaaaaaagtcgaagaactcatcctagtattctttgtcttctctgaacatgtatttctctccgttgtttgtttcaatatacatatgattttaccttggcgttgttgttcaggcatatgcacggatcaagatggcaaaggaagctgcagaagcagcttcacaggtcaaagatagtgatgagctatttggtcgcctaaagcttacacttgcacagaacacagccgcggcttctattttcgatacattgcgggatcgactatccttccaagggacatactgacctatacgtgtttggccatgggatttgagttttgtgcacccttggtacgtgcaattgcgcaatcagatcgtatcaattcatcttgatgtttctaccattttcttccttgtgtaccgactccacagtgtgaatacccccgtccacactccagctatgtaaaatgtgtagacgattttgaagcgcgaatgtggatcagaggctttttttttttgtagatgcctctttgttgatatgccatgtttaaaaagaaagagagagcatgcattgtgacaaatcaatctgcacgtccatccgatttcggcttaaccattactttttcagccttcatgctcatttgcaagtattttgcaaccataattacaagtattttgcaaattaacacaaaccctgatgagacagttaaatcgttatgcactcaataattttgtgcgccaaagaaccgatctgcgtcagcctagtacacgaccaaaccaagcagattatatatatcaaacaccaagcaagatttaagtctgccaattactaataacgccatatgcataaggtttgccaagcatgttccaaacgataaataagtatcaaaatgctcaaagtcttttgcgcatcaaaactttcaacaaacgaaaaactttccaactcttgtactaccaaacaaagatccacatcacttcgtaaccaatcacatgaacaggtttggcctcgacgccttgaacgtggtcttgagcttcctggttggcggcctgaccttgcggtacacaagggggaacttgatgctcccgttgtggaactgcttggtgttgtccctcttgcagagcttgaagtggacagtggcggtcttgatgatctggatgcaagggaatctcacacggtggcgagaagccatctcggtgtacatctgttccacggcaccattcaatgtagtgtcacggtactccttgtacatgttgtggtaaccggttctgctctggtaacgcagccagatgccatagttcttgatcgtggttgggttgcgctcgaagatctgacatggcagaaattgtgaggggtagagaagaaagtattatatccatgcaaaaatgtgaaatcatactagaagtaaagtgtgatctagtgttcaaaaattaatgtctccatgttgggtaaaatttctggagaaagaagtcatcaatcagtgctagagtttcaaacatcattcaccataaacatcccaagtcccaacaagctacattagatcaaaacacagctataaggactaatacaagactgctacatgagtttaaatataattatatatataatgagggtcatatctgattaatgattttgcttttcaccatttactggcatctatccacagctgatgtgtgttctaaagatgtattatgttaaggccaattcttacaagtataaaatggtttaacccctacaaagccatgatgcagaaatatgaaaaactcgtttgcaaatgcagatggtccccctaccccaacacaagtgaaataactagtgaaacgaagatgacacacagcaagctcctaacaaaacaagggaacactagtgtgtggcaatttgaataattgacacaaagtgagtacatgcaaatcgcacgtattataacaccagtaaagagtgatcactaacagtgcagtaacaaggaaacaacatacgagctggagttaaaaaaaaatgccccacatttggaacaggtgtcagtgtcacttattagcggtcaatcagtatgattaatatctagaactaggttacaaatgtcagggagcaatcagggcgaaatacaatacgtttgaatttctagtacctcgttgatggcgagcatctggccgttgctcttcttcaccttcttcagcttcctcaggaagtacctgcacaccgggcaagcgccccaatcagcaaaccgcacgagataagatgaactaaaaaagaaaacccacaaaatcgcaagaaaatgacgagatgacggctcaccagaacttgctcttggcgcggacctcattggtggcccagagcttcatccggtagatcttggggtgctcatcgccgggggtcggcagcgcgcgccccaccacctggtactgatggaactgcacgcacacggagaggacagatcaatcaaacgcacggaggcggccacatccaccgaagcaacggctgcttaccctgaaggccaccatttccgcgagctcctcgaaaccctagcctagcctaacctacgggaggatgggggagagcgcggaggaggcggcgggcgaaggcggcgtcagtgggatggcgaggagcgtttataggtggcgagtttggtggtgaaccctagtgggcctagttggcgttgtaatgggcttttgttacaactagtacttgggctttgttttttattttcctcaaaaaacatggtgcatgtcagcaactcagcatttgtgatttcaattagagaaatcattagcagcctctttttgaaagagagagtttgggagttttttttttcggagattgatttttttttattacaccgaagagacacatgtccacacatgtgatgtaagtgcctttctaacacacaattaaagagacaaaagacttgcccaaaaaaaaatagagagacaaaagactagcgacaaatcactgatgacactaaattcgaaaattggtggataggtttacacccaagactccctaccgcactgtggaaatcatgtaaatgtcttgttttccaaattaagagtaatgcagaatataaaacatggatcaccaacggtgggaattaattgaacgaactaagcgttgtttgcttcaacgtctttcaaagactaattaagattgtgttaagcatctaacattataattcgtacagaaaaatcactgataacgttgcaggctcttgcagcaaccgtgtaaaacaacaattttgtacaccatccttcatcaggtaatcacactacaaactgaaatacaaagctacattcacatcaaaacaagagaccggctgtcaattacaactgcaggtagtgccgttcgaactgcagctggccgtccacccgatcgtaatgagctcgatcatcgccaacatcgtctctgcgctgctcatcgagctgctgctgatcatcgccgccggtcatcaccatggccggatgatcgcactcgtagcgcggaggtgcagggccaccgccgaggtacgacccgcgcatgatgaactccctgatctccggcatgtcgatcagcttccggcgagggctcgggcatggaggcggcggcgtcggcggcaagggaggcgggaacggcctcaggatgtccttcagccatgggttgagctcgatggactcctcctcggtaaaggtggcggtcaggccgaacaccctccgcagccaccacgaaatgctcccgcggtcggggtcgtcgtcgccgccttcctgctggtccggaggcgcagccgccggcgacggggacgtgttcggctcctccggtggagatgatggtactacacggtggcgtctctggcgccgcggcggtgaggcgatgtcggtggtggacagcttcctcttgtggcgggacatcgccgccgccgtcgtgggtttcctggcgccgggcgcgcgcgggctgaagtagaccttgctcaggaccagctgctcctcttcgtcgacgtcgaggctgagctccaccatcagccacccggagcggacgcgctggccgtcgtcgtccttggtgatgaaggagaagctctgccggtgccccaggcggcggccggaggaggcggcgagcacgggcttcgcgccggcctccgagtgccagcacccggcgccgtcgtccaccgtgcgcgccttgcggccgcccttgagccccctcacggcgctgaagaagtaccacgcctcgtcgccgctgctcctcgccaccgccggcgcgaaccccctcgtgaggtcggcggggtcggcggagtacacgtccgcctcgtggatgatgaacccgcacgacgacgacgacggcggcggcttgtcgccgggagacgacccgtgggcggagctacgtctcgatgagctcctgctcggaagggtggacgtccatctcgtcgtcgtccaggcggcgcggcgccgtgcagcggctgcgggggaggagctcggaagggtggacgtccatgctgccgcctccgccgccgtcgagacggcgcggcgccctgcattggcggcgggggcgggaggcggcacccatggcggcggattggcgcgagggtatcgaatgatgggtgggaagctatcagagtcgcaagcggatacgaatacgggatcgtacgggggatgaagtcttcccggtttatatcgagcccatcgcgttttctcctcgtgttgtgttcggactccgcatccgagtcggtgtaggagagatcaatagatgatggcgaggcgggtttccaaatttcttgtttcgccaggtgagtttgagattgtgttcctctgggtttccaaatttcttatttcgcgttccatattttgacggctaccctgggccgaatgatgggccagccatgttcgattttattgggcttgacttcagatttccagcaaaaaactatactaatacatactccttccatcaaaaaaatctaagacctatttctttttcattaagatctaggagcaattaattcattcatcatgttataaaaccaatggacatacaaccaataagtactaaaataatttcttgagtttcgatcaacaatttaattcagcacatagtaactacaaatagaacttagacttttggaaaaaccaaagaatggaatatgtcttaggccctttttagatcccaccccaaaatttttcaccccgtcacatcaaacgttggatgaagtattaaatataggcttaaaaataactaattgcacagattgtgactaatttgcaagacaaatcttttaagcctaattgctccatgatttgacaatgtggtgcaataataaacatttactaatgatggattaactaggcttaacaaattcgtctcgtagtttacaggcggattttgtaatttgttttgctattagactacgtttaatacttcaaatgtgtgtccgtatatctaatgtgacacggcaaaattttttaccctagatctaaacacagccttagacttttggatagagggagtagaatttaaggttaaaaattagtaagaacatgaataccatcatcagaatgattttttaaataaatacttcctccgctttgtattataagactttctagcattgcccacattcatatatatgttaatgaatctagacatatatgtgcctaaattatttaacatctatataaatgtaggcaatgatagaaagtcttataacctgaaatagaggtagtaataaatatgacgaatacatcaatacctacgagaatataatatgatctacgagaatacatcaatacactagaaatatatatcaaaaagcaaatatgagaatacaattccgccgtcccacactgtcatttctatgtatacatgtacaacccagaactccacaaagtaggggaagaataggcatttacattacggtaagccggttcaccaaatctcttctcctcttgtgacaccaagcaggatagcaatggcagcaagcgaagcctgttcgtggtaacaaaaaaaattcaaagcaaagttaggctttctgctttcaattataaagaacggaagaaacttacaatttcatgattagtagatatcaccgtgaaattttattttaccatttctacgccatgcttatcaaattttatgcacaagagtatgtataattattagtcgaacaatatggcaacacacggatatgcttccttactagtatcacttagtagcttctaaaatttaacggtaaaggagatttccttttcagctattcatctatttgcattcaattccacctatgcagttgtggcgtttatcagctttgtggcttgtgcttgcataaactgtcaaaataaatctgacacagtagctacagcctaagtctcagaacaattaacaatttaacatgtaaaggacttaaaatggcccgtaggccacagcaattttgaaattacagagcattgcagtggtgtaaaggacttaccgcaatagtgcaagcaacatatcctggtttctccctgtaatcatgtactcggacgcatatcaaaacaaaagctccaatataccatggaatggcagcgaggaagaagccaatgataaaccttttccaaacagtagaaacagcagtttctcagcgctcaagttcagaaaggtaacgcatgatgataatgttcagagaaacttacaggaaccagcccatgccaaggccgcaaaatggaaggcgtcgcattctcacaggccttccttcaacaacgggaatgtaacctaagaaacaataaacatgataaatccataaggcaggttaggacaatatttgattcatatcaatggaagtatcgaaccttcataaagcaaaaaatgctgaattcactcaagcagtacattgcattcttagataatatattcctgtgatgaattactcagaagaattatgtttcacacagagatcacatatagtactaaagagttccttcagaaactagaatttaatctctaattaatagttctgaagtatgtttgctctttgagcatttgtttacttgtttgttctagtgaactacagaaaattaccaacctcacaatggcatggccaaagaatgcaaatgaaaataccaaggaccaattaaagtttgatcataaaacagcaatgccatgtgtttcacacatggaaacaccagcaaaactacctgctcataagtgaatgttcggcatgagcaactgttgagcctaaaatcaactaaatttgaggtgccctcccttttggcttggcactaggaagtcgccaatccacaaatgaaacaaaacagcaaatgaaactacaagttcaacaacagagatggcggatatgggagatgcaagttagaaacacatatatcgccttctgatataacatgcatttcagaaatcaaaatggttcaggagatgttaacatgctctgttaccccaagtgaccacgtgagcacagatcacagattctaagagaataaggtacggtctatgtgaacgaaaagtataaaatttcaaggctcgatctggttcaatcatttttttagttcaacaagttactcatcatacaaacgaaaaaacccaacagggcttctctactagtactgatttcttcaaaacaggcagcttgcactaaatcaacagcactacacaaattcactaaaaatgcttccaggttctcatagacagtgcatccatcgtacgaaacggcgatccaagcgtatcacacataatcgaaattgcagggctagggtttcccgtaccttgcacggcctggtagcccagggcgtagtacggcgcggcggccgggtacgtctgcgggggaagcggagggtagaccgcgtaggacggcgggggcggctgcgggtagtgccggagccccggcggcggggccggctgggggaacccgaccgccggctgcgggacctcaccgggggcggaggacggggccccgaacgtgccgtactggtactgctgcgcctgcggctgcggcggcgccgacggctggaacccggaggaggccgagcggggcttgccgtcggcgtcaggcatctcgccggccatgccgcggtggtggggggaaggtttgctcgcgacgcgggagagacgagagagactttggaaatatgatttagccagctctctcatgacactgatctctacttatatttagcttaaattgaaaaaaaaacggcgtttgaaattgggaaaagaacgtggggctccagcctgtaactgtaagatctgcgaaatttaaaccaaaatttatacaggcaaaacgcgctaaatcaacagtaacagcatgtagttagaacggttctttgcagctgtttcacaaataaaccgtgctggttactgcctggcgaatggcgatagctaagcgacaaagcatttgggttttttccccttatttcaaccttctcagataaaattccatggcatgtggaataaatgattttttttctaagatgctgatcaaggtcacagaaaaatgacaaggaacaaaacgtgtttcgggcgttacatcaggctggcgtgttcagaaatcatttacttaggtgtgtttagttttacgctaaaattgaaagtttgactaaaattggaagtttgaagaaaaaagttaaaaatttatgtgtatagaaaagttttgatgtgataaaaaagttagaagtttaaagaaaaagttaggaattaaacaagggctcctataatctttatacaaactactatttctgtcgcatgaagaatcaacctagaaatgaatggaaccctaaacctagaaataaatggaacactaaatctgaactagtgtgtagtattctccaatgaagtcaaaaaagggaaaacgcatgattcgttcaagctgcaaaatctgtcatctttcgcgtgcacaaggtacatcagaatttgagaatgatgccacaattcaaccgactttcgctgagagctttgtatagcacaagacaagaggcaagctagcctctgtttattattattaccgttga

SEQ ID NO: 3774 - DNA, 11700 bp, Oryza sativa
acgctttatttacgtttggaactgatattacttgtcgttttgtgtaccctggctggtcctggacagggatttaatacacaaaatagtctggaaatttgggctaaatttctgggcgtgacacactctctctctctctggcgagcggcgcacggggcgcggtggcgagtgccgcgcgaggtggacgacggcgacgggcgcgcggggtggccaacgacaacgggcacgcagggtggccgacgtccacctcgcgccaaatcccatctccctccacctgtcgtcttcgccgtggggtcgtcgtctagactttctccgctctcggggtcgtcgtcgtcggccatggacgcgcgagatcctccgccgtcagccatggatccgccgccgtcgaccatggacgcgcctcctccaccgcgacgacctcgccgagggagagaccccatggagaacgtcgtcaccgacaactttgccgctccaccgccgcggcggctcaagaacggccgctcaacctcgccttggatttctgtgttcttgatttttcttgtgtgattttgtgtctcttgatttttcttttgtgattttgtgtgactcttgtgtgattcttcttgtaacgtcgccgctgcgatctgtgttcttgattttgcggacgagagtcggaggcaggaagaggagattttgctatggcgggagtggatctggagggcgtatcggggatcacgcttgggtttcgctggcgaggtcacgttgtgtctggggcacgcgctccacactgcgcgattccttgccgcgcgtgggtttgcaagagaaggaaccgcgtgcctcagcttgggggcgaggcgctctggttggacgcgagctctcgctccatgttcacacgaatccaacgtggaggggcgtagcaccggtccagctcaccgcactgtgaccggccgaatacactccacagtcaagcacaacatcccacacgcacgcgtgtgcgtccaacacatgtatctataggctttgaggacctaaagcctcctatgtgcgggaaacacatagtcccattgaacgcactcacgtgtgtgtaccctatacctaattaactaagattggactatgctaatccaagggaaaaggggttaaaaccccgtgcgacacccggtcgatcccaggatcgaacgtgggtggtaggctagccaccgttaggcagatttaccactgagccacaagctcatccgcgggaatgctaataattcgttaacgctggaagatcatatttccacaatatttgcaacatgatagaaaactatttatcctcattctttgttccgttaatatctcccaaaaaaatttaggtgctcaattaactactacttaaatgatctttacgaacagtcaaaacatatttttgcaaatagctgcgtgacccgcatacctcgaggtgtctgcgaaaatcggtattttcccaaacaggtggccataaaaccctagctcccatccgtcctagccatcatcattgtcactgcagtctgccattgttgccgaggccccgccacaagcccgcagtccgttgttgtcgccgaggcctcggtgctcccaaggccgaccccgccgtcatggagccacataatcgttgccccgtccccgctacgccatattaagctccttcaccaccgggcctcccaaccccttcgccgccagcgttggatccggccatcgagggctggatacgcccaccgcagggctacagacgctacctcaagaccgtgctgctcctccagtgtcgtcgtggcctctcccatcgctgccccttcagtgtcgttgtggttgcttccaccgccatcgtcatggccgctttcgtcgctcctggcgacaatcagtagagggaggagaggggagtagtgtggagtgaggagtggggtgagaaaaagtttttctaagagaggacataaaataaaagaagagactgggtagctggccaaacgtgtctcttaaccgtcgcttgtgaaattttgtttatttttgtaagcgggcatgttaagaggcccttatataaaatttgatttttgcatatgggtcttgtccttctcccggaccaacattatcacaggcgaacgccggcatggcccacctcaaggctggaggggggcttgtctacgaaaactgtttctatagttatgtttattcctctaaatcctctccagtcagattatttggaattaactgaacaaacccttagtaagcagcaaccacaataccaaccgcttattctgcttgttgtcttactgcaaccaaaatttgaattttaaaacttaaatttagagtttttttaatgtagtttatttttctagccttggctttcaaaccgctaatatataaatattttacccacaaatcttgtttaggaaaaaaacttttacctataaactattttttttcctcaattcagtttttactacagtttaccagccttatctcaacagatcgaaactaagaaacctgctgtttgctagctgaaaattgtttggcaaaaatgaatttcactaacaaggataaaggattcgagcaggaaaaggcattgcaaatatcgcagggaatcatgtatctttgggagaaggcgatgcgctttgtgcagattatattccaccagagatctcccgcaccggtggctcgaggtccccggcccctcatacaagcgaaggcacaactgcatgcgccacgccatcacgagaacaccaagttgcaccagtttcacgagacaatcagctggacacgaaggcctccacgtcgtcatctcattctcatctccctgtagagtagagaccatgctgcttttggagctttggagacggagtaaaatcttccatgggcgctggaaaatctctcgtaattccatgggcctcgcgtactgaacctaggagcgagatcatgcacaggatggacaggacacaggaccatggataaagaaaaagcatcacttcatggcaaaagctaaattcccccttcaaaggacatgggagttggagatggtgagatccattcgtttttttgttggatggtcccacgggtattttactagtctgaatttgtctttgtcaaagtgtaggttgcatttggggacggggaatcgccaacacatagtacatattaggtacacgtgtcttctacttggtcataaatacatgatgtttaggatagtattttattgaagttttgaaattttgatcatcaagaacttctcaatatcgttacaaaatttatgtgttttctatttggtactccatttcagttagatattatcaggaaggatatgaggatttgttccataaaagtccttttatttattcttgtagactcattgcccctatgtctgttgacagaggccatagatatgaacaatttctattattaaaaaaataaattcttaaatgtttagttaaataaatggtatgtgtatttttgaatactcataattgttaaatataaaattgatgactagagttttaaacattttagtcatacccttgaatgtcaaatatttatatccagtgggagtatatacacctacctattaaaatgtacatctctgcatttcttttgaaattggtgaaagttagagccaaaatctatggcttgaatctggtaggcagagtacacactcacactcaacagtcctaatcatctgaatccggtttcttccacaaataaccgatgcagatacacggcaattattctccacatgcttttgtagaatttgaagtaaacaacttgtattatacccttcgcaggagtacatgcaactcccatttggcttcccttatacgaaggacctctgttgtcccctccctacaatgtaaattctctttctcacgtgagtcagcaagatttcctttagtgttcattgctggacaataataatgcacagggcgccaatgctggcatcaacttctgtggtaacttacatagttacatgcaattgcacaatgttgctagtaattacagtatatcacttttaagttatctgttagaccttgaaccaagtgtgtccctcaaagcaatggtcctattgtcataaggcagcaccgaggggcaaaacatattttcagttttcaggaccagtacgtagacagaacctctcactgcaaggcaggctacaaatgcagagtaacagctaacaagaggacaaactgcacagccttgtagaacaagcactatgtggtctacaatttttatcctgagattcaaaggcccaaacgtacaatgagcagtaaggaccaaagaacaaaatccaattccatcttccgaggtcctgccagccaaccggagatacttattctttggtccagaaagggctccaaaccttgttcaacccatgctttggcacatattctaccaatctcgttggtgcagcccagatagattgaactcgaggaggccatggcaaaatttcctgtagattgtttccctgctactacatatttcaagactagctaagttgttttaagccttcatttacatcagtttttatttttgtaagtactcaattcatgtcatctgctcattgttctaaaaaaaatcatgtcatcttctccagcatatttagctgctatccacctgcatctgtgaaaaaaggttgccagcattaaataataaccttaaaaatagaattgcaaactgcattttctcaaatatccggcagtacacagcagcacagtagccgcgactgtgatgcctacactacaccaattaaatgcccacattgatatactgcatgaaaggtcaattacagatttcttcacaattatataacagtaaataccagaaatcatatgatagtaagaacttatgcatattaaaccactcatttagtaagaaggctgcttgtttaagtcctttaggacatacaggtcagtaactagaaatctaaaatgagtaacttaaattagcagtgcatctatgagataaaaactagtagaatgactaacaaagagaagtatttatgtaactctctcaccaccaatactagcacagtgtcctgatataggtgcatgaacctccgtccttgggaagcatatccccagaaacccagaatgagaaacatcatgcatgctgaacccagatgataattgcatgcatggcatttctagcaccacacaaaatatgattcatgatgcctagtggcgcacatgcatgcaggtccaacaaattgtctccctcctatgcaggaagagggtgcaggcatgaagcatctctattaacaccactagctttgcatatatccatgagttaaccagctgattttaccactctatcgcatagacatcttctgcagttatttgttggatgtccatcagtactataatgttagctagctatatgaaaattagagcatacatccaagcatccagctagttatcacccactaggccactactgcctactgggaaccctgtaacagtgtagctaatgggcaccaccatatataccttgtgacttcaaaagataaaataattgctggatttgtcatggtagatctgataccttaatatcgtgacactcccaatcttatcatcatgttctgtgtggttacaatgtaatgacattatatatcaacaataaacaaattttaacaaaacaaaaaggggcggtggagcttagttaaatgaaactaaacctcaggagaactacttcttttacaaggatataattttcagtcttttccaataactaattacgtattaggctaccactcaccaccagtctaccactacactcttatttatcacctattctaggttccgtaccctacagaatggttaacgtacgctgtgatcactcaacaattaatggaaggatctcaataatggtacatacagcatggtgcatttgacatttttattcgctaggcatgtatttttttagacggaagctaggcatatatttgagatattgacactgtgcaccatcagaatctacatttgaaagaaagcacttatatctcggaatcggcagagatacgatatatacccttcccttcttgtgggtcctcaacagagagcatcagaatctcactcgcctcccaatctgcaagccaaaaagtgtgtacactgttatattttccatatgagctacagctcactgctcacacaaccgcaccctcatgaacacgagtacagccggcgccccaatggcctataaatagctgccacccaagcagaacagatatcatatcaaaacagcagaaatctcttctgaagagaaaaaaacttcagtctagctgcacactagctagctagccagttcacttccaaagaaagacagtagtccaatccaaggatgtcttctaggtcaagcagctcctcccgcaacagcaacagtgtcaacatggactcagagtggagcaaaaaggagaacaagctgttcgaggaggctcttgcctactacggcgagggcgcgcctgacctctttcacaaggtgtctcgcgccatgggaggcaccaagacagccgatgaggtgcgccgccactatgagatcctcgaggacgacctcaagctgatagaggcaagaagagtcccgttccccaagtacaatacacagggagcatggaactgataggtaaccagctgggaaatattcaacctaattcaatcctctcgcgtctagtaataaacacgtgttgctaccttgctatgactcttcaaagctagtcatctcacgtgttctgataagttcagaatcggctgcttagcaaaacaatcttcagttgcaggctagcttgtaagctgatagctactgtcacatctcacacgaacacatatgcagggatcattagatgtcagccatgataatcatgccctagatgattgaacttgaacactgctagggtagtcagttgtcgtttcatttgcagttatacttttcagatgcagtgcaacatcagagtatctgcactgtactgtaacagataaatctggcaaaaccaagagctcataacttgagcctgtgacaagccatcatgcacacataatttgcatgcagtggtatgcacgatgcaccattttgtgattattggtttgcacataggctggtaggcacaggagttagccctaatttatgtactgatggtttgtcccctagttacaattattcacgtgggatctagcaccagaagaataatctctctgctaccaaacaaaagaaagtttgaatcttgcagtcttaccccttgagcagttgtgcttaattcagttccagactagcagccgacaggtgctttaaacatctctttttcatgtcagttcatctggcaaattaaaaggtgattgccttctttttaagaggcacaagtgtgatgtgtctataggaaaaggcaatttattcaaagttattctatgctctctcggaagggagcacaaccattgtaaccctagaagagggagctatgcatacaccattcttctcaaaatatattttatagatagataagtaatctctgagacccaataaaccacacctagaacgcctacatagaaagcaaattaagataaaacggcgtctgaatatctcctattcaaatgcaacattatggcgccctgaaatatatctattttttatcactgctaagataaactcacagttcatctttccaatttattttccaggggtggaagcatctgaggttccagacaacaggaaaaaaattccaatataaattatattccttgctagctgtggctaagttactgaaggaatcaaggaagtatattgatattgttattgcctaagaagattgtggtcgcttggttataaataaaagaagaaaagacttgtttgtacatactctaggttgtaaagcaaatcagtgtcgatcttgcagaaactagcctgcatttggcattgtgtgtggttgttaaacattccagctaaattatgtagtaaacatcagtgatgtaagacttctgtacttgtgtgctagtgattataaagttgtgcttgctagaatctcacttcctcattggaccaactggtttcagaattttgaatttgtgatgtctacatttgaactatgaatgcttcaatgtcccttccaagttccaaccaagatgtaaatgcaatgtagatatgacgttaatttgctcagtgctcacagagttctcacctcttgaagtagctagttatcaaccggagtataatgaaacattatgtattacactgccagctactctgaaagtggatcaagtatttgagctattatcaggaagaaagtagcatcttgctagcttcacacaggttgaaatgaagaaatacacaagtcattttcaagaatatgaaaaaaaaagcaaataaactaaaaggccagaagtatataccatttagacagttctacaccccaaaagataccatccgacctgtttaattgattttaagcctagtaatagccacagaccactgtaccaaaccttctgatcctggtacgacagtaaccaggaacagctagcgcctaggaataaaataaactagcatgcttaactgattttaagggtttttttttctatgaaacaaacattgatagtaccgatccatctacattcttgagatttgagacccagcaacacccaataggaatcgactcatatccgaaatatttcctcagaagtgtttggtaaaccattccgatcgtaaatcgtaatacataggatcagaattgcatcaaatctggccctaattatgatttcagtgttcaacttcaactgcggaactgtatggaagaagtaacacacaaagcatatagcaatcgccaaattaatttaccacacccttatctctctacacgcagtaatgaattaaaataacatgtagtaaatgcgagatgtagaatgcgaacccagtagccatagcactgacctagttttgccggttcgcggcgttgccctccgatcgcctctccgtgaggcggcgggaagcttgcccacgcgccccccgagtggccagccgccgccgccgccgccgcggctactcaccatcgcctcccctggttcaagcgcgacgaggccgcgggcgaccggcggtggcggtggcggtggcggtggcggtgcgccccttcacctgcggcggattcgcccttgccgggacgacttttgagccgcccaaccaccgagcgcccaaggcctgatgggcttatttctcccaacggcccatataccttcacgggccgtcctgcttcggtaggcccaaccgatagccttccgagcttggcccattgacacagtggcaacactgtgttttgtgggggatttcctttaactatttaccacaattaagaaacgtcgcaatgtatgacacagggagtcctcatatatttattgaatgcgcctacaaatcaggcgtccgatttttttttcaaaaatcggacgttgttttaccaagtagatcgaaaatatttcaatcttttaaaacgctgaaacacaaccaaatcacctcatgaaacattttgctataacgtatgaaacaacgatttttaaaaaatcagtcgttgtttcaccctatataaaaacaatgttttaacaaatagcgaaagaatgttttaattcttaaaaaaaagtgaaacatggtcagattgctagatgaaataatttgattcaacgtatgcaccctatgtacatcaacaaaccacgtgtctatcaagatgaaattattaaacagtagcaaaatccaccgcaacatttgatccatacatagcgaaacatcacgagtacactagctgaaacatcgttggtggaacaaataatgaaacggatccggtgtttctgttatatccgggcggctattgcaatgggcacacgtggtgagggcgcggaggcgtgacgcggcacggcacgggcgcccgacgcagaggattcacgatattcatggcatgtgagtccaataataaatacttaattatcacttgtaaaacattaggaatggtaaaaagttaaatatctcttcggcggctgttcgttgcaagcgcgcgcaatgtaaaaagcacgcgagcgagctgcgggagagccgaggacgtcggcggtcaatgtcgacgcagcggcggtcacacaggaagcagctggggcagggtcccccgccgggagagacgggctcaaaactgagatgatatggtgtgcggcgggggtgcagctggaccaccggatgggtcacgtcgccggccccgctaaactcggtgacggcgacaaaagctcctcaaaggatgccatgggccggggtgctagcttgccgacaacgtacgtaactctagccctgctcggctgcaaccgcaaactttttcatgtgcctcttgttgtgaagcaaagtgtagtgaactgataaaatgcaaaacaaatacgctcatttttcatctcaaaagaaaaaaaaaatatacacacaacttgcatggaacagcaatctgtgataggagtacatgcgccagctaggggcttgcactagacttcctagttaaggccactgagtacatgccctaacgaccgtctcgttgtagtgtctttgtgtgatgagcctccccggctttcgagagttaagagatccagcaacgaatggttcaaacctagagaaacgggacgaactcaggggtgcctatcgctttccaaaagatggcgatatagcctcaccatcctctctaatcaaagggcaaagagaggagtactatatgagtgaggccgagctagctaggcttcatgcatcccagatacagtagtgcatatcccaaacccaaccaaaggacaccaatctctaggcttaactctggccgtgtcgggagcaactttttgaacgacgatctcctcggccggattgcctgccccagccatcgcaccaaacacacaacacaacgctagtactcgcagccgtatactgtttggtgctcgtgctcctccccttgttttttctcccgtcttattttaacacttccgtcatgcggcgacagatcacacggagcacaaggcgtacaaacccctgccaagctgagcattaagctgctaattaaacaaacgtttattcagctgctaatccactgcacacacaccagatcaagggaatggtttagatactctgtgcagtgagcacgcaggcgagttttcgtctgctgcatatgtggagatttcgtggatataattacagtaatacagggaatggttgggctcgcaatagatagagacgagaaggaaacaggagccatgctttggttaaggtcgtgtcggcgctttggccgttgggcagcagcatacggaatgatgggctccacagcctttcgctttctctggcatcgctgcctcctttgacttggcagggggaattacgcagcttataaacatcaccaaaggaaaaggaatccagagaagaaaagaaaagaaaagaaaagcctctctggtgatctggctctctctccccctcagactcctcgtccgatgggcagtgacatgtaccaccaccaccactcgcaggagaaatgatcaggcatacagtcgcggcgcgccgtatcggatccccgtggcgttggccattgccattgccatcctgggttaagcgcgcgtggaggttggtgccaaaaggcgggatcttctatgcctgaccgcgactgttccttggaccgatgatcggattcgattcgacgggggactttatggaacttgggggagccatcatggcgagcccgattatcatcacgacgtcgcgccc

SEQ ID NO: 3775 - DNA, 901 bp, Oryza sativa
catatttggaaatttgccatctgatagtagtgctgttgagacaacgacaaaacttgctactgctgtatcaacctgtgttgttcggttggagttgagtggactaagtgcttgccttgcagctattgtgtgttcttcgttgcaaccccctctgcgaccccttggacatgctgcaggtgatggggcttctttcatcataaagtctgtactggacacagcaacagagcttctcactgatcagcatgtggcctctacctacagcatgcaaaacagagctctatggcaagcatcatttgatgccttctttgggctgcttacagagtactgcatgagtaaattcgatagtgtgattcatgcattgcaaacacaacctgctgtggcagcagttataggcagggaaatgccagttgaattgttgcgtgctagccttccccacacaaatgagtatcagcggaagcagttgctcggttttgctcagcgcacggtgcctgttaacaaccatagttctcatgggtccagtaatggacccatgacatcagaatctatcccaagttcagaaagctggaaaatatgagtgaaagcatagtgtttttgcttctttgggtaatcagtatactagatacaatggctctttaaaatggagactcttccctcattttcccagtaaagaaaagtcaatagtaatatgaatccaggaaacaaagatcgagagggttggagcatcgataaacagtggtaatataaggcaccaagtttactattgttgcgacatgtctggtttattatgttttgtagggatgcaatctgttttgcatgtattatgcagatggatgtgtttttgttactgggaagtttcttcctgagttttgttgctcatgaaacctgcctggtatctatctctggc

SEQ ID NO: 3776 - DNA, 2224 bp, Oryza sativa
atgatcttgctggagcattctcaaaggtttgttttttttttaaagcatagctttttaaccacataatatacacaaatgtgatctaacagaaacatggtgtattttatttttttttttggtagaaattgcagaatgtagattatagataaataaagttgcatattactgttgtatacctatttgtatgcttgcattgtgttgttcttttttaactgtgaacttatttgttgatttctccactttcagttgaccagaagcatcaatgaaccaacacaatcgggaataattagtcgtgggggttcaatttctagacaaagtgagtgggtatttgatttattccatttttcaaggatatatgtaagattcgttacatctggccaatgggatgaacatatccattaattttccattgttagaatgtgaatttcaatacatttttacagtctttgttctcttgtaggtttagggcccctttgatttgtaggaaaaatgtaggaattttggaggatttcaatcctatggaaaaaaaatcctatgaagggctttgaaacaaaggattgaatcatatccaatcctttaaaattcctatggaatgggtaatcctatgtatattttggaggaaagttagcaagaggtctaacctcttggaaaatttcctctgagtctatctctctcatctgattcctgcgtttttcctctggtccaatcaaatggtcattcctgtgtttttcctgtgtttcacaatcctctgttttacaattgtattcctgccagaatcctctgttttttcattcctacgattcaaaggggcccttatatatggtttctgatttattaacattgtattctaatgttaatgaattcaatttgtgtaggttctactctggactgggcacaagattcatattggcctacacagcctatatttggagctgaaccagggctgaataatgaaagccggtggtctcaaccacctcatttagcccgctttgctgattctagactgcacagaacatcctcatcgccgcagcaagatgctcaatacaatcctaatgaacatattcttggagcaatgccatctctgttgcatagaacttcatcatacccacaacaagagcctcaatacagtcacacagaaccaattccggtacctaaatcatcattcattccgtaccctccatctggtgcagtatcccattcttcgccaggtcaaccacataacatgaacatgccatctcctcccacttcattccaaatgcctgtatctgcacaaaatgagttacaccatccccagtttcctcgtggtggtatgcctccagggccacttggtcggagcatggctcatttggattcagcaggtttatcaactaataatttgcaacagaatgctctaaacagtgggccagttcgtccaaatggtgccatgcttacaccaggtttggtgcagcacaatctgcagcgtccaaatggattggtcccacctcaaatgctgtcacgccatccacaacatggaatggccccaattcaacactctccgccacaattctcacagttccatgctcagatgcttggtcctcggcatcctccaccaaaaggttgtcagatgtacaatcctcagcgtccatcacaaatgatgagtggatttgatgcaaatttggcaatgcctgacttgagtgatccgagagcaagagcaatgctgcaccatggagtgcatggccagcattatctcccccaaggttttgagcttgctggtatgaggatggataatgggtggccgcggttcagatccaagtacatgtccacgcctgaaattgagaacattgcaaggatgcagcaagctgctactcagatcaatgatccgtacattgatgattactatcatcaagcctgtttagctaaaaagtcagcaggaggtcaactcaagcaccacttctgtccgaccttgattagagatccatcatcccgtgcacggagtaaagatgagccacatgcgtatctccaggttgatgctcttggaaggttaccattttcttccatccgcaggcctcgtccgctcctcgatgttgaacaaacctctgaatcaagtgatgacgttactgaaaaatctgcttcaaaaacacttgaccaagaaccaatgctggctgctagaatcacaattgaagatggcctctgcctactgcttgatgtagatgatattgatcgcttgctgcaatttagccagcag

SEQ ID NO: 3777 - DNA, 1192 bp, Oryza sativa
aactctaagaaattgcctttgttgtatgaatcacttgattcatcatggccccgaaaaggcaaacctagcttaacaacctcctagcaacattaattgatccatttaatcgaacaaaatatgcatttttagtagcttcgctttgcacttgcatatgtatatcgatgtgttgggctctttgcaacaaagcatcacaatttttcatggcttgattatgtaagctaccaacaccactaacatgctcttttagcctactttttctatgccaaccattccaaccatcaaccacaaaggctttatacccatcctctttcttattgcgatctctaaaacaacattctctgtcttttgccttgtatattcaagccaacttccaaattcatcaaaccattcctcaataaactttctgtctttacctgagatctttgtaaccggaaaagtgaatagacatggttggcaaggccctttctgcaagtatttccttctgactatatccctcttactaggatggtaatcatcaatctcttttctcaagcctggatcatattcaatctcgttctcccaactaccatcatcgacttgttctggacaagaattccgtacagctgcattattggaactatcgagcgctttcctcaaggtacttgtctataacctgtcaattaaatagttttattatgttagactataagtgcactgcacaatagaataatgtacacccccaaaagacaaattatttagcaattatgatggtgtcacagtatgcttacaattttactaagtgatggttgatgccttgatggactgatgactacaggacaacagatgtccttgtcccttccagagaaactttcagttcttccctagcttatataaatcattaaatctggataattgaaaaggtgctattaacaagttagaaatcaaataataggattaaaaataagactagaactagaatagatgataaattgaaattctctggaactagttaaaagaaaaataagtacctatcttttactctttagtctcttgcttgtgcttgactgcttgtgcaatgcagtttgcttgctcggctgcaggttgctggttgcctgtaggctgtagtagtagtactccggctgcccgctgggcgctgccgccgtgccgttgcagacctgcagtgctgcggtgctgccggcggctagctagggcg

SEQ ID NO: 3778 - DNA, 690 bp, Oryza sativa
atatcagataatgggtgccattactggaatactaaatggttctatctggtagactactaattatcagtataaagacagtaaattctgacgaaatatcccaacataataatgcatatttatttggattaaactttaaactcatctgtcacctctattctaaaaataaaatcagcagcagccgttccaagtcattagacttgataaaacagcaatcaatatttatgcattcataacattttggagaaaatgaggtggtcgatgcctagataacaagaaaacacagtgtaaatctgaagaacaggcctaaacattaatacatttgcggtactgtgcaaggttccaaaagtgaactagatgtagtgatgtttttgtatacagtgtaataatccaatgtattgaggatgtttacgtatgctatgactatattttccttacatactgaggaaatctagaatgcagaatgccaatcattagcacaagtaatagaagaacactgtaacaacgaaatttaacaacatccatatcattattttatagtgataggtggccatcaagcaaaatcaccatacctgtgaatcttcactaccactagcaataaaggcctgctcggatccaccaaaacaagaccttatcacaaaccggctgcgcttatgaccagcataccggttaactcgaatggggcaattcctt

SEQ ID NO: 3779 - DNA, 548 bp, Oryza sativa
ctagggaacagatcgaaaaatgcacctcagattgagatgccctgtaaaacctagtaaattcagtccctaacatacccaaccattttcctaattgccacggaccggggcagtatcgtaaatatttcgcatgcgaacttgctgcaccgtattaccaccaaggcaccactcaattcgaagttggtgagtaaaaaagctcctaaaacaaagttctaatctatgcaaggaaacaattcgattaataaaaagaaaaagaaataagcccccggtaacagcagcaccaatcacctcgtggcaagagccagccacggcacgcactgacagaccaggcaaatccacacaaagagaaagggaaccagataatacacgcacatgaagtagaagaaggcggtgggcggcttcttggggcggcgccggtcgacgaggggctgccccttcttccgggacggcggcggctgcggctgcggcggcggcggcttgggccgcggcttgacaggaggcagccgcaccgttttcagcggcttcggcgccgtctgcgacctcgtcttcat

SEQ ID NO: 3780 - DNA, 701 bp, Oryza sativa
atatatcttgtcctgtcttctgcaacttccgtaacctcaaaatctggaataattttcctacttcagatctatatatggcatagagctactggagatcttattgaaactctgctggtcacaccggcacggtcaactgtgtgagctggaatcctgcgaatccgcacatgcttgcatctgcaagtgatgatcacacaattcgtatatggggtttaaagaaggccaatctgaagcgcaaggatgttggcagcagcaatgggatctatgcaaatggtaatacacccagcaatggtgtggtacaccagtgcaacgggaacagcagcaaatgaacatggcttgctaaccaatggatggatgactggcatttgtaaatccccttttccttccctttcctttagtttcctatccatcagggaggacgccatagtaaaacaaagctctgcagcacatagtgtggggaaacctgctgggtttcatgcacgatctctcatgtattccatcttactgtttgtcacatttatttcttaattcatgctgaaaagatatttcgatactatattgcaccttaaaggtctttctgttcccttcattcttagtgcttatggtaacaagtgttgtgatttaagtgctgattgatcaagcacagaacagattgtaactgggtaacctatggagaaaaggtcatctttaatgtaatgcaacat

SEQ ID NO: 3781 - DNA, 1379 bp, Oryza sativa
aaagcattgttgcaggggagaaactgtgagaccaagaaattaaaattttattttatgccaacctgctgcaaagagatctaatgaggattcgaattgtgaagaagacttgacgaaaaaaattgaagaataagtttcaaaaatttaatgtccttgggcatagatataccagatgactataagctcagctaattaaactgaaaatgacatgcataagaaccaacttagattaggtggaatgtaagacagactactgtgaccagatgagaaaatatgcactttcatggcaatagttacaagctaggaaaaaaggtgttatactacaagttcatagggcaaaattggcaaatatctatattagattccttgctgataaagctagctggagataactctcaagtagactgatgaaatgatcagataaatggcaatattttatcttaattttcagagatcgttttttttttcagaattcacttcagacagaagtaacagcagagacacaaaacttgagggtgtacagaagggattgttctaagaatgtctcggatttaattcaatgaaaggatccaaatcctcccacccaatcaggcttgaatgaacttgtgcaaaatcatgatttgacgaaaggtgcaaaatgggaagttcagggacaacaggctattggactgctaaacaaacagctccatgcaaataagccactatgttcatggatagattcgtaatttttaccttccatatgattgcggatttatcatttgatgctgaggctaaatactttccattgtttgaaaattgaagaaaccatacttcatcacggggtgcacgcagaacctgcaacaagaattttaatgtgcgattagtaccagtgaattttgagatatggagctgccagcaaagagaagtcttggcgaataacttaacgggaaaaaaaaaagcagttgatcacccaacggtaaaaaaaatgagtatatgacaaagcatggttatagaaaaccacaaagcaaatccaccttgcacattagggcctgtttggtagagctctaactcctaaatttagctccagaagtttggtctggagtggagttgtggagcagcctaaacccagctaaacctctctagttcattttgtgtgagtgctccacccagctccgctcccattttaggtggagctgaaactgtttagctaggctccagctccagaagatgtggagctggagctggagctggagctgtgccaaaaaggccctatgtttacatttctccatgcaaatttcccacaaaaacacaccaaagcccagccacctagccacaacacggattcaacttacacctcatgtttagcgtttagacaggcaaatttcccatagcaaaaagctagg

SEQ ID NO: 3782 - DNA, 2277 bp, Oryza sativa
tatgagagcaaaattagttgaagaggacaatagtcactactagtcataaaatatgagaatcaaatgaaatgtgagaatcaaaaatcagttgatcccagaatcaactgaaattgtatcagaaaaataaaattcactagcagtcactactggttcccccaaaaattatgtagaacaaagcaaaatctgtataagttgattgcttatgagtgctgatgaggtggcagacatatgcatatccacagtgagaaaaaaaagagttaagctaacatgaacccacaaatggcaaatagtgagggcatatatgacaataaggcaaaaagatccccattcagtgctagtggtcaaaaatgccaaaaagtgcagatgggccagtcaatcacaacaatatatgctcatgaaaatttttacaaaaatcatcaaaacttcgtgactacctgcaaccagactgaacttaactcagtataagaggataatgagttgatgactgcaggaatacaaacttagaaatgcagaggtgtataaatctgcagtatgtaatcaaacacaacacaagcggctgctaggttttctcagttctggatggtttaatcgtttatatttaccagcacacagtttagacaaaaaagtgcacccattgcactataaaaaacagagcgaaacactgaaactttactgaatatctaatcctacaaatacaaaaacaaaatcagttgatgaggacacctagaatcaactgaaaaaatcgagtcagaaaacaaaattcaaaaccagcccctattgggttctcccaaaaatttgtctagaacaaagcaaatctgcgcacaatcgtttcaggggaaaaaactaactgcatatggaggaacgcaaaatagtacatttctgacaaaaaactcagtacaccaagttaatgcacaaagatgtttttgctcctattaaatcctctgtagttttttctctgaaaatctcactcaagtatgaatgttattagaaagcaacaactatatgatgacacctacaaaatcagattgcagcaatccatgcatcatgtgaaagcctcatgataataccaggtcaagcagggcatggagatagaaaaatttctctgtgaataacttgaatcatgctggcaaaataacttgagatatgtagtatttcaggagccaaatatgctccaagattgcagctggatattgctctggattgaaaatcacattgcaaaaaaatgcagtcatcagttgtgcagcaatatgcagtcaaaaatagcattcatttacagcaatctgcccaaatattccagctatatcaatgcattgattcagcaatatgcagcaatctacccaaattgtccactcactccaggatacacatggaaaatatccagcaaatatgcagccacaaatattcccatttgcaatactcctgcttacagtagttcattgcaatactccagcttacagagattcaagcaatggcgttttgggtttagatccatgattttgctagggttaggccctaaccctagcagcgacgggcggcggtgacggtgtctactgcgggggcggcggccgcagcgttaaccgcggcggcgacgacgtcaaccgcggcagcgacgacgtctacgcggcgacgacgtctacggcggcgtctacagcgtggtgcatgtggtttcacggcatgattttgtgacggacaaacccaaaacgccatggatctaaacccaaaaaaccaaggaactaaaacaaaaaaaatcaccaatcaaatcaagctagctcgggggaacagaaaatcacttccaaaaattaaaccctaactacaataaccgagaaatagcaggaggaatcgattccaaggatgctcgaggagatcagagacgaaccacgttgcgttggagaaaaatcgtcggagaatcacaggagatatcgaaatcgccaggagaggaagaagagggtactgttcaaaattgcaacggcatccgcttccgcttctggtaagggcgataaaaaaaagccaaaaacggttccgtgctgtggatgggctctcgtgggccaagcccaataggaaagaggctgagaaaagccagaaaaggcaagtggtggcggcaagtggcggaaagggaaatcgatcgctgctcctgtcgcccaacgattgatcgcgcattaggagtttcgttccatttaggtataaagtacactgacttccctagcatttctggtaattcacgacgctatgttacaatgcttgattactaccgctaccgactccattaccggttgaata

SEQ ID NO: 3783 - DNA, 960 bp, Oryza sativa
ttcaaagttttggaagaaactttaggaagagatgggttccaagttgaacttcagtaccgcttaccatccgcagacagacggacaaactgaaagggtaaatcagattttggaagacatgttgagagcttgtgctttagacttcggtggatgttgggataagaatctgctttacgcggaattctcgtacaacaacagttatcaagctagtcttcaaatggctccttatgaagcactgtatggtcggaagtgccgcactccgcttttgtgggatcaaatgggagaacgtcaggtttttgggactgatatcctaagggaagcagaagagaaggtaaagatcattcaagaaagattgcgtgtggctcattctcgtcataagagttatgccaacaatcgccgcagagatttaagttttgaggaaggagatcatgtgtaccttcgtgtcacgcctcttcaaggggttcatcgttttcacactaaaggaaaattggcaccgcgttttgtgggaccttataagattgtcagtagaagaggagaggtcgcttatcagttggagttacctcaatccttggcaggtgtccataatgttttccatgtgtcacagttgaaaaagtgtttaagggtacccaccgaagaagctaatctggaacagatagtggtccaagaggatctgacatatattgagaaccaatccgtatcttagagacagatgagagaagaaccaagaatcgagttatccgtttctataaggttcaatggagtaatcactcagaggaagaatctacttgggaacgagaagatgaattaaagtcagctcatccgcatcttttcgctagttcttccaaatctcgaggacgagattctgtttaagggggtaggtttgtcacaccctaaaaatcttaaatatataaattgttgtttaattggaatcattagaaatgaattttaaaagcctagaagaga

SEQ ID NO: 3784 - DNA, 664 bp, Oryza sativa
actttcgacgagacactagtacacaccagtgcctgcttctgcaccttgaagatgtagatattgtaggtctccatactcttcttgaaaccttaaagatgtagatcttgtaaggcttggtggggcgcatagcgccccgagcaccttgggggaaagggaacccctgttcccacttctccgataggtggagcagggccaacaatttggtaaaaggggctataaggaagggtataaataatctgatcattcttggtgcatggactatttggaagcatcaaaacaattatgttttcaacgaggctgcctcaagcattttggcttgagtagttcttgcgagtgacgaggctcacctatggagtttaggcggggccatagggacttccgttgattatggatcccagttaagaaggcctgtgattcaggttggtaggagaaccttggtgaggcactttgttcttcttttgctcgtgttatgttttctctcttttcgtgttttctgaatctttgtatttgcatcgtattcctccgttcttccattaatgcaatgctacataactctcatgcatattcgagaagaaaaataatcttaattagtaaatattaagttgatattgattgcctctttttatcttgtttttgaacagtttttcacttgtaaaatatcatt

SEQ ID NO: 3785 - DNA, 1236 bp, Oryza sativa
tttcttattttataaattttagttcttttctctttttttaaacaccaaaaaccatgagaacaaataatataaaattcaccatccataaaaaattcatcgtccatcatgtcacacattcatatgtaaatattcattgattcatatttatattgaacagcgactacatttattagccgttcacattcttccttactcctttattcctcatgtacggcttcggcgattcactaattgtttcttctacaagcttaatgtagtttccaaaatccatgaatagtgtcatgttctcgtattgattgtatgcctcaacatcttcaacatcaccaactcccaaaatcctttgttttccggaaataactatgtgtttcttcaactgagatggggttagtcacgtaaaaaacttgggtggctcgatcggcaagtaccaatgggttattcttgtggcttacgttgtcaaggtcagcaattgtccgtctaaatttgtccacaaacacgccagctgggtgtttcactcattgacaccgaaacggtggaatctgcatattgggttcgtagtcccgttcccaaatttcttctatgaattcatagtatgtgctcttttgacctgttgtgtcgatttcctatacttgaacgccattattttgagatgcactccttttgtctcttgctttggtataaaatgtgtacccattcagatatacgctcaccatgaggtgtacactcttgaatgcccgtcagccaaacttttcatagttttttccttcgtgctatcaccatatggtcggccgaggtcctttaaccattcggtaaagtcagatttgtgccatttcatgatccatgcttcagagcgcctgacatttcttgcttgtaattcctttaggtgctgctctatgtacagctccactatcacaagctgttacaggacaatgaaatgagcatctttcactgctttgtagtcattgtcgaggattcttttttcctttttgtccctcttccagataacctacctttatgtcgaggtactagtaaaccaattgctttcccatcttgcaagtaaccaatgcaacactcaatgactttcttggtagtgtatccctctatcatcgaaccctctgggtgggcacggttccgtacatagcctttttagattggacatatactgttcgaatgtccacatctgatgaaggtacaagggcccaagcacaagtatctgaggcacgatatgagggctgcagg

SEQ ID NO: 3786 - DNA, 760 bp, Oryza sativa
  unsure (1)..(760): unsure at all n locations
tttttgcaggtactattcaggggtacgcattggttacgccaatgggcgaagctgcaacggcatgaggatctgcgttcacagttgatcgcggcatcgcaacatcttgagtcatcagctttgcaatttnttagttccaatggatggttatcagctagacacatcggtctttagtcgtctgaacttttatctcggttttgtttccaagtgttactctgtaagaacgtttgttataattggcatgagtctatcttttgatagatgaagccgggtataaaatatccattatctaaaaagaaaaatttgataacactcatgccacatatctatataacttaataaaattttaggtccaaactgatcaactcactagtcgagatataaaaaacaaattcaacgtatgaatagtgacatactgttcactatatatactttatattatcactttttgaaaaaaaatcgtaacacagtttgtatttaatttaaaagaaaaaggtatacaaagggatatcccttcgaaggattagaatccactctctcagatatttaaccaatattttctaatgatgagatttttttctagacaccacaactgtgtgtggtagcatttgtatttttatgacttaattattcgtcgctgatgtcgtggggtctaataaggagaggacaaaatgaaactactgttctagtttctttcgatctaaaatatagttacctttatatatatatatacactctctccatcctaaattatgggctgcag

SEQ ID NO: 3787 - DNA, 817 bp, Oryza sativa
gattttaatctagcaacttcaaagttaagagattcaataataaactcctattttctatacatcttctcacacttcttattttttgcactcaaaataagaatagcttcctcaaaagaacggacctcattgtcttcacactctgaatccgattcaccaggtgccatgaagcaaacaccagagatgttctttcccttatcttcatctccactttcaccatctacatcgcttaatggctcaaaagcagcatagacttgagtcaaaagccttcttgagagtctctttgatcttcttccctttgaatgtgctcttcggcttgttatcattggtcttctcaccaccattttcttccttcttatctctcccaagcttaggacaatgcgaacgaaggtgatcagacgaaccacattcaaagcaacgatttggtccacctcttttcctgtacctaacattattcatagctcgagaaaatttgttagtaaccaaaaccaaatcctcctcctcgaactgttcgagttgctcatcggagatggcattaattaaaacaagaatagaagacttcgatgaaggagcaccaacatccaaaaaagtcgaggaagaaaccaaagcactaaacttagaatcaactttacgagaaaagaatattcatctcatgtgttttgagttttgtgtaaagcgaatccaaagtcaaagtagacatgtcaacggactcctgaatagctgtaactttcatctccaaataggcatgtcaagaccattcaaaaagtagcgagaaacctcagattgtgtataattaacatcataagaagaatcaacagat

SEQ ID NO: 3788 - DNA, 687 bp, Oryza sativa
aatcttgctgtcagcacctatacaattcgtttgatttttgcattatgtttctgaagcatgacagagaatgaagttcctggaactgcacatgctggagccatgtcatcagagatggctgtgagtccatcatctgcaatgtcaagcaatcatgtttctttcactcctgatatatcagggatggatgtggatgcatctactgtaaatgccacctttggagatgatttagggaatggaggacctctgcaaataggaccaaatggtggtgatagctcttccttggggcagcagatctgggatttcagtctttctgatttatcagcagatttgacaaatctgggaggtaatgtcctatgttgtgagatattatcttgtataacacttgcatttttaattaattctctgggattctcattgcttgtttgatatcttggttaattagttgaacttatgccatatatagtgttgtatttctctcctcaattttgtttaccccttgttggagtaaatcaagatcttcgcttggctaaaatgtttgagtagtgctgcttctgttctcccccacatactgaattacctgacttatagacagtattctagcagtgtagtatttgaaaacaagctcctgaatgtgcttttcactttttgtcagtgcttaaaagaatatatttctacttaatatttttctgg

SEQ ID NO: 3789 - DNA, 1546 bp, Oryza sativa
tttttaataagataaatgatcaaatatcacgttaaaaattaacagcatcaaatatttaaaaaccgagagagtagtttggaacacatgtttaagttacagtcatttaaacttgaaatattggctattattattgaacctaggaacaagatagtagttccaaaatttaaggtgtgatatcatattttgtattatccattttacaatatattgttgatactatctttttatggaccgccacttcgaaaaagcaaataatacttatctcagtctccagaaagttaccaggaccaaataaataaattttcaaataagtaatcttatttttcagtaaagcaaagcaataatgaacttatgattttaaggcttgctattcactctataattatatattgccgataaaattcatcacaacaaaacaaaatagtgtcaggaggagtagatttgttgagagaaaaagaccgagaataacgtatttggcccaattaagtatatacatatgtaatgcgtaatatacctacatgtgttgattattttcggacaacttttgagtattcactccaatacccaagagcctccctgtgtcccaccctgaagcaaacaaaccaggaagaacaataacaacagcatgggtagatatgttggcatccctgtaaactctataactcaaacttgaaatcggcagctctaaattatttaattagtaactggactaaaatatatatttctcgaaaaacgaagtggacaaattagaacttccataaatttagttttctcattaaaataagattttgttcagatttaagcatgatattctgctggtaagttatatgatattatatggagcatgtgatgatttttttaaatattcttttaagtcatttactaatgcaaacatagttgggggttaacttggaccaggttgtcgaaaaactagtataaagccacacagccacaagctagaatatccatcaataaacacatcatactgccatctccctcaactagttgcaaaagcacacgttcttccaatattccatcagccatgcctggagcagctgctgccgctgttgttgacagccgcctgtgcacacagcacgcggaaggccctgctgcggtcctcgccatcggcactgcaaacccggcaaatatcgtctatcaagatgggtttgccgactactactttggtctaaccaagagcgagcatcttattgagctgaaggacaaaatgaagaggatatgtaagtagaacaatcctttcatttcgatcgttgcattgatcatcattatcgttagttgtttttcataaactctaatgagaataaattatgcaagcgcttaaatttttaggacactcctgccataattcattataaaccatacaaatatttatactatactacgtagaaagaagagtgaaatgatgttggagttcagccaaattttctttatttcgcgtgtgggatgcaatgtggatgcatggggtgtggttgcatcccaaaatttttgaaaaaaaatctactatatacagtatatacttggtacatat

SEQ ID NO: 3790 - DNA, 2112 bp, Oryza sativa
agtggcatagatttccacctctctatccaggtgccaacactgatcaaggacaacatccggcagtgcttgcttgacacattccgatcggttggaaacatggatcctaattggaatgacctcttctgggcagtgcaccctggtggccgtgcgatccttgacaacatagaaggcgagcttcagctgcaaccagcaaagcttgcggcaagccgccatgtgttgaacgagtatgggaatatgagcggcacgacgatcgcgtttgttcttgatgacttgcgtcgccgtcgggagaaggaaggagatcagcatcaacaacttgagtggggagtaatgctagcctttggaccaggtatcacaatagaggcaatggtgctgcgtaacccactctcatgaagtcttaaggaaaattaattgccactatcttatgcttgtctggtatcttattacggtatatgttaattaatcaatgcatgacactaaatcaattctgcatgcttaagtggaattatgacctaccggtgatgtattgatgttgtggagttcctatctaatgtttattgctgttttttctgtatttgtaacaaaatttgtaataccctgtgtataattgaaaaagcatattgcttatatgagttgcttcaatccgagtttggatcaattgagatgtatctttcaagaaaacacttgaataagatcaagtcagtattttgcaagtgaaaaaatgttccaaaacaagataaaaagatgcaatcaatttcaacttaatctttagtaattaagattgtttttcttctcaaatatacatgagatgttgtgtatcattgcattaatggaagaacggaggcgtaagatgcaaatacaaataatcagaaaagacaaaaagtgagaaaacaaaacacgagcaaaagaagaacaaagtgcctaaccgaggctctcccaacaacctgaatcatgggccttcttaaccgggatctataatcaacgaaattcccctaggctcaataggtgagcctcgtcactcgctagaactagtcgagaagatgattggagcagcctcgttgaaaacacaggcgtttcgatgcttccaaatagaacatgccctaagaatgatcatattatttatacccttccttatagcccgttttaccaaattcttgtgtcttagctagggagatcgatctgctttcagaaccggcggcgcgttcatcttctcgtcgttcgatctgatcagcgagaacaattctgacaccggtgtgttcttcgatagatccatctgatcggcggcagcatacgcgcttcatcccacggcgagttctttgatgaatctggttggtggcggcaggcgtgcgtcctcctgtcgtctcatcgagttaatcggctcgacgtgattgagttttcggcgcagcaatccgaagcggagttcttttttgctaccacgcatccaccgaaaaagcagcagcgcatagctgcacggctctggaggaggaagaaaaatcaattgaagatactgctcgcttcgtgtttatgtgaagttccaaattcctgttggatttttgtacgtccacaaagactttatatcagggaatttcttttcttttggaatctattatatatattttttgatctggaattgtttctccaacatgtcatgtatcaaatttgacattgagaagtttgatggcaagattagtttttgcatatggcaggttcaaatgaaagttgttcctacacaagttgatgttcggaagcgaatatgattgatcaaggggaagataggctgtgttatctgtgtgaatggtaccgtatacaggttcttaagaaggaatcacaaataccgttccaaagcagcatatttcgacaacactgaatagcttgatgatccaccaggaccatgcaagggtgatagagtgttccaaatgacgaaaaatctcaaagtttttttttgagaaggcaaaaaagaaggaaaccaagcggaagcgaaatgcggaaggaccaagcgttctattcaatagatatatagatacatcattttatcggtgtcatgcacctagagaaaaatgtgttctatagaaccattgggactttagtagccataccaagcaagacaaatgatgg

SEQ ID NO: 3791 - DNA, 4848 bp, Oryza sativa
tacctcatagaagaaaggtaataatagtgttatgtatctccactatgaacaccgagttttaactccaagtcaaccattagataataacaaactcaggaattaatacaagtgaaagcatagactgtgaagaagcaaggaatttgggaatagggagaagcactaatggtgttcatgcatgactccatccaccagggtttaaatcctaatgcccagaaatattacgcacatataactggactttcaaccagattatactgagatcagagatgtgctgctagttttcatctcttagggcacccacaatggttatctataagctctctacaagagatacatgtcggcatattttcctacttggaagagattaaatgaagagagagagcaaagctatctactaacctggagatagtctatagagaaaaacgaggcaatggattagagagctatagatacccatgtagacatactattgatgtgatttactattaatctagtctattgctgagatgtatatgttttatagagagcaccttactttaccattgcgggtgctcttagagcatgtgttaggagacgcattctttagggtgtgagtgtgatgttgtgtgtgtagtggtgtgtgcgcgtttgttgtgaaattaaaaaaagaggattttaggaattagggaatggataatagagtttagggtggagactggatagagcactgctacactggcccactggggaaggaagacgagaacccaattctgttgctgctgctgcctctttttcatagcttcgacgttgcttgtttgggccccagcccaaagaccgtgacaaagggcgtatgttatcagaatttatcgcaattaaatgaagatagtagctcagtcgcatattaatagttacttaattaaacttgatagggcaaaaggaggacgatgaacaactaaatctcatctctccaaacccctaaaatcatagtattcgaggaggaagaggatgagtatacgtactcgcgttccttggactcttctctacttcctccaaataaccacactctactctctctctaccacaaattaccatttcagaatagttgagtacttgagttcatttcagaccagtttgtagccggtgacccagatgttcgccggcgccggcgccggctgcacgtacacgaacctgaggctcctccccggccgcagcgccggcagccacctcggcggcacgtacccgtacctcgcctcctccagcccccacagccgcccccggagccccgacacgcccaggtgcagctccctcaccgtcttcccccgcgacctgttcgtcaccgtcaccgcgtaccggtagtacgtcctccgcctcctcgcccacgtccccgtcacgttctgctcgatcccgatcgccgtcgccgtcgccggcagcgacgacgacgacgacgtccggttcacgaccggagtcgccgtttcttgttcgtattcctcctccttgaggccgccgcaggaggcggcgaggcgggcgaggacgccgagcagcggcgcgttgttgtaggtggcggcctccgtctgctcgtagttgtcgcgctcgtcggcgaagtcgtcgtactcgtcgggcccgccgacgacggcgccgtcgagcagttcgggttgccggcttccctcccgtaccacgacgagtacccctcctggcagctcacgaacgacgggtccctcttgatggacacgatggacgcgccgcggtggtgcacctgccgcgggtagctcgcgccgtacccgaccatgtagctcgtccccctcggattatcacccaaaatataattcacctgaaatcaattcgacaaaatttgagtaattcgtcaaccacatttgacaatgttttttttttctcgtgaagtggaagcggtgagagtattgccgaatatattagaaggacagagttgaccctgtttataaggaaaaccggctcaaaaaccatacaattgcacggcctttgacaatgtttttgtttgttttttacctgagatttgacgaatttgaggatgtcgaatggttgggcggcgccggcggggcagtggacggcgccgcggccggagatggcggcgaagtcggcgtagacggtgaggaggaaggaggcgctggtgacgaactggaggttgttccacctctggtggtacatcatgccgccgggggtcctggcgacgttgacggcgcccttgccgacgcaggagcacacaaagaactccgcgttctgcctgtacctctgcagcgcggcggcgtggtcgccggcgcggccctggaggaggaacttggcggcgaggacctgcacgccggggtacttgacgtcccacccgaactggttgatggaccaccccgtcccgcccagcgcctcgccgttgccggcgaggtactccaggtaggacctgtcctccgtcgcctcgaacagccacgccgccgcccagagcagctcgtcctgcagcaagatcaggtcatgtcagcaaggtgttcgtccgaatcctacggcgccgccgccacgccacttaccccgtatccgctgaaggagccgtagtagtttcgcgccaccgtgatgctggcgtcgtacttgccccggtacttgtcggcgaactcgaacagctgaacgcgccacaaaattttcagaggaaatttcgtttgatttcgagctcatttgcgagagttcttggagtgtttggatgaccgacctgcttggagtgcacaaggaggaggttggcgtagccagggtacgtgccgcggaagacgatggacgcggcggccatggccggcggcggtctcggcggcgaggtctgacccggggtgctgggggtcgacgcggaacgcctggcggctcgtcgtcatgtcctccggccgctgccagcagctgtggtcggtgtcgccgtcgccgacctcgccgtagagcacgtcgggctccgggtgcgccttgatgaagtagtcggtgccccacttgacggcgtccatggcgttccggagctcgccggccgccgccatctgcttgccgtactctaatatgctccacgacatcatggtcaccgtgaacgccattggcaacccaaacttgacattgtcccctgcatcataataacctccaacaagatcaacctgaaagacaaacaaaaacacaaacatttgcattgcactccattagaacccaactcatcatatctcctgaacaaattgaacacaatgccattgatggcatcatggttttgatcaaagatttgaaggtagaatggtgcatactccattggcctttccatcaaagaggccagagctggctctccaggagaccctctggttaggagggagaacgccggaccgctgcgcctggaagtagaggatgctcttcctcaatgccatggcatagtcatggccacccccagcaacaaatcccagcttcaccattgatgcaagtgccaagagaccaaacaatgtggctgcaccgtgagcaccaccattcttggccattgcaaaattgcaatgtaccaagaaggtgagtgagtgagagtgaagcagagtgaaggagcaggggagcagaggactttggttggcttggcttggagggagctcaaaagagtgcttcttatataccactggagtggagggaagatcagataaagcaggagattcaaagcatgagaaatagtttactgaactccagggcccctttctcactttagcaagttgttgatggcaaatattattccaaatgcatgcaactgatgaactcctaggtaggttacatcctcctacaaaatggcaagttttgtccatctctttttagtaaactactgactaatatagccacttctatgattgattatattattcatcgatggtcaccatctgttgtgagatatacactgaaatgcgataagcaacattagacagtggccacataatcagggcatgtattttagaaagctttcatgaactccacaaaagtaaacatttggtgaaaaactgaaaatgaacataaatcggactaaagttgctagattgccgatataaaatcatgatatgatagttgtaattttacagttattgtcactgagaaaaattttgtgatgttatggatagttaataaatgggataaagataattcaattccattgaaaaataaataagaaagctacatattacagaagttaactttgcatgcatatgcttgagaaacaagcgattcctcgtgcaaaagaacaccataggaactaccaactttaaaaaggaaataatgcaggcaattgtcttgcaattttgggagtatctgtaaaagccaaagaaaaggaaaaggttaaagaacgtcgtttctctatagaatgatcgtaccagcgctatcactattgataatactcttgttcttgcaatatacatgttttttttattatcatttgttttctagcagtttactgaaactaatgctccatttgaaatccaagtataatatgcgaatttcattagaaacagtctcccacgtagcctagctagggagtagggactagaaaatttcccaacttcatattcttacaaaagtatatttccatcccttaattccatcggtatctttgatgatagctgacaaaattcgctctatttgaggaaattagatcccgatctttcgataggtattgataactctcgtggaaacttcacacacacgatccagcttctgatcaacatgatccaaactctggttatcagccgtgccctactcagttgacctcgccgagaagactaatccttgtatgcaaatcgaaaaacacaagcaagaacaagatagattgcaacacaattggatatgaatgactaagcactcgaatttggggttccacaa

SEQ ID NO: 3792 - DNA, 1522 bp, Oryza sativa
gctaaatgtagtgcaaaatgggcatacttgctgcatcggtctcatatttaaggaagataaatggagaacgctggaaggtacaaaccttcagaacaccagcatggcctccacatagtacaccttcttccataacatctaggcaggcctggtgctgtggcaagtttgctgcaaccttcttcgcttgctgtcttgcactatttaatacagaacgagcttcagacagtgaaccaagcctatctgttctggcaagagatcttatccaaggtttacggtaattagctatctccagagcccaaaggcgtgacatctttatcaactcatcaggggagcacagggcatcaacaagaccaccttctttcccttcctttgctgtgatgaactttgattgctgtgaacaaaacatcatgaatcccatgttgaaaaatatgaaattgtgttcgacatgaattattacaaccataacccaaaagtatgatagtaaatcagatagaaggtagagagtacaaggcatcaaccatttaaaatggagaatgctttttcagtttttgattttgttcctcggaaatgttaaaactgtatgaggtgaatataactcattttgccaaagaaaaaatatttgcaaaaacatggccaattgtctagttggaacattttttagcttttgaccaaaaactgtattagatagaaagaatgctactacgatagtgcgaccaattaattaacttaggcaaatgatatattagactcaccagcatcatttctattgctttgggcagacctacaagccttggcagacgctgggttccttcataataagcaaacttaatcagatcatgatatgaactaatacaaagcaagggatgtagaatagtggagcactagttcaatctgacatagaaagaaacactaatacctccaaatccaggaattatgcccagagtcaactctggtagtccaagttgagcttcaggggtagatatccgagcatggcaaccctgaagaatttgtcatttatgtaataaacataatttagattaaacccttgagcaaggttagggatcaactgataaatattctgcataacaattcacataccatggtcaactccaaaccgccaccaagagcaaggccttgaatggcagcaactgaaggctttttgcccgctgcacatataaatagctctatagtcagatccaggcataataatcttggtaagaactaaacacatatacacaaaggatgccagcgctcatgttggtgatataagagggagtgagaaactatgacaaaaataggaagtagagatggccaaccttccatcaaattcgacacaagctcaacagatacatcaggcataagagatacatttcctgcaagccaatgtcatgtttgtaatgaaagtgagcaatatgctataagaagcaagctcggagcaaaacattaatcacatgtacatatgacaggaccatttaccagtcttgtgaacttctgtgaacacattgatatcaaagcctccacaaaa

SEQ ID NO: 3793 - DNA, 13298 bp, Oryza sativa
acagacatctcgtcgatgaggcaactgctactgtggccgttcctgcctccatcttccatgaatcacatctgacagacgttcacatggcgacatgaacccccaaggtcattgatttataggaagggcagcaacaaggagggaagggcgggtcgcaaacacatccccgcggccgtcgcatcactaccaccaccgacgcggagctagagaaggggtgaagcatattccgtatgcgctcgcccagcagcatgagcccttgtggtcatcgattaccgaggaggacggtgacagagagggggagggtgcgcgtcaagcattgcagctagtcactacgacactgtaggggtggataccgagctggctaggctcggctcgttatgctaaagagctaaaaccccggctcgtctcggcttgcctagaagctcgagctagctcgtttggctcgcgagccaatgcactcttgactagtcttcacttcaaaataacatcgaagtctcaaaaataacatctgatattataggagctgctagaaatgatttttgcaattgaataaaaataagcaactagcaaataaaattcttgacatgaattttttgtgcacatcagtttgaaatatgggaaattgaatccaataacacaaccagctacccgagatttaccagatctgaagcctggttaatttcctggatcaacgaaccaaaagatcaaccaaacaaaatcaccaaccaaatcgacaaggcagattggcagatcgacgatgatacagactagaggccaggagggaacgcagcagcggcgtgagcccacaaggggtagctgggacggttgatggtgccatgggatacatgcgccaggggaggagctcgagctgcttcctagtggcggtggcgctagggactgggggcgcgagatgccggtgttgggcagcggcgggcgagcggcgctggcgccctcggcaacgacactgggatgtgctgctcctgtgacctgcgggctgtggcgtagctagcggctgttctagagcaagggaagagaggctgggctgggcattggggttcgattttgctagatctttgtcaacagattttcacccccaatatttgtcgtttttctatccgtaggatttgcgccatgattcgtgcatttccctgtgtggatgagaccgtgtggcctgtgagcagatggcctgggagtcaatgtgggccaacccatgttaaattttggattccgcgctattatgtccgtaaccgttggttgtttcctcgctctctttctttattctcgctctttctctacatctctttctcctctttcttttctcttctcgttttctccgtcgagagagagagagagctcgccggcgagagagagcacgagcagctccccggcgggagagagagagcgcgcgcgctcgctgggggagacaactcgagagagagtgttttttgagtttcttccctgatttgctggcatcattagcttgtgttttggttttttcaatgtcaatagggctaggtttagaagattcgggtcaatacatgacgatttttttttgctcccaacgtatggatctgattcagaatcacttgttttagttttggaatccgtttaggttttggattccctaagtttttagttatagtttgattcagttcagtctagggtgttttgttactagtccattgtttgcaaacgaccagattcgatggtgttctatgtttttttttctaatccacgagggtttttgtatttttggttcgatttttcttcaggggtgttcatgttgggggttggattcaggggtatttgatggagttaaaggtttaattcgaggtggatttagggttttttctaatcacccagatagttgatcattttttggatccctgcatgaattttcttcagggagggggtcagattcatgagttgattatttttgctttgatttatgtgtgatttgaatatagtagggaagcatcattgcaactttatctgaatgttgcatttcactttcagtgattagttgactgatctgttaaactccttgcatgagtctgaatttttctgcatgtgaagcatttcgtttcagagatgatttatctgtcaactccctgcatatatctgaattcttatgcatctgaagaatttcgttttacatatgcatgctaactgaaccccaagtatgttttgtgttgccttctgcagcatatgaatcatttcgtttcagagatgtacggtttgatttcctagtatgctgagttgcttggttaaattaaacccaaacccctacatgcgttctgctttcttcagattgtattctactgtactatttggtttataaaattcctgtacatgttctgaactttttagtgctgatctaaatgagttagcagcaagccaatacctgaacttggtccctgttgctttgagaaattatgggctattggttgcatctgctctttcttctcttctgaacttttgttcattgtcaatcgctcgtaaatcgtaaatctgtttgaattggcgctatttctgaacttgggaacataattggcactatttctgaattgggaacaggggatagcacgctcgtaaatctatttgaattgtcagtattttttgaatcttggagcaggctattgcacagtttcagtcgacatgagctttttaaaatctcatacttcagcaaactgaaaaataatttggagggtttcagtctaatgttgatctaatgcatttcaatggtagcaaaaccaaggtcacttgggtgcctggaggtattcacatgcctgaaatatctgtatgattttttttcttctttattctgaatgacccatcgtcccatcccaatattgttcccatgttaattatgtgtggagcttgttagtcagttaactcatttgctgtgaaatttaatcgggaggctcaacaacaacaccctgtctggtccattcccttctggtccattcccttctgcatcagctaacttgtcacatcttgttgtcgagtgattttaatatatgtgcacagaagtttgagatatgtgcaaattatgtacaaaatttaatatatgggcaaatttgtacacaactggagatatgaccgtttggaccacaatgctctgttttttttatcctaggctctaatctaattgttgtgctttgttaaacaccacggtctgaagatgattttcacttgaggaaaatcttcagtccgttgtgacaaagtgactccttttctgaagaaattctttattttttgaagaaattcaagcatgcttgcagttttagcccagttacagtctatatgtattgtagttacatatgtaacttttgttatttctcactgtaactaactatagatatatagtccttgaaaatttatcaacgctacaatctctaatttgttgtatataattttatgctagattatattgtctgccaagatcattttatggtgcataatgctaggtgagcatgataactgacctttcaatgttttcttgcttcttatttctctggacaaaattttgtcactttcatatctctccgattgcatatcccctgatttttcagactgtaacccatcagaccctgcatgtttatattatttgtaacataatttagaacttgttataataggggaaaatatttaatgctgctgcatgagtactaaatttttttgaagaaattcaagcatgaaagctgttatagcctagttacagttcagatgtaatgtagttacatatgtaacttttcttatttctcactgtaactgactatagatagataggtctttagatttttcaaagccgccatctctaatatatgtgctagattaaattgtctgtcaaggtcaaatatggaccataatgctaggttatcatgattatgacctttagttgtcttcttgcttcttttttcatcagacgaaattaatgttatctctttcagatctctctgattatgtatccactgttacttgagatcgaattgtaacagaacctgcatagataggttatttgtaatataatttagataatgtatattagacaaaatttttttgaagaaattcaagcatgattgtagttacatcccagttacagtcaatatgtactgtagttacatatgtaacttctgttacttctcactgtaactggagatagatagtttttcaaaaaaaaaatcatgctttcatgtatacaaaattgtgctagattttatgactgacaagatcaaatttggtgcataatgctatctgtccattgttctgaccttcaagtgtcttcttgcttattaatttttctgagaaaattttgtcactttgacatctatttgactctgtattcactgttgcttgagcttctaatctatcaggcgttgcatgtttcaatcatttgtagtacaatttagaacaagtcataatagtaaaaaaatgttaatgctgttgcatgagtactgaattttttgaagaaattcaagcatgattgcagttaaagcccagttacagtcaatatgtactgtagttacatatgtaatttctgttatttctcactgtaactggatatagatatatagttctttaaaaatttatcatgctactatctctaatttgttgtatataaatttttgctagatgacattttctgacaagataaaaaatggtccataatgctaggtgagaatgattctcacctttaactgtcttcttgcttctcatttcttcagacacaattttgcttctcatttcatatccatctgattgtgtatctcctgatttttgagattgcaatatacctgaccctacatgattaggttatttgtaatataatttagaacattttgtcataggcaaaaaaaaagttagtgcatgagcactgaatttttttttaaaaaaatcaaaggatgattccagttataacccagttactgttcaaatgtactgtagttacatctgtaacttttgttatttctcactgtaactgaccgtagataaatagttctttatatatttgtaacataatttagagcttgttatactaggggaaagtgttttaatgttgctgcatgaatactgaatttttaaagaaatttaagaatgattccatttacaacccagttacagttagatgtacagtagttacatctgtaacttttgttatttctcactgtaactgactatagatagatagctctttatatatttgtaacataatttagagtttgttataattggggaaatgttttaatgtcgcagtataagtactgaattttttaagaaatttaagaatgattccatttacagcccagttacagtttagatgtactgtagttatatatgtaacttttgttatttgtaactgtaactgactatagattgatagtttttgttacgagtttttctgaaaaagttacatacttttaactacttgatctaaagaaatttcctattccaagcacttttctccaaaagaaattcactattccaagtgcttttctccaatatttttacagaactgagttgtttttgtttgatttaaaagatgactggcagaatatggtgaagtcaatggggaaaggtaaaggtggattttgtgctaggtaatttgttacctggaagattatgtcttgttgatttcaacttcttgacctcaatgttcttggtaagaatttgcttcttcttctttttctcgttctcctcactgtctatggcgtgctcgatttgttttgctcgatctaggggatttgtgcgaactggtgtggtctccctgtgttattttgtttttttctaacctttattggatgtgaagttgatcattatgggccatgatgtatttgcagttatggcctgtataattttttgtattgttctatgggctagaattcgagcccatgtagttttgtgatctgactagtcagagaaaaaaatatgtagcattttttgtgtcctctggatcttaatctaacggtagaaaaaaatctgggtgattttgacccaaggatttgtcgacaaagacatagctagttccatatgggcttgtgggttgggctatcattggctcgtgagcaactcgcgagccaattcgagctagctcgttatctttaacgagctaaattgtcagctcgtctcgttagaaaaacacaatgagccgagccaaccaagtgccgagcgagctaacgagccacgagtttttttttgtccacccttacaacacagagttagaggcggggcgaagctcatcctgatccgttgtcattgcctaggctttaggaaggatgtggatgctagcatcaagttcccatcactggctctgcctctcccgatgcaggtgtccattgcttggcactagacactgcctcatcgcactcggctcctccggtgcctctttgccctcgacaccagtttcacagatcgatcggtccctggggcactggcaaggggtggtggtggtggcactgctcggtgccgacggtgggggatgtggtcgtgacatggttgtgtgcggtggaggtggtgaggtgcggccacactcaagcggagaaaatgagataagaacgaaagaagcagatagaagattgacaaaggacctatgatatgagttaaccaggtcaaaatgcctcttaggatgaaacaagcttcaaaacaaaaactgtccactgtggtaaattgatttggttttaatagttgagggatatctttttgagaaaatttcttacatgccactcaaaattactcatttcctttaaaagccattgaaaattctacgtttccttttatgcccactgagttttagttttcatccctttgataccaccaccgtcaagtcagttgaccctagctcccgttaagtgagttaacatgttagatttttcttcctatatctgttttaccctcactcttctgtccatgctatcactaattaacgatctgaaatgcgcctagcactctcttcatccttggactcccagcgaatcaagatgattagttaaatgaatgcaagctaaaatcaagaataattaaatgtgtgccgatagttaattcatggtctagtatatatgtgcccttgatgcaaattaaatgtgtgccaatggttacatcaaatgactgcaagcttgcaatcaaggataattaaatgtgtgcctacagttaattacggaagcttgttcagcagagcctgtggaggtggttcaccgatattagcaacctctctggtatgcatggagaggagcagacgatgtcacacaatagtgggagtgtgggactacaggagctagctcagttagtgtctcggtgatggaatatgcacgatggtgaaaagaacagaaacgagagtgagaggaacctgagaaaaaacagagggaacaagggcactagtgtcttttcatggcctacttaacaccaacttaacagtagtctaacagtagtggcactaaagagataaaaattgaaacccaacggcatagaaggaaatgtaactttttcggtagcatatatggaagccgggtaatttcgagtggcatataatagattctctctatctttttacatggttttgtagttcaaaggatacgaatcaaacttggctaaaattggacttgaatccagccgaatcaggtctgtttccttagctaaacataatggcccatccaccatgcaaagtgggccgcccaggattcgaaggccgacgaccatggcatatccgaaaggaataagttcatttgaggtccgttgacttgtcaatgaatccgattttcgtccctcaaacggaaaatcagacataacgagtccctcaactctcaaaaccggcgcaaattaggtccctcggcggttttgagggtggttttggctgacgtggcgcctacatggccaatttgactcggtcttcgtttgacgtggcgcttacgtggcaattctatcggaaaaaataataaaacccgtgggacccacatgttagtttcacattaaaaaatggtgggacccacgtgaggcccacctgtcatactcccagccctcctcttcttcctcatttctccatctctctcccctctcctccctcctctcgcagtctcgccggccggcggagataacgacggcttggagaggcgcagcctcctccacttccgccccctcgggcctattgccggcagccgctgggaaagaagcagcacacgagcgtcagccggagggaggagaggagcggtgcgcaggcgcgggcgtgggcgccggccggagggaggagaggaccggcgcgtgcactcggccggcggaaggagaggagacgcgggcggaggccgaggggagcgggagaaatccgcgacgcgctccgcgtccacatgctctctcacggcgccccacgcccccaccgattcaccacctacctcgtcacgtgcgtcaaccaccgcctcctccactcgccaccaacgccttctcatcctcgagggcgatggcggggtcgagaggctcctcgacctcctcgacgcggctgacgccgccgtcgatgcgcgggcagcgcttgagcgcgaggatggcgcggtcgtcgaggccgtagagatggacacggagcgcggcggtggtgcggcggaggcggggcgtgaggaaggaggagaggcggaggtgcgcggcggagacggggcgcgaggaaggagaggcgacggtgcgcggcggcgtcggggaggcggagcttgatctcgacctccatcacggggggcagggaggagaggggaggctagggtttggggttgcaattgggattggtagggaggccgatgcggtgggacttggagggcgcggcgccgggcggtgggtggaggaggaggttggagttggagggcggcggggtcgtggtcggagtggatgaggcggtgggggtgctggccgccgccgcggtggcggtggcaacgcagaggtggtcttcgagctcgtcacgatcgaaggtggtcttcgcgcgccgccgctccagccgccgtctccccacttcgcccgctgccccagtgcacatcgtgaaaaagagagagaggataacgggaagaagatgagggatgggaggatgacatgtggggcccacgtgggtcccaccattttttttattattattttgtatgtgaaacagacatgtgggtcccacagggtttattattttttcggatcaaattgccacgtaagtgccatgtcatatgaagaccgagtcgaatttgccacgtaggcgccacgtcagccaaaaccgccatctaaaccgccgagggaccttatctgcaccggttttaatagttgagggacctgttgtatctggttttccggttgaaggatgaaaatcggattcgttgacaagttaagggacctcagacgaacttattcctatccgaaatttctctctttgttgtatgttactagtaggttggatgaatattggtaagagaggagacccatatttctcacctactactttcgctggccggttatacgaaacaacattggtgcgctgcctgcgctgcttctagggaaacacttgacgaaaatgattggtaaaagtatgggcaaccttctccctagtttgcaccaacagcaagacgaaaggaaaaacagagacttatatcaagatgatacacgcactgaattttctgcgccgaaaccagtccgcgatagtccaataccgaggacgctcctcgctttctgttgcaatgtttgccaaaaaaaaaaaaagagaagagagcaccaaacacaatttgtttatctactggagtgaacaacagaacaacgtcgctaaatttcttgttaggaagaatggccaagaaggcaagaagtatgaacaagagcaatgaattttatttccccttgttgaattcaaaaacttgagagacttaaacttgggccgacaagggaagcaacgccacacggctcgtgtgaagtgcacatatatatacacgatggcgccaaacacatttctcaactcaccaggcgcaccgcaccatttctaaatcacatagtgctaaacccgccccctcttaattatatctccacttagcaaggtgtgtggttgcgagcttaaaacgcacccacgcagggccatggcgaccgatggcggcgtgttgcagctgcacccctacgccatggccgcggctgccgtggcattggcttcggcgtacatggtgtggttctgggcgctgtcgcggcggctgtccgggccacggatgtggccgctcgtcggcagcctacccagcgtcgtgctgaaccgggcgcgggtgcacgactggatcgccgacaacctgcgcgccacgggtgacgccgcgacgtaccagacgtgcatcctgcctctgccattcctggcgcggcggcaggggctggtgacggtgacgtgcaacccgcggaaccttgagcacatcctgcgcgcgcgcttcgacaactaccccaagggccccatgtggcaggcatcgttccacgacctcctcggccagggcatcttcaactccgacggcgagacgtggctgatccagcgaaagacggcagccctcgagttcaccacccggacgttgcgccaggccatggcacgctgggccaaccgctccatcaagtaccgcctgtggcgtatcctcgacgaccactgcaacgcggccgcaagcgtggacctccaggacctcctcctgcgcctcaccttcgataacatctgcggcctcaccttcggcaaggacccagagacgctgtcccccggcttgccggagaaccccttcgccaacgcttttgacgaggccaccgaggcgacgatgcagaggttcctgttcccgagcttgttgtggcgcatcaagaaggcgttcggtgtcggcagcgagcggagcctccgcgacagcctcgccgtggtggaccgtcacatgacggagaccatcgcggcacgcaaggcgacgccgtcggacgacctgctgtcccggttcatgaagaagcgcgacagcaagggcaaagcgttcccggaggacgtgctccagtggatcgcgctcaacttcgtgctcgccgggcgcgacacgtcgtccgtcgcgctcagctggttcttctggactctcatgcagaggcgggacgtggagcgcaaggtggtcctcgagatcgcctccgttctcagggagacgcgcggggacgacacggcgaggtggacggaggagcctctaaacttcgacgagctggagcgactggtgtacctcaaggcggcattgacggagacgctgcggctgtacccgtctgtgccgcaggattccaagtacgtcgtggcggacgacgtgctgcccgacggcacagtggtgccggccggctcggcgatcacctactccatctactcagtgggaagaatggagagcatatgggggaaggactgcgcagagttccggccggagcggtggctatcggccgacggcagccgcttcgagcctgtcaaggacgcgtaccgcttcgtggcgttcaacggcgggccgcgaacgtgcctcggcaaggacctggcctacctgcagatgaaatccatcgcgtccgccgtgctgctgcgcaactcggtggagctcgtgccggggcacaaggtggagcagaagatgtcgctgacgcttttcatgaagaatggactgcgagtgcacgtcaagccgagggacattgccagctacgtcgagccgtcggagccggcgccgccgcagggctccctcgtgataccgactaccaccgcagccgctgcgtagcccagcgtacgcgcccacatgaattgcgtctgattcctgctgcctggtgaggttgtcctgcttgtgccaaaatgattgtctttttccttttcacaattctcctgcactagagatcgaatttccttgcgtacaattaggattgttcgtgcctggggtcatattggttgtatggataccgacgtgtgtgatagtgtgatcagggtgagggtggtgtacttttgttgggatctattatattattaaaacaactttgtggggactagaaattcccacattaatcagagaaaaagaaaaaaaagaaaaggagagtccaagtagaaaatacaatctaaaaatagctgaaattcggaattaaaaataagcaatattaaaaaaagtttccatataagaacccaatacgagattaatcaaaattcgaaataaaaataaaataaaatccaaaattaggaaaaaaagagagtccaagtagaaatacaatttaaaaatagatgaaattcggaattaaaaataagcaatattgaaagaagtttccatgtaagaacccaatacgagattaatcaaaattcaaaataaaaataaaataaaatccaaaattagaaaaggaagggagagtccaagtaggaatacaatttaaaaatagctgaaattcggaattaaaaacaagcaatattgaaagaattttccatataagaacccaatacaagattaatcaaaattggaaataaaaataaaataaaatctaaaattagaaaaggaaatgagagtccaagtaggaatacaatttaaaaatagctgaaattcgttattaaaaataaggaacattaaaagaagagttcatataagaacccaatacacgagattaattaaaatttggaataaaaataaattaagtaacaggcctataaatgagtagagtggtggcggttgatacgacatataaaaattgttaataaaacatcaaatagaatcctactgacgattaaaaaggagggacgtcaggcaggccgtgaagtgtcacgccccgaactagtcccgaccggaactagcccgtgacgctccaaattaacctgttaatcgataccagtcctaggaaacagtgttggtatcacagggagacagagtatcacagcaacagaggtctctttattatagagtagaagtacagtcatgttgggctgcgggcagatcccgagctcacaactgcattacaaaaggaaagcggaagccaggacttggaccaatcatcacaggtgcgacttgggaactaggccgaaaccctaaaactcatcgtagccggcttgctcctggaagaactcctcgtcagcaggatccacttcatcttcttcagcaactaggtggggattatttatatggagcaagggtgagtacgggagtactcagcaagccaggggaaataagtgtttaatgcaggcttcaaggaaaggctgttgttttcgtaattgattttgtttgaactcttttctaaaaagtctaagtgagtgcttctcaaacgacattggatgagacagtgcgtttcgtccggtcggagtatgtgcaatgtgtcagtctttaagattggaacaaggttggcacccggcc

SEQ ID NO: 3794 - DNA, 5989 bp, Oryza sativa
tcccctctcctcaatccatctccccctcctgtgcttcttcaccttctccacgcgccgccgtcgtcgtgccgccgcgtcgccgcttcgagccgccgcgccgccgccctcgtgctgtcgtgccgccgcattcgtgccgccgcgccgccgccgttgtttaatgtgaacgctggtattaaaatttgatcggtctatgctaggtcttaggcttgtgaaaagaattacaaaacttgctttacgcaaaagaaccatagccatcctttgaattcccctgtcatgtgcattattgctgtggtggcttgctgagtacggttggtactcacccttgcaatatacaaatttaatcagaggtcggagatgaagcttcggaggatccctacgcttactactaggagggtgatgaagacgatggcgcccagtaggtcttagttacggtcgttgcctgtggcaatggcgtgccgctgccttaactccgctgccttaccttcttctgtttttggaatgtattccggaccgctcggtccgatgatttaagactatgcctgcgggcttatgatgtaatgattcgtactagacactcgtgtatgtgcacttgatatttcagctaagaattcgtgtgtaccagactacttgatccagggaaatggtactgtttacacgattgattcctgttataaaaatgggggtccacagagctggtatcagagccatacgactgtaggaaagaccaaaaggcgccccaccccttttctaagctggccaagggagaaattcccatttagtaatactttcaaaaataaaaacactatgtttacaaaactcggaacgattttcatcttactcttagctattttcttcacaaaacaagttttactcttagctgactttgggtttttcttaaaattagatggcagatcaggattcacccgccacctgggagatgggcgtaccccgctcagagggatacgtcattgagctacaccggctgatgaggcgtctgcgataccccagatttccgatctaccgagtgagacaatgtggatctgtttgggaggctcgggtcgaggttcacacgctagttccttcggagttagactacagcttcccgacacgccaccgtcgcgacttgccggagaccgcgatgcaggatgcagcacgggaggccttcctccgacttagctctatccaccgagctgagttggcgagtactgagtttgctcaccacccgtttcgagaggagagcaactccgtctgcacagttcaggacacaccttgctgctacaacccgatagtgacccgactgtcacgatgggctgaggtagtagacgacttttacgaggaggctctgttagagatcgacgaccagcagaggcgtgtgggagagttagagaccgaggtgactgacctcacagcgcagcagcttcagttggaggaggagcaccaggcttggggcagtgagatagactcactgaaggcacagctccaggtccacggcgaccagttccagcagttatctgactagtacaacgatcgccgcgggatgatggatactcttgaggagcagctgagagagagttaggagcacgtcagccagctggaggagcagcttcgagcagccacgatcagcaccacaagagcttctacttccacagtagtagggcgtgactgctacttcttcctcaccccgccgtacccaccagcgttccacgctcttctgggagaggctagtacgctagctaccgagtcagcaccttacctagtggacccgacagtgacatagccacctgccccggagattgtccacactccactgatccccgcaccttctccgcagccgggttccagtttggagactccgatccaggtcgactccgagacagaggggaccgacaccgagccagagaccgagccagacatcactgacccttcagaggatgagactcttgttcctcgcatcaccttcctcggaggacctcgcaccctcagcactgcccgcaagagcacacgacctccgggcaagaagcccaagccagatccagaggccactacttccgagccgtggggactcaggtttgcccgtgccagcgaccaccctctacctgccccgggatcctgcgaatggctggatgactagactggaggacttttgcagcttcgatctcgcttcagatggtttttggatagtatgcgagacaccccccttacctagattgacgagtagcttgatggttagttcgatgtatcttttggatgaaccttatttgtactgcgtatgtgtgcagtcgattgcatcatgatttatgtaccatttgtggaactctgtgatgttatttatgatattattgctgttgtgttataaatgagtttattccaccatgcttgcaaaacaaagttcacaccaaaacaactcccttaatgggataaaaccataagaactagttagaaaattaggatacttacttaaccggcctacacagatggcaagccgacgttgggcgtcaaccagcaatgaagaaactcagacacctgacctaactaccctgtccggagttatggccactcaaacccaacttctgcaagccattgcaaataaccaaggcaaccgtggcagatcgagctttggagaatttatgaggaccaagccacccacattcgccacagcggaggaacctatggatgcttaagattggttaagggtcattgagaagaagctaactcttgttcgagtacgggaggccgataaagtgatctttgaggcaaaccaattggaaggaccagccggagactggtgggacacatacaaagaagcccgagaagaagatgctggagaaccaaactgggaggaatttaccacagccttccgtgacaacttcgtgcctgccgcggtgatgcggatgaagaagaatgagttcaggagactacggcaagggaataccacagtacaagagtacctgaaccgtttcactcagctggcgcgctacgcgactggagatcttgccgacgaggaggaaaagatcgacaaattcattgaaggcttgaatgacgagttgcgcgggcccatgattggacaagaccacgatagtttccagagtttaatcaataaggtcgttaggctggaaaacgaccggaaggtcgtggagcacaatcgcaaaaggaggcttgccatgaaccgcccgcctcagcccgtaccctagcgtcataaagggacaacctcctcagtatggagaccaacagtggtgacaaccaatcgtcctaccgcatccagcaatttccacaggctgattaccatccagaaccgagctcctgcaccgaatcaagccgccactggatcagtaagactaggaagttgtttcaactgtggagagtatgggcattttgctaataaatgtcctcatccaaacaagacacccatttgcaccggagctaatgcaacggctattcacgggactgctacccctgctgctggacgaggtctattcgggactccgcagactaacaggaccactaccggatttggacgcgggcaagtgaaccatgttcgagctgaagaggcccaggaagaccaaggcgtactgatgggtatgttttctatcaactccactccagttaaagttctcttcgattcaggagcatcgcattcatttatatctttgaaagtaagtcaacaacacaatttgaccagagttaaattaagacaaccaatgttagtacattcacctgggggtgagatagcagtggatacagcttgcattgatgtacccatccgccttagggatgtggtatttccctccaatcttatggtgctgatgccccaaactcttgatgtcatattgggtatggattggttaacaaagcataggggagtaatcgactgtagacgtagagaagttaccctgaccacaccctggggatcggatatgagagcaaccatggatcaagatcctagactaaccgaacgtgccggaggcatatttaccatgctaccccaaaaaggaattcccgtagtgcagcgatttcctgatgtgttcccagaagatttacctggaatgccaccagatcgtgacatagagttccttattgacctgatacccggaactgcccccatatccaagagaccatatcggatgccggtcaatgagttggaggaacttaaaaagcaaattagagagttgcaagaaaagggatttgtacgccccagttcgtcaccttggggagccccagtgctattcgtcaagaagaaagatggtagcatgaggatgtgtgtagactaccgttcactgaacgaagtaactatcaaaaacaagtatccactaccacggattgatgatctttttgatcaactcaaaggagccaaggtgttctctaagattgaccttcgatcaggataccatcaattgaagattaggaccggggatatacctaagaccgcgttctcaacgcgttatggattgtatgaattacacagtgttgtcgtttggattaaccaacgccccgggcatattttatgaatcttatgaataaagtgttcatggattacctggacaaatttgtggtagtattcatcgatgatattttaatctactccagagatgaggaagaacatgcggaacacttgcgattggtactcgagaaacttcggaagcataaattatatgcaaagtttagtaaatgtgagttctggttaaaagaagtcgctttttaaggccacgtaatctcagccggtggagtagcagtggatcctgctaaagtggaggccgttacggaatggaaagcacccaaatctgtgactgaaattcggagttttctaggcttggccggatactaccgaaggtttactgaaggattatctaagatagcccgaccaatgagacaactactcaagaaggaaaagaagtttgtatggtcagaacagtgtcaggaaagctttgagcagctcaaagaaaagctgacctcggcacctattctagttcttcccgacatcaggaaagactttgttatatattgtgatgcgtcaaggcaaggactaggaggagtactgatgcaggacggaaaggttgttgcctatgcgtcgcgaaaactgcgaccacacgaggaaaattaccctacccatgacctagaactcgcagctgtggttcatgcgctaaagatttggagacattatctaattggaaaccattgcgatatctacactgaccacaagagtctgaagtatattttcacccagtcagatctcaacttgaggcaaaggcgatggttggaattaatcaaggattatgacttggaggttcactatcacctcggcaaggcaaacgtggtggccgacgctttgagtcggaagagccattgcaatcatctgaggacggaaggaatggctcctgagcttaaggaggaaatagcccaactaaacctacatatagtacctcatggacagataaacaccttggacattcaacctcttttgagaacccaaatagaagaggcctagaaggacaacgaggaaatccgagaggtgaaggaacgtctagctgcaggatttgcaaaggaattttcaaccgacgagaaggatgtcctatggtataaaaagaggatttatgtacccgaacagggtggactgaggggattaattttaaaggaagctcacgaatcagcatattcattgcaccccggaagtacgaagatgtaccaagatctgaaggacggttactggtggcccaacatgaagagagatgtggcagaatacgtagcactctgtgacgtgtgccagaaggtgaaggctgagtaccagagaccggcaggtttgctgcaaccccttaggattcccgagtggaaatgggatgagataggtatggattttattgttggattgcccatgtaacgccccgattttcgttcgggtttaaaaatcaattaataatacattttctagaaattaaataaaagttaaatcaatttatccaagtgaaatgttgggagaattaaaattttcccttaa

SEQ ID NO: 3795 - DNA, 3175 bp, Oryza sativa
atacattccaaggtcaaaagatctgctacatatgctaaatagatagtgcatgtgttctttcttttgcaggcttgtcagtctgtactgtagaaataaattaaccgcagaacatttttcttgatgtgtgatggaaaatagtcaatatcctgttatgatagtactccgtttggaatacatgggaatatcacaatgaatactagtaggtctatacatgtgtttttttaagggaaaattgtaaccatgccattataattttgcattgaaaaattataatggcatggttccaaattaccctttttttaaaggtacacgtggttctcgtatatgcacttgaatgaattatagctatggtattggtacctaacacaactgcaagcagtttttctattaattccttttggaaattaatgtagatttgtcttcccctacaaggctacaaggggataatatgttcactttccacagaaaaagtagttctgtagacctgcatgtttgccttcatgaactatagttgtaccaaataatcagatattctaatataaatttcttgctcaatcgactacattaatgccattccgttgctattttgcagttgagaaatttagtatgggcaactactagacatgatgtgtatcttctatcacaacgttctgtgcttcattggtcaccattcgccagtgagaagcacaaagtcattgatcttcaaggacatatcacgccatctgaggtccctatttctctttcaaatgtttatttgaacttgctagcctcatgaatagccacttctttgatatttgtattgtaactttgtaagcatacatattcaaattccatatatttgacttcagaagcaccaggggaatgtctccgaggggttttaccaggctcaagttagtacactagcagtgagaggtaatttgcttgttgccggtggatttcgtggagaactaatttgcaaggtaattttctttcataacctcttgttcaatctctgacatctatatggagttacaatgtagccatggtgtaatgtgtaaattttgtgtggggatgtagtttttggatcgtgaaggaataagctattgttgcaagtcaacacacgatgacaatggcatcactaattctctggagatatttgagaaacccaggtactataacatcattttaaaaactactactttgtttaaaatgaagtgagaatgtatgaatcataacttcaaaaaatgaattatgcagtggttcggtgcacttcctggcttcaaacaatgattgtggagttcgagactttgacatggaaaaatttcaaatttgcaataatttccgttttccttgggctgttaatgtaagcctttacttcattcatcaaactgtttatatctatatcttgttttatttattggatactcccaagtcctaatctattcgccacattcaagtcactactgaatgctttgctaaagattcttgcattccatgaggaaagaaagcctaatgttttattgatttaatcttgccccttgttttataccatgcagcacacatcattgagcccggatggtaaacttgttgctattgttggggacaaccctgaaggacttatagtcgatactaattcaggaaaagtaagcagaaagcaacgctcagcgattaacttccaaatactgacctcacatttcagaaaaagaaaagctcatggctgtttgtttctcgcagacagttcatgaactccgcggtcatctggactactctttcgcgtcagcgtggaacccagatggccggacattcgcgactggtaaccaagacaagacatgcaggatctgggatatccgaaacctttccaagtccgttgctgttctgggtggcaatatgggagccatacggtcgattcgctacacatccgatgggcgattcttggcaatggcggaaccagcagatttcgttcatatattcgacgtcggaagcgggtaccgaaggaagcaggtggtggatttctttggtgagatttctggcatttcgttcagtcccgacaccgaggctctgttcatcggtgttcatgatcggacctatagcagcctcctccagtacaaccggctacggttctactcataccttgattctgctatctgaatttgctacttgcaatcactggcagagtaatgtgagttctgaatcacaaaaaattgtagaagctagtaaagtagtagagaagatgtagatatgtccatatctgtagctgttactgtaaaggaacctgaaatgcatctgcaaatggcctgttgcttttgctggacaaaactgtatccatcagacttcagggtgagcaatcatcctacggaagagaagatgttatctggtacggcgctgtctacttcagcaaaggctgaaaaatatcttgacctagtttctgctgccgccggtggccggccggaccgccgtgttggacgacgttggcggcggcggcgaccgtgttgggtcgaaatgggcccccacagagcatatgggctggaccgcctcgttgggtttactacaattgagaaagaattggaaaaagtatacacaaggtccctcaacttgtcatcgcgataaaaaacatcctcgaaccgcaaaaccagatatgcgggtcttcgaggacttttggtagttttgaccccggttttggtctatgtgacggctgaattagcgtgagccccacatgtcagcgtggccacgtcagcctcctctctcttcttcctctcccttctctctctcacttctctcctctcgggcaagccggggcgggtcgggaggaggtcgctggggcggccggcgacgcggcggcgtgagcacgagggcggtcggtgaggagaggcgcgtggtggccgtcgggcgcgtcccatctcgacggctagcctatggtggcagcgtgtgggggatgtggcacccgggtacctcatggtagaagccaaagctatgcttcgggggtgggccaagggcccataacagatatagtaagtgtcgcatagttggcaagagaggaaagcatactattgtatcccaaatcatgtaacaaaaggcgagtatccagattattgggatacggggccttcattggcaccggtgggcctatgctggtataaaggacgccggtgccatctcttaattcttcttgggttttttatcttttgaccagagacgg

SEQ ID NO: 3796 - DNA, 10104 bp, Oryza sativa
gggctcacctcgacggcagacacaaggggatccacagccatggatgacggcagcggctccccatcgtcctcgctctccccccccccccccccaacgctctcgccgctgacgccctccccttctcccgcgtcgccggccgacatacctcctctcttgccgcaggccgcccgtcctccgcctcacatgtgctggagaagctgcgcccatgcccacgcccatgccgaggatgcccgctgcatcgcatcatgtcccggtcccctatcctccacgaatcccccgccattgccatgaagtgcgccgcatcggcaatgaatctgaccagcgaatccccagcagcggcggcgaccagttgaagaggtgcccctttggtcgccctacactgtcgtctctgtccctgcgagccgcctaccttctctagtgtcgctgccatcaccaccgtcgcgtcggtgagacgctggcgtggacgacggggagcacgatggcggcagcggccctatccttgcccggagccgccgccgccgatgaggctgagcggtgcggagttgtcggtgcctccactcctcatccgcagctgcgctcgcctgccgttgccgctgcctctccaccaccgcggtcacgctgccgccgccctccccttctcttgtgctgcatcgccggccgtcagagagaagagtgtgtgagagagagaaacacgaggtaaggagaggagggaaaagaaatacatgtgggacccacgctgacttagccgccacgtagactaaaatcggggtcaaaaccaccgaaggacctcgggtgaccggttttgtatagttaaagggcaccgcatatctggttttgcggttcgagcacgttttttatcccgatgacaagttgagggactttcggtgtactttttccgaaggaatttgcatcctgggttgttctgggcccatctgtacggccttcgttgggagctttccttactcctaccacgacgagtaaactgagcctcatttacgggaaggcccataatgagccgggcttcactgcgaggtcacccgcgatctgcgtggtcgaaggactgcaggagtcgttcgatcgagcatccacggcccagattaagatggatgaggaatttcttgcgtagttaaatatctgatgaaatgcatctcatttattatattcaggaaattattaaaatatataccaaaagaatttccaaaatgataactggataacccaggactgctgagccagagatttcttttccgaaaacatagttacaaagaaaatttacaagcttcatgtcctaaaatactactccgtacaagggaaaatttatgaaagcaagttctatttcctgatgcatatgtatcgtgtatcggtgattccatggctctaagctcaagtaggtacatactcagtaggagagggcaagagccgtgcaagaaaggttcctacagcagtaaacagcagaacaaactggatgaaacaaaagagtgaaactctgcttgctctagactgcaaccgcaggacttctgaactcccagacagaactctgcattcagctcttagcttctccgccatctcttctaacatcgccgctcggttcttggtatgctgtagtttaagttcaagctgcttgtaatcccccgacagagatttctgcgcgttatagagagctatttgatcgtcaactagaggtgcccaggtttgagcagctcttgtcaggatgatgctcttaatctcggcttctgtcttctccaggaagagccgaccaaggtaagatgcttcttctggtctggactcaggatcctttacattttgacttgttccttcaagaggttccgcgagatcgactaaaccactccaatcatcgtcgtttccatcaaaattatcatttgactctttactgatcactgcaaacattttaatctctgcagtaagcatggagcaaaggttatcataaagcaattttgcatggatgaaagttcgaaccaaggcatcaaaaggtacagcatgttatcaccacaataccggtatgagacctcagattcaatgaaccaaggaaacttacaggagaagttttgattggttgatcaagccacttctatatactgtagaacacaaagcgctttacccatttatttggtactatgcctaaatggcccagttattagaatactcaacaaggtaatattattacaaccgtcaaattgagatgtcaacaacttcagcaattaagttcataatgttttataggttccctgagttgaatcacggaatgaactagaattatcacttaagaaattgattaatcagattatagttgcttgacttaactaccactccaccaacatcatttatccgaatactttttatcatgactgaacaccataaggcagctataacttatttgtttccacagaactggagtaaacaacatcatgaaatagtaacaaataactgaaccatgacatggcattgcttcaacatcagtaaaataataacaacaactgaaacagaatttaacttggcaagatccatgaggctaaacgggaacgaaatcaagtataccattctcaagcgcttcttgcgttctctgaagcaatgaaatcgattccgcatacggatcagcactcgacttcatccctgatccaaggtcaccattgttccccacactcctctgagcagcatcagcatccgaatcaacactcccctgtgccaatctcctcaccaccacgctcccattctccacattgcagtaatctctggccatcaatggcgtctcctcgccgtgatcacagtgatcggcaagaaccttgtggattccattgccggcaatcgattgccgccgggagttcacggcattagagcagcgcagcgagtactgcgcctcggcggcacgcgcgcgcgcggcgcgggaggagcgccctgccctgtcggcggcgaagggcgagaggtcgttgtggcggcgcggggcgctcgctgcggtggaggacctgctgccgctgctccggtcctcgctgtggtcggagtcggcgccgcccgcgccgacggagaatcccgaggaggcgacgagcagcacgccgaggctcggatccagcttcgccggcgggacgaagcgggactcgacggaggcggtggagctctcctcctcctcctcctccaagaccacctcgtgcagcttccccctcggcgcgccgccgggcaggggtatccgccgcttgtgcagctgcgccgagccgctgccggcggcggcggaggcggctgatccttccttgcgctgctcccgcgggatacggcgccatcgacggagcccacggcctttggtctttatcacgggagagctccccggagatgcaccggcctccacctccgccgccggcgacccgacggcgccgttctccatatcggccgccggaggtggcatcaaagaatcgacgaaatcatcgttgaacgggggttgtcggaatcgagcaaggtcgtagtaacgaaaattttcagttcgtttggtctcgtggaaaggagatcgagggaggatgacgaactggacggcgacgacgacgaaagggagaaaagatacgaaaaagaagtgatttttttcccaccttaacagcagcccttttccagttctttctcttcttttttttttccaacaaaaatggcgcgttcgcgtacggtgtctgcgtcagttacagccacgtctcggcgaaacgcattttaaacaagcgagatggcgacgacgtggctagctctgcttagctcagcagcttgattgaactgctatgttttttttttaagaattacacggtataacgcaaacactcaccacgcacatacactcaccccatcaacgcacgcacgtaaatcctacccctatgagcatcttcgaagactgggccggaaaatccttgagattgatgcagttatgacgggtatgccgcctacaactgaaagctagttcctgtcaaaattaaaaatttgattgaaataggaacaatgtgatgaaaaagttaaaagtttatgtatgtagaaagttttgatgtgatggaaaagttggaagtttgaagaaaaagttgagaactaaaccaggcctaaatagtgaggtggagaaaaaaaaagacgaaagagataagggcacggtcaatgcaaggggtacctgaagtgccatctaggatggggcaacacccccagaaagctaatttcccatagtgcaaattgctttaggtggtagtctcacatttttatttcagcccctggtgtttttttaagtcctcataatttttcaatatatatataagttcaaaatttacactaaacatcccaaaatctagaaattgatataaaatctctcctccctcactcttctcccccaccgacaccccaaaatcccctttccccatgccgtcctacttcaccatccgagctcctcttctttctcatttatttcaccatccattcccatcctcgtctagtctcctccacccgatcctctcttcgtctgtcgatttgatgtgaggaatgctacggcggttgcgttgaaagcaaggggtaccgtcggcagttcccgccgtcgccgcttccctcatctccctctctatcccagcctccgtcgccactttctcctactctctcacctctttatcccggcacgcagggtggccgacggtgcgcttgtcacaggggccacggacggtgagaggggcgcaggggctgacgatgagcaacgcacaggggggcggtggccagatctagtcagtcgtgtcgtcgccgtcatgggcggatctagccacggcgcccacggaggaggtcggcgactctttcaatctctctctctctttctctccgtcatgggcggcgccggatttgctcatcgcctctctttccccctctcttccccgctgccgctcgttgccatcgtggccttcggctcctctaccacctcaccgcctacagctctgcccaagggtggaaaggggaatacagatgtggggagcggtgtccacaagctacggcgtctcctcgcttggttcctctgccaaaagtcaccaggagcgcgtctcctgggagaaaacgtgcgcctctccaggggcacggcacaaacgcgaaagataacggtgtaatactaaacgttattattgcacgataaccttccaatagcacgagccaaggtaaccgttatctttcatgccccctggtagaaaacacgcgcctctccaggagcacgagccaaggatacccattgctcatgctctaataacctaccaatagctggtgcaaacgtgcaaagttggtggaagctaccagaacaacctacccagggcactcttcaagtataaaatgtaacggatatataatgtaaattcaaaacttttgttaatttttttaatacaattgtttttatatggatgagtatacgtatttgcatttgtactatatttttttacgcgtatttgcatttgtactatgtttctttaaagaaaaggttactaattctgactaggaactggtgattttctggtatgtctaggcctgtttggagagtttaagattttgagaatcagctgtttggtagccaacttctaagtctggaaaagttagttttccagtttctggcttctagtttatttttttgattttacaaccacatcttctcagaatttaaactaaaagctggatggtttgggagagtttttgattctgggagaagctacagaaactcctccaaacgtacatagggtcttgtttgggagcttaagattctgagtagtagctggctgctagtttatttttttattctacaactacaacttcttatagctgaatcaactagaaactcctctaaccaaagccatatatagtctgtagtctggttctacgggcccggcttctgctgtaggcggacaggtcagggcagatcggccgaatagcgtagacggcgcctctctcggccctcgcggcggccaccacaaattgccccgaacgtccgacgtaaccgggccacgttccgcgggccagcgcttgcggtaaattgcttctcccgtccctcccacgcgacgcctcccgctcccgtgccggcaaccgatgggtggtcgtgccacactgccgcctgcaactgcaaggtgggggacactgcgcacaaccgcacccgtcgtgggctcgtgatggtcagcctggttgggggtgggcgggtgcggttggagttggagaacctgctgcgatgcgagatgccaccatcccggccagcacgctacccaacgccatagggccgccaccgcacgtctcctgtctccaccctctcctatcccatcatgctggcacatgccgctgtcgacgccgacgccccttccccatccagcctgccttgcttgccatgtcctactactaccactagtagcagtaaaagcctgcacagtgcagctctgcagatcgaggacagtctgttcattttgggcccagtagtcatcttgcagatgagatcaaaatccgcaaccaacatgacacggtgagtagagtagcaaccatggaaagagatgttgcacttatcaacatgtagtacagtaacaaccatcatcaaatgtccctacaactccgtctctctcatgctcgaagaatataataatctcattgattgaaacacgtataggaaaatttaagcggcaattaaggaagtaatagtatagttgtagcagtagaagagtacagcaacacacgttaattaatcacgcgagagcgatggatggatcggccggtaaggtctcggtctcgacctcacacgaggcggcggcagatggtgatgccgtcggcgatggcgagctggcagacgtcgatgcgcgggtcggcggcgagcctggagttgaggtccctgatggcgacggagaacctccggtccaggtccgacagcggcgtgtccggcggcagcgccaccgtgccggcccacagcgtgttgtcgtacacgatgtgcccgccgacgcgcaccagctgcagcagctgctcgtggtacttgacgtagttgggcttgtccgcgtccacgaacgcgaagtcgaacgccgcctcgcgccccgccgccgcctcctcggcgagcagctcgtccagcttctccagccccttcccctcgcggaagtccaccttgtgcgccaccccggccttctccaagaacggccgcccgatctcgtagctctccctgtccgggtcgatcgccaccaccttcccgtcctccggcagcgccagcgccgtcgccagcagcgagtagccggtgaagacacccacctcgattgtcctcttcgctccggccatcttcagcagcatccccagcagctgcgcctcatccgccgacgactgcatgaaccccctgcatgaattaatgggctaattagttaatcaaccccaagatctagcttaattaagcagattaattagcagagatcgtggtttcttaccactggtgcttgtccgtgatgaggcgcagatcgcgcatgcactccggctcccgtggcagcaccgtcgtgtccaggacatactgcaagttcaccggcgacgaacacagcaaccatcagcaaattaattaaaacagagagatcatcctaaacacaatccggcgagctgatcaagaatcatcagcagcacgtaccttgtacagggcgtcgctcttgagcagcgtcttgttggtgctgtcgatgtcgctgtgggcgttcttgatcaccggtgcgtcgccattgccggtcgtcatggcgatgagatcttcctccgtttgagctgttgctgcttgagctgctggtggtggtgcgagtcgattggttgggtcgtcaaccgagagctccggcgagcaatatttatcggctcacgagagcagggttggtggcgccaccaaacacccggtcttttttcctcccttccttttcaaaaaataaattagcaatcgatcgatcgcacggtgacctggttgttgagccaccaaacgtagtggccatgatcagtgcccaaaaaaagggtattttataagcgttaatttggtcttcccgttgagacggtccagtaaactgaacattattacagtactcagtactacatgtactacttcatgcatgatgcatgtgaaatttttgttttttttcccctctctttcttcttcttcctaccaccaccacctgccgcgacctaacctgctttcgtcgtggtttggttaaagaaagggatcgcacgcttttgtccaccctgtttatcccaatattattccgcctgcttaaaattattttgcccagggaagaagaagaagcttcagcgaaaacggcttctacaaagctgcgacaggtagtactagtagtacagtagcaaccaccagctcaccacgatttacctgtgatggaaatgattaatgagtggtgctgcgacttataattaagaaatgcagtagcactccattagtttaaatttgagatcgtgttctgaatgtatttttgggagaaaaataaccaggagaaagctcggagctgtcacgaagatggatggatctagtaggcgcttccattgatttgggcacagtgaattttctggtggcgactgtggatgggcagccaaaaaaggagtcaaaacagggttgctactgtccgaagactcctaaccctacatctaggatgttgtctatgtcattaactatattattatttactagaacttttaacttatgtgacattatattaattaagagagagtggagagaagaagaaactgggtctcatgtaagaaacagcttcaacacgagaacctatgcactagacattatcaagttttacattgggagaaaatagtgccgtcataatagataaagaataaatatgattgatagaaaagatagatgatgtatttattaatgacccactttaagaaactatgggttgtggagtgtagtttctattatgatgtcttattgacatggcaccatagacactacttatgaatactatggcttgggactgcccctgagaggatgcaacaattgcaggtcgctaccgcgaccagaggagggagcacgcaacaaacgtttttgtgacacactagcaggggcccaacggctgacttccttccgtccacacgccaatcaccaaacgcacgctggtagagtagtcgtatgcggttggaacagtagatgtacaacatcattggaccgagtacagtacagcgacgacaatagcatatcccattaaccctccattaattacggaacccaaaatcgtagtcgaatcgatcgattttgcacctcgaacatcatgatggtcgtgttgtgagcttatagtactcatttccgtcccaaaatataattatttttaacatagtaataagtcaaatatttttaattttgattattaatagcaaaaaagaatcaatcatacaaaattgatgttattaggtttattattaaacaaactatcataatatgtaactctttttatttaaaatattttatttttatatagatatttgttgatcaaagtagtatgtcggcgaccgtgtaattttggaacggagggaatacttcattctcccttcaccaaactcaatatatacacctagtaggcccactgacagggacacacaccaaccctccagttatcgttgaaacgaccagaaaaagctatggatgggtgcaccgtgcacctggacgattggttggcgcgaattcgtccgtcgcgcgtgcgatgcgagagaagaaggctccgatcggggcattgctggtggcgcgccgcatcgatcgatggggccaaaattacgaggacgattggcgggcgggtcgccgtcgctcgggtcaccggagtccacaactctcgcagagtggcaagggtggggtgggggtgggggtggtggtgccctggtgggccgagtggcccacgacgacgttatcgccggtgggtgtaagtcgggagggcactgattggctcgtccggagtctggtcattaccgaatgttactagatttgacacagtacttttgtttgtctcatagtagtattgatttcgagcctctcacactgtggtacttcctccatacataatactttatccgttttataaaaaaccagctataaatctaaacataggctatatcctgattaatagctagaagtta

SEQ ID NO: 3797 - DNA, 15901 bp, Oryza sativa
ttgaaaatcaatttattttgaagaatccctggcaactcttatgggaacatgagagaacacttgatagtggctcgcacgaaggaataacaaatgagatcgcgctattcatgacccagggaaagcttcttgcggttaattagcaacatctatgactagctagtggctattcctttgacgaagctggtggtgggatcaagtagcagcatctatgattgacttacatagatctagtggctcttgcggtttcgccggtcttcgcatccgggcatctgccgatcttcgggggtaggtggttggtgaatgaaaaaacgaattgtgttatttttttttaaaaaaaaagagttgcgtggaaatgtaaaatacttgtaggtagatatccccttcaccctaaaataaagctatttcgatcactcagttttttcttttcaaatgaagctattttctcatatatctatcatttcaacgaatcacaatcatcttttattttatttcttcatccaatttcttttaccaatcataatgtttcctgatcattttttacatttttcaagtagatgtggggtcctgagcgaagttgaccccactgctacttgtggaattgccagtaaggcgtcaatttggcgcgacaattgcagctttctccaagaggacatgccaaacttgacaacaacatttccgtaagatgctagagtgcagttgtcacttgcatatacagcagggagaaatgatgacgaggtttttggcttactgtattagcattaggacgtttagttcacgctaaaattgaaagtttgatcgaaattggaacgatatgacggaaaagttgaaggtttatgtgtaggaaagttttgatgtgatgaaaaagttaaaagtttgaaaaaatagttggaaactaaaccaggccttagtaacaccgtcccaaaataaggttgcgttcgggagggcacgcaaaacggagcagcgtttagcgcgtgattaattaagtattagattttttttcttaaaaatagattaatatgattttttaagcaatttttgtataaaatgtttttttaaaaaacgcaccatttagtagtttgaaaagcgtgctcgtgaaaaatgagaagaatgagaaggagggaataggaacagccactgctgacgttttggacattctaaatactagtgagtaattaattagaatccatattttccattttttccatattagatatcaattttatggagacgaagcaacacatctctacatgaacgtaggggtactctggaaagctaaaacatcgatattttccatccacaagctattaacctcatcgttaattaaaagtgatctaaaaaaattatttattatttattttggaacgaaggaagtacgtaccatctgatcttatagttaaaaagatacatctgatcttatagttaaaagatacagagagggtttggttatcataggtttgggaccacgggtaacaaaaacagaaggtcaactctggtttccgtggtgaataatttcccgaaccttgagaatgccggaggttagcttcgttcagacttggcttcagccttcatacgaacaattttcaagtcagatgcatcattccatattgtatattttacggagcatattttacttgttttagcttctttccaatttttctttgttttttttccaattacacgacaaacccactcacaagctaaatcaagtaaaatatgctctgtagttttcacaagctaagggtgtgtttggttggactgtagcttttgaaaaagcggctgtgggctgtgacttttagaaaattagctgtgagaaagacaaaagctcgtttggttacacacaggtggcttttgaaaaagcttctctcctgacgagtggaccccacatgtcatacacaggtatcttctccatctacacagacacaggaaaggcagggcagacgagcgaggtggcggcagacatgggcggcggcgggctagctcctgctccggcgtcggcgaggagggccgtcgccccgtggcatctgcctcctccggctccgggtctggctcgtcccgcgcgtcaccgaagaagttggcgtcgatgcggtcgtcggtggcgccgtcctcgtcgttgtcgccgtctccccacgagcagttgcggcgggagccgccgcggcggcggatgcgctgcggcgtgcggcggtagacgcaggcggcagggcgaggaggagcggcggcgacgacgaagtgaggaggaggaggaggagcgacaccgggggtagaaaaaagaaacgcgaaccgtttttttgtgtaatggcagagatgggtaattttttccccaaaaagcaggtgaaagcagagggtagaggtgcttttgatttatactacactaaaagctggctttggacaaaagcaattgtagcttttgggtcctttggttggctttaagcttttgcaaaagcaaaagcaggttgaaaagtctaaccaaacacaccctaaatcttgctattagtgagatatctcagtctacaaatgtaggcctaaaattgttcatatttttttgacgagctcgcacatatgttctttttcttagtttgacctcagagtatgctttacaaatatttgcaggaattcacaaaacacgtggaattcaactattttccaatcttataattagcttgtcgctgtcgtatgaccgacgcatagtccgtcatgttacttcccttcataaaaaaaaatcaatctagataaagatgtatccatcacctaaaacaacaaatgatataagattgtccagatttattatttttggtggtatcacatttttacatagtttgtttttttggatggagagagtagatgaaattgtacgtaccgtcgtaccgtcatgcacaaagtacttgaacagttgctaatgccgcggttgccaatgcagataacccaagataaaacatcactctagaatttaatttttgttctcagacacaaacctgcatgaaaaacatacaaaggctacgatataattgcagtgcagctgcttatttatactacagttcaggcccatttggggggtccattcaaagcccaaatccagccccacttcagtctccccgagatcagtgcttcgcacacggcttgcgccgatctcaaacgaggcggcggcagagggtgatgccgtcggagaccgggagctgcacggcctccacgcgcgggtcgccggcgatcttggcgttgaaggccacgatggagcggcggatgtcctggtcgaactcctccagcacggagtcgtcctccagcgccacggacccgccccagagcgtgttgtcgtaggccagcacgccgccggcgcgcaccagccgcagcagccgctcgtggtactcgccgtagttccccttgtcggcgtccacgaacgcgaagtcgaacttcccctcgttctcctcctgcaatgcacaaaagacatgagacatatgatcgagcagctggcatgcaatcaccaagacgtacgttgctttgctattgcttacgttggcgaggaggttgtcgaggatgggcatggcggcgccctcgcggaagtcgaccttgtgggcgacgccggccttcttgatgacggggaggccgaggtcgaagtactcccggctgacgtcgatggcgacgaccttgccgtcgtccgggatggcgagcgcggtggcgagcacggagcagccggtgaacacgcccacctcgatggtgttcttggcgcctgtcaggttcagcagcagcgacagcagctgcccttcctccggcggcgacgacatgaacccactgatcgaatccaacaaaaatgttacacaacacagcatcatatcatcagcttctaattaatcacgctgaatttagcatgtactacctccataaaaaaaacctaatcttagatttgaatctgaacatatatgtgtctaggttcaaaacctaggagtgtgtccagatttaaacttagaattagttttttttttttggaatggagagagagtataaattaggagacaaatagtactaggtgtgctcgctggtgatgaggcggagctcgcgcatgaactcgttctcccgcgggtacaccatcgtgttcagcatgtactgcacccaaaaaagggtttttggtcatatcatctcaatcaacgattgctcgtccatgcactgcaatatggggatgaaaatcacgaaaattaatcaactagaaactgatgtgtacctcgtggagggattcactcttgaggagggtcttggggctatcgttgctgtggatggccgtcttcatctccttggactgaatctgaatgccgccgttggcgccatggctggcatcgccgttcgccgccgccatggccgtgcttgatactcttgacgccggtgtcgttcgcttcagccgcctagagtgtgcagtgcagtacacagggagaagtgttaccaggagaggcattgctgccaagctctatatacacgagggatgggcacgctttctgggccgacagctagcttaggccggcatcagctggagtgtcagtggtggtgccatgtcatccactgtgtcgcggtcacgcagatagcatgcagatgcagggatggatgaggacaagtgcgtacgtcgtccccagcgcagcggccggcccagctgatcgatcgatcggtgcgcggccactgtgtggctcaccgctcatcgatcacacgcacgcggccgtccccttcggtgttttcctcgtgcggttgcttcttttcttcggtagtagtacacgcgcttgcgtggttggcggtttgcccgtgggcgcggcatgggcatgggcatggcggtgtggctgcgtcaccgaatcggcgtgctctccatcacgccgctcgcgtcgcgctcgcgccgggggttgtgagcggcgcggcgtgacgacggatggaccgcggatggatgggtgtcatggactcatggtcatgttggtgggatatttgggatccgcgtcggctgcgcctccgcgcgtcggcgcgtgcggtgtgagccgcgtgatcgggatcggatggcccgttggtgcgttccgcgctggtggatcgagtctattctccccgtctccaaataaatcaatctaaaacaagcgtgtgtttggcttggaatcaagtgagaatccatcgttttatttataggatggtctcatctatgtatttagcacaaggatcgaaatgctctttctcttaagggcatgtacaaagatagagttagatatgagctctacgttatttagagactagcattctacaacagttagagacaatatggtctctaatcattaatgtatcaaaatactttttattactctcctttcctttctttcaccatcatgcaacaaaatttgctctaataaatgctatgagtcgactctgagccgttgtcatgcataacaaccatattcttttctctttcttccatatcatcaaatttacttgcatggcaatagagagaccactaataaagaccattgtacatgctctaagagtttgaagggtgtgaccggcatgtcaataagagaaaaggaagtactattaagttggattggtccaccattttttcatgaagctaaccgagatctaaaggaaatgttgctttttagaaatcatcccatcgcaattgttctcaaggcccaaacagccaaaccaaacaccctaaaaaataagttcgctcaaacccaacctatcctcagttatagctccaatctgatccatatctctgaaccgcaatattggatatctcgacctttcaatttattaaaaccagtgtaatttgaatccctaaatggttttagagagcggtttcgctgacgtggcactttgatttagtttgatcggctgactcaacgtgtgggttcagcatgtctatgactcctccttttttccttatcttttgtctctctcctcacttgtctcttcactggcaacattggtaggaggtgctggcgcagtcgctctgtctcgctcccttccgcctctcccttcaagtcatgacgccacccaccttgctgaaggagagaaagatatgtgggccccacaatatttttttaatgataaatgggtccctcatatttttttattctaatgccacaagcgccacatcaataccatgttggacgaaaccaggtcaacaccaccacattagtgaaaccgtcatttaaaaccgtcgaaggtgtcaaaatacattggttttaataattggaggtgaagatatctggtattgtagtccgaggatacgaatcagatttagccactagtaaggcagccaaagtggatttattctttattttttggacggatttttggacggagggagtagttggtgttaggttgcaaaggcttaagcgaagacgggcagtggactggcttggttggctaggaccgaatggccgattacgctggcggccatgttcgggtgaacggcccatgtgagtggttgtttgggcttgttttggcccatttgtaacactaaaagagcacacgtgcataatacgaaagagatgtttatcctaggcatgttgatacatccgtaacagcaaccccttggaggagtatggggaaaggaaccttcctgctttgaaaaggagataaaggaattttgttggattcacactggggtatatggtatacgagaatatggacatggctataaatcaaaatttaactcagaaaattggattgttaatgtttcagttgattggaggcgaaacacaaagctatatgatgtgaaaaaaaaactatattttccactctgttttttttttggaatgtctcctccactgcaagcttaatctcaggcatttaatacattgcaacaaaatctaattgattgcaataagaacttagcaaatttgtaacaaattaacaccaatatggacgatggaaaacaaaatttattcccctttcgatcaagagagtccccagaatgcaacggaaggaaaacaagaattggaacaacaaagaaaacttgttgcaacgaacaccgcaacattaattgattatgtgcaaggctagaagaggaggcacctgggtgtgtacatcgtgcttctccacaccttcgtgcaagccatggacatatgctcctcggtgacagcttcaccagcgacggaggacaagcaaaggtagcatggagagggaggctattatgatgtcctatttggcactagcaagttatatatggtcctttagatggatgaggttaaggttgttaagtggatgagaaatgagtggtcagcatgcacattctcagtacaaatattttctttcatgttttgttggctcatgaataccatgcatgaactgtacatgtggaaaagttgacgttgaatttgaacttcaattattgtacgacaagatcaacagcaacagtagagcaacgtactctctcctacgcaaaataaatcaaccacctattacaatgtcctaaaataaacatcatactactacgaggttgttttattttgagaccgagagggtatagacactctagcgcatttctaagattgcccgatcgatcggtcgatctcacttgaggcggcggcacagcgtgacgccgtcggcgacggggagcaggcatgcctcgacgcggtcgtcggcggcgaccatggcgttgaacccgaccatgtagtcgcgcaccacgcggtcgtacgccgagctccccggcgtgtcgcgcggcattgccacggacccgccccacagcgtgttgtcgtacgcgaccacgccgccgacgcgcagcagccgcaccagccgctcgtggtacccgcggtactgctccttgtccgcgtccgcgtacgcgaagtcgaacttcccctcgccgccggcgagcagctggtcgagcacggcgagcccgtcgccgtggcggaagtcgaccttgtgcgcgacgccggcgtcctcgatcaccgggcgccccagctcgtagtactcccggctcacgtcgatggccaccaccttgccgtcgtcggggagggccagcgcggtggcgagcagcgagtagccggtgaagacgccgacctcgacggcgttcctggcgccgatcatcttgagtagcacggagaagaactgcatctggtccggcgacgaccccatgaacgacctgtgcgtacgtacgtaaattaaaacggccgacgtcgacgtgacaagccaaagaaaaagaaaaaaacgattatgcaacgcacttgggatggttctgcgtgatgaggcggagctcgcgcaagcgctcgtgctcccgcgggtacaccgtcgtgtccagcacatactgcaaagtgcacacacaaatatgcatctctccatcattttttcgatctcttcctccaaaaaaacgaacatgaaacacacaccactgcacacgtacatcgcgcttacacatccgcgagtctatacgtacctcgaggatggagtcggacttgaggagggtattgctgcccggccggtaggtcgccatggctagctagctagctccgatgatgatctctcaatggcctctctagctatctggacctcttacatgagtattgcagatcaattaatgactaaaaaaaaagataagaagaagaacaagacgacacggcgttttgttaaattggtaggtcgcgtgatgacctgaacgtgcagttactcagcgtctctaccgatcagctaattgctgacagtactttggtataaaatatggtgtgctccctccattttaggttattagaagttttaactttagttaaaatcaaactactttcaattttactaagtttgtagataactatagtaatatttataataccaaattagttttattaaatcaataattaaatatatttttataataaatctaacatgggttgaaaatgtttattttctataatttagtcaaacttaaagtagtttgactttgacatattaacctgaaacagaggtaataattgttaccggttcatctataactttaattattaaaaattttgagatgattaaatcgttagagtatcttaaaaaaataactatcaagttttttgagggaaaactttcaaatgtaactataatgtaattgagtgtaattacattgtaactgcactataaccgcattgtaattacattaatttataccgtggctatgttatagctacagtataactgatataaacctgtatttaagactagtttagttgactagcaccgggatcttatccgtagcctatgtgaaatttctttctagcaattatttttctattcaatgcacccatcttaaaatgatccaataataacaaatctgaaagttttgacaaaaattttctagcattctagcaattttgttaaatcataatgaaagaaagtttaatacttatgtttatgtaatatacttcgatagcatgatatttatttaattatttagataacatttgtgaaaatccaaattattaaagtctaaatatgaaggaaaggagggagcagtggcggatctatgtggacccccgtttttataacaggaatcaatcgtgtaaacagtaccatttccctggatcaagtagtctggtacacacgaattcttagctgaaatatcaagtgcacatacacgagtgtctagtatgaatcattgcatcataagcccgcaggcatagtcttaaatcatcggaccgagcggtccggaatacattccaaaaacagaagaaggtaaggcagcggagttaaggcagcggcacgccattgccacaggcaatgaccgtaactaagacctactgggcgccatcgtcttcatcaccctcctgttagtaagcgtagggatcctccgaagcttcatctccgacctctgattaaatttgtatattgcaagggtgagtaccaaccgtactcagcaagccaccacagcaataatgcacatgacaggggaattcaaaggatggctatagttcttttgcgcaaagcaagttttgtaattcttttcacaagcctaagatctagcatagactgatcaaattttaataccagcgttcacattaaacaacgacggttctgtccaccatccattgtgatcccaaggatagcttcccgccattgagtggtcatggttttctgaggacgtccacattcccgcctctcaggaagtggctccatcagcataaaaatcatcatgcaatatcccatcccacataagttaagaatttagagtctagccaagtgtaatacatgtcccggtgctcaataaccgcgagcacggctattcgaatagatttggtttactcacactgcagtggatgtacactttacccgcactccgcgactgcccaacacatgagcctcgtcccaacacatgagacgcgtcacggcaaagctttttgataacctcgcattggcagtacccgctccatgaacttaaatcctcatgcactctaggcgtccatgtttctagcagtgagaggagttctggcgctcccgggaaagagaagtctcacacacatattaaattatggttcaagttaagttctctctctcacacactcatggcagtcctaccgatggcgacaccgatgtagggcacgcctctcggccctacctcaacggctaccccaccatagcgcacctacctcactcaggggtgaaccatctatgcagggatactgcctccgctcggctatctaatccgctaggtctatacccatacgagaagtgcggttgtacgggggtcgtttcatgcttaacttcatggctcggtccttaattgaccggggacggtactagcctttcccagataccacccaaatccaccgtccgccccagtcgaaaacaattgtttaattttatttctcctttcacaaatcatgtcatcaacatcatggcaatgtggcgctcatgtctctacatgccgcatctcaattaccttcccaaaggtaattgcccaagcatataacatttgataaatgtgagtatgtatgattttagaatagcatttctaagcaattgtcataattgactagggactcatacgtaaatatggttacgaaggaataaagggcaaccaataatcaaggcatggcataatcacaagtaggatgttcatcattgcatgcaattttatttgtaaacaaaacaatttcgcaattgggaccaacatgttcaaggaatagtgatgacttgccttgctcaaagtcttgcgggtcttggctttcacttggatccgcaactccctcgggctctatagttacatgcaaaaattgatttgaattcggttagaattcaaataaaaatccaaataaatccaaatggaagtcgaatgcgaaagtcgattcttttatattaactttactatttgcgaactagggcaaacccaatttcgatttatacatcctaaactattttttgcgggtatacatattttgttaccataagtttttaatttaatctacccgggcattatatccatataataggttagaaatttctatcgcgagctaaatatcggacaaaatcctaaaattattatacgatttaatttagtctatgactaaatgattaaatataatacacggctaaaatccctagtaattaaatccgaatttctaccgtgaatcgattacttatagagattacccaaaaataatctataataatctataaggatttttctacttgtttagttgttaattacatctaaatcactaccgcaaattgatttcttatagaaatttccaaggataatccataatttatattaaattttgcaattctacgactataattaatctataattaaattctaattattttaaattttctaaactttcctaatctccctctaatttctatttatttttcctccctctctctcttctttttccttctctctctcttttcttttcttttcttttccttctctctcttttcttttctttttctttctctctctcttcctcccggtttctctcctccttccttcttctttctctccctcggcttctcccttcctctctctctctcggctccctctctacccggcggcacggcgacaaacagggggggcagcagctcaccgacggcggcggcggcgacgacggcgcacggcgcggcacactgaggcggtggcgcggtggcacgaatgcggcggcacgacagcacgagggcggcggcgcggcggctcaaaggcagcgacgcggcggcacgacgacggcggcgcgtggagaaggggaagaggcagaggagggggagatggagtgaggagaggggagaacggtggagcttttataggggagaggggggagtaaggggaagaggggagagaggggcgggtgacgcgacggcggcgcggcggcacggggcgagaggcggcgatggaacgcgcgcggcgacgggacggcgacggcgacggcacggcagtggtggcgcgcggcgcgaggcggtgatgggacgcgcgcggtgatgaatctcttccaacgtagcttgttccttcggcactcgtaagcacttctttaattgagacacatggaagactgggtgtacatcggcgatattttttggtagctgtaactgataggcaacttctcctcgtctagcgatgatttggaaaggtcccacatatcttggtgctagtttccctttaaccttaaatctttttgtacctctcatcggagaaacctttagatagacgtaatctccttccttaaattctaggtttcttcttcgggtgtcggtgtaactcttttgtcgtgattgtgccacctttaaacggtcacggatcaagcgaaccttttcttcggcttcttggataatgtcaggtccaaataccgcccgttctccagtctcggaccacattagcggggtgcgacatcgtcgaccaaataatgcctcatttggcgacatctttaggtttgcttggaaactgttgttgtaggagaattcggtgtagggcaaacatctctcccagtctttgctaaaatccaatgcacaagctctcagcatgtcctccaagacctggtttgttctctctgtctggccatctgtttgtgggtgataagctgtgctaaacgcaaggtaacttcctagggcttcatgtactttctcccagaaatgcgaggtaaactgtgtgcctcgatcagatataatcctcttaggtataccatgaagacacactatcctggtcatgtataactcgactagcttggcactgctataatttgtcttaacgggaatgaatctcgctgtcttggtgagtcggtctacgatcacccagatggaatcatatcctgttgcggtcttgggctgtcacgcccagaaatttagcccaaatttccagactattttgtgtattaaatccctgtccaggaccagccagggtacacaaaacgacaagtaataaacagttccaaacgtaaataaagcgtaaaatacttacagaagaggcacttagtcctcacaccgaaacaaaagcagcagcagcggaaaaaggcgatcctagcggggcttcagctccactccacaggcaaaactcaactggggtctgagccttggtcctctaactccatcttcagctcagaagcactacacttctgaaaagggggaataatagcaaggctgagtacaaccaccgtactcagcaagccacaccaacgatgcagacgtgcaagggggaacacaaggacggtttgtggctatttgcataaaggcggttgtaaaacattttattgagcaaaacagtaaaactgttgagtaattaaagtaatattaaatctccactgatcaacgctacaccacgttgaacaggcccaaccaacccacctgtactacagtgcattgggtcgatttattaggtgtgagactaatcacggtgaatctggtcgatcgcccataaccgcgggcacggctattcgaatagttttactctggccagaggtgcacaactgtacccacaagacacaacccaccgacatgtcaccgcgtcatcatgtgcccatgatgcacacgtcaccatgtcgagtgattgtgacgagacccttcgcataaccctcccctaaccatccacaccacgctaaggtttcacccccacccctcaaaaggcagtgggcggtcccctcttgcgccgcggtgaatccggcagctggacaaccggacaccccggccgacccaactccatcacgcccaccctcgccaccggtgcctaggaaagggtcgagctatacttcagatcaagcagttacccattcccgcttgtggcaagcgctgtaagtcttccagggtttcccgtgaaccggtccttaattgctatgggtgcgactcgcaaaaccatgcatccacagcccaccattcagtcgcattttagttggataattacgaccataaaacatggccagatgtctcgagcacgcagctcaacaagatactagaatgtctaatactgcaattatcccatcgactgagctagtggtaattaagcatggctaagcatatagttctagctaggtcacataagtaacacaagctagtcaatttattacccaaggttgacaaagaacagatatcaagtaaacatggcgcaagcgagcagataggaaaaccctgatcccatgtaattagcaaaacatgcatatttatttgtaaacggtaaaacatttataaattgggatcaacatgctcaaggagaatgtgtgacttgccttgcttcttcactttgatcttctgaactcttttcctcgcgaccgcggacttccgaaacgacggaaactacacgctggcacgcaaaacgaggaaaaactctaataaacaccaagaaaacagtacataaaaagtaaacaaacatgtagagctcaattttagatgaattttgcaagttgaatggctcaattcggagttcgaatgaattagatatgaattttagaaggttttgagccatttaatgaatttctagaattattaccgatttattgcgcaatttaaatcaattatgacgtcatccgacgggggagaggtggcgccggcaagcgggccccacctgacggtgactcacgggtggcgggcgcaccgtggaccgagtccacgcatgcgctggtccgcgggcgcaccacgtggcagacacgtggcggccacgacggacggctagcggaggtggcgccgacgtggcgccacagaggcaccgacgcgggcggcacgggaaggccacgtggacggcccagatcgccccgaaggaggatcgggcggccacgggcgagcgggagccagctcaccggtcggccggccgggagcgacggcgcacggcccgatggtcgccggcgacgaccaccggcgcgacggcacgcacgggaggcgacgaaaagaggggaaagggaaaggagatgaagggggtcctcaccgaggagcgccggcgacgggacgaccatggggaggcgaccggcggcggaaaggatggcggcggccgacacgggaggcgacgggaacggcggtccgacgacgcccgaccatggcggagccgcggccgagggccggcaagacctagggaaattattggagcggttagggagggaaataggcgaccggagcggcgagaataccacgccagagaggagaggaatggtggggctcaccggcgaccgagaggtaccacgttccggtgggtttccggcgatgaacaacggtgaccgaggtgctgcacggcgctgcgaggcgagaggtgaagacggagcgacgcggcggcggctaaggcgacggtggcacacggctggaggcggcgtatggtggaggtggctcgggatgcacggtggaagggtggttgcggtggtggaatggggaaacggagcggaggccggggtagagcttggcacggcgttgccgacggcgcaagcggcgaggtgcggcgacgactaacgcagcggcagcggccggctgaaggcggtgtgtggcggtagtggctcggcctcgcgatgggaaggtg

SEQ ID NO: 3798 - DNA, 591 bp, Oryza sativa
acctttcctgcaagctgatgagaatcctcccatattagctcatatggtgggtatttcctgtccagcctaccagacattaaaaaatggagctgtgttaacaatcaatgacagccacaagtatatatggagagtgggacagtacctttcagtttccttaggaacaatgagtatgatcagcttgggcttgaaagtgagggctttattaatgaattgattagcaagagaagctttaaacccaaacggaggattcaatcccatgatctgagggaaatagcaaatatcaagtagagaaaactgagactttctgtgagaacaaataaaatgaatggctgggttgtgagtataccaatcgacatcctgtgggcaattcatctggttgaacggtcatccagtctcgtctctcaaaattgaagtcattctagggaaagaggtatgttgtgtcagcttcaacacaggatagggtgtgacaaaaatatttatcaggtgcatgactaggccctcatatatgtagcttttacccttttaatctccccggtatttccatcttactgaacgtatctatttcatgcatggtaacttgttcaatattaa

SEQ ID NO: 3799 - DNA, 545 bp, Oryza sativa
tcaaaatggattttggatattcctgaactagctcaacaggtataagtttcaggtaaccagcaagtagaatgaagtctaccctgagttccctgtttcacataagaaattaaggatagattgagaatcttgagacctattgcaagtgaccaaaacaaatatccgcagtaggcaagccagtcttgtagaagaggatataagtgaagtgggaactacaaacaccgtaaaacatgcagtggctattcgtgaaaaaatcaacagtggtacattacagtatatcagctaggcaataacaaaatggaagctaatctgactgactgtgtgggcacactgtacaactgatgaagaacacactccaacaggttccggactaaacgtcaacccagagcataaaactgatatcaaagttcatctggcaaaacaaggtagtggcacacattcaataagtaaacactaaaatcatttaaatagttaccaattcatcttcgtttaaaatcatttaaacgctactcgcacacataagacagataaatggattagaaaacttt

SEQ ID NO: 3800 - DNA, 537 bp, Oryza sativa
caaaatgactagatgttggtttaggaaatgcttagccatgcttagttcaactagtatacaaatggggatcacattattgcatagactttgactattagcatagctttggattggtgccaccgcaatggtgttagttaattaaaatacactgaatggtgggctgtgggtgcatggttttgctggtcgcaccatggcaattaaggaccggttcacgggaaaccctgggagacttaccgtgtttaccacaagcgggagtgggtaactgcttgatctaaaatatagctcgaccctttcctaggcatcggtggcgagggtgggcgtgatggagttgggtcggtcggggtgtccggttgtctagctgccggattcaccgcgactcaagaggggaccgtccactgccttttgaggggtgggggtgaaaccttagcgtggtgtggatggttaggggagggttatgcggagggtcttgtcacgatttcccccttcgcagtatcatggtgatacttcggggcatggcgacatgtgtggaatcgtgtc

SEQ ID NO: 3801 - DNA, 1124 bp, Oryza sativa
ttgtcatttgtcaatgagcccctcttgactagaccctcaagattagctgtcaaataattgctgctacttatcagtaatataacactgaaaaaacagataaagataatcctaaagcacaagcataacaaaaaaaaaaggtcagcattcagtataactctaaggaaatctcaaataaatactgagggcaaataatatcccaagaaacacagcagtaatttaacaaaaatgacctgctatcatcttctgtcccctttgcaggaattgaggatttacttccttaagcacaacggatgtattgctaacaagaagagctgttgcaattccagagcccatcaaaccaccaccaataacagcaacttttcttattttcctaggtttcaattgaacatcagtaacacctggcacctacacacaataaactataagtcataaaatggcaccaagaaatccataacagagaaaggtaaaacaaattttggcgtattaagtgttgtgactgcagaaacttgggttccatgcgttgtatatagattattccatctacgaacctacttgcatagcatccatataaatatcaaggtaatgtggtttaaaatctcatctccacaaacaaatagttgaaaaaacaggatcgagctatgcattagatttttgtgatagtgatacagctcaagaatttcgacatccacatttagtcattggagctcttttttcttcacctattcctttaaatgtttatgctgacatgagtaccaacatggcaaaatccactctaagatcatatagatctactaaaaaaacccgactgcaacaacttctggaagcaaccaagtccgcacagttttataggtatagggtttatacatagtcaatttcctagttcagaggatcaagtaaacttttgaaaagtttaggattgcaaaatggatttattccaatacaagaccaggtaatgtcattcaaaagaacaggtgctacagtctgtaactagacattggcaacatatctagaagatcaaaagaattagaagtatttgtaagaaagttaatgatttgatgcaaaatcaagacatcagtgacaaatgatgaagtgcatcataaaaagaaatgatattgtatgctcta

SEQ ID NO: 3802 - DNA, 662 bp, Oryza sativa
attcctgcagccttgacgagatttatcaaaattgtctgtggccttctctagctcttgtaaagtcatgatcatcctttgaccaatatctgcgttttgtgataccaatcgtcctaatagcaagccatggttttgcctgaaaaaagtctctttcattcttttcatcttgcgcagcttcattttgcttgatataaagggagcacttagtgcgaggagcaaaagaattgtgccaccaccaaccccaagcccgatgcgtagacctaaatctcgtgctagacgaagataaattcaattgagaaagaaactgtcagcaagggtcatcaacacacagtgtttttagtgctatagctagccttacaaaaacgtaaccttatatatactaattaagtttacaaacaaatggaaaatatatgctacattaattattatcaccttgcttcatcggaatgcatccctcctttttcttcgcatccccgtaggttccattgttgcataagcaaatataatctccaggcaaattaatgcacttcccataacacgggtaaatatcatggcgcgcacattcatcgatgtctagatgagtacaacaggcgaataatgtgatcagacatgcattttgatcatggaaaataaatcctattccctccgtttcaaaatgtttgaca

SEQ ID NO: 3803 - DNA, 635 bp, Oryza sativa
  unsure (1)..(635): unsure at all n locations
ttcctgcagcccttcaacagggctgggcggcgcggccagcccggtgcccacgctcgccggcggcgagtacacggtcaacgtcaccgacgacatgggcaccgtccatgtcgggtcgatgtggtccaaccccaagatcagcagcagcgtctactccacccgccccgtcgccgtctacgaggtggacagggtgctcctcccgatgcagatcttcaggaccgacccgcccatggcgccgtcgccggcgccggcgccggacgccaagccggcctccgacgccgccagcccgctccccgggaagtcgtcgagcgccaaggcgaaggcggacgagaagaagagctcgtcgtcgccgccgtcgtcgcgccgcggcgccggcattgccggctacttcttggctcttgctgcatctgcctcagctggattgctgctcctgtgttgatgctaagaaacttttctaattcttttttttttttgcatggattgtttggttgctttgggggaaaaatttaaaaaaaaaatttttttttgggttgtgtttgaaaaatttttttttcccccgggnggnnttggcatagtaggggcattgtgttaggattaagttttatgggagtatttccgtcatatgccttgtatgatta

SEQ ID NO: 3804 - DNA, 9300 bp, Oryza sativa
cggcacgaccgcgctcgtcagcatgtggatccacaacacggcgtgcacggtcatgatgatgccggtggcgacggggatcctgcagaggttcccccgcggcgacatcgacgacggcggcgggcaggaggtgcggcgattctccaaagcggtggtgctcggcgtggtgtacgcgtcggcgatcggcggcatggcgacgctgaccggcaccggcgtgaacatcatcctggtggggatgtggtcgtcctacttcccggagcagaggcccatcaccttcagctcatggatgtccttcggcctccccatggcgatcatcctcttcctcgcgctctggctcaccctctgcctcatgtactgctccaacaacaccgccaaggccctctccgcctacctcgacagaagccatttgagacgagagctcagcttgttaggtatacgtgacatcccgtttcttgatactatctactccctccgtccctaaatatttgacgccgttgacttttttaaacatgtttgaccgttcgtcttattcaaaaaatttaagtaattattaattttttctctatcatttgattaattgttaaatatatacttttatgtatacatatagttttacatatttcacaaaagtttttaataagacgaatggtcaaacacgtttaaaaaagtcaacagcgtcaaatatttaggcacagagggagtatatccgttccaaaatattgctacctagaacataaaaaatgtgtttacctttggttgtatatcactgctaaaaagttgacaattgacctgtggtcatcacttggataattctgattgggctaagtatttttctgcctcaacagttgattaataacagccacaaattcagtatctaattctaagtccatgattgtctgatgaggtgtcatgatctatgacaggtccaatggcttttgcagagaagatggtcttggctgtgtttggggtaaaattctatttctattttttttttctaatccaacactagctatgttctgattttatgaccataaatttcaatatgaagaatatgcagggtttggtttctgtcatacaaattgaaactgattatttgtgctatcttggtaaaactaactgaaatggacccttttttttttcttttttttcttttttttttttgcagggcctagttgtgctgtggatgagtaggaacataacagacaacatccctggatggggagttcttttccacaataaagttggggatggcacagttactgtaagtgctaaaataatcacaaagacaaaaattactgggctagcgagccagttgcatttacctgatcttatacagaagcaaatcactttgcaatgcagatcatgatggccacccttctgttcataatccccagcgggaagagggagggtgagaagctgatggactggaacaagtgcaagaagatccagtggaacatcatccttctcctcggcgcaggattcgccattgccgatggcttcaagacgagcggcctcaccgacatcctctccaacggcctcaggttcctgaaaggggcgccgacgctggtgatcgtgcctgtcgcctgcgttttcagcgggatcatgacagagttcacttctgacgactcaaccacgacgctggtgctgccattgttcgctgaacttgccaaatccattgaggtgcaccctgccttgctcatggtttccggcgcaatcggggcccagttgtcatacttgttgcccaccggatcgccgtcaaacgttgtcggcttcagcaccggctacattaccatcaaggatctggtggccactgggttgcccctgaaaattgttgccattgcagctctgacagtcttactgccaacattaggtaacattcctgcacagatcaacattaaggattagtcagtagttagtaacttactgttgttttctgacttaatctaatgcttttttttgttaatttgatcgttcaggatcaacgatttttggcatggacatcaagtcataggaacataaatatgaagtttttgagaatgtacagtagtttctgtttctgtatctcatgcctgaactattgttgaggggtcagatggcatggtttgtataagagtaaccatagggatttctcagccgttctgtattactgtatctgagacgtgccccgggagatcagatttcttgtcaagacagaagcaaggaagacaagcagacaatagaagaatgatcaaaatgaaacgtattcaaacaatccatatccttcagatgagcgtacaatatgcaggtcttatcctctagaggtgctatagcttattgttcttcacaaaatatgtaaagttaaaagagtgtcggcatatatattaaattgaacagaatatgtggtacaagaaagctgaaagcctgatattgtcaaactactggttgattgcttataagatggagtacatctcaaaaagttactagtgataagtactctcaattattagtagtttgttcatatgtagctgtccatctcagagagtgcgagtgacacacgttctagggaagtgtagtacactagaaaacaatcaaacatcaaaatttgaataagttgcaaaaacaagtaaatgatttagttatggctatgaattgttgaatgagaaaaatcgcaatcctatattaactgtatgaacatcagcatcattgttacagtaccatacctgagtacattctaatggaacagttcacttgcataacgtgagttagcataatatttaactaactttctagagttcagatgactgtattttgtacaaacagattgcttgcactcaatcctgagattgaaataacaatactatgatgtaaaatgcatctagagttccaaagaaacactctgacccttagatcctgatatcttactctgaaaatcattcagaagactgtgacacagaagattaaaaaacaaacaattaacctaattgcttctggagaagccataggacaataattaattcaacatattagttgtcagaccatcctgtattcctgttactgcaaactacaagcatgtgtaacttgttaggtaatcgtatcccaaaaattcagacttcatcctgaagaaaaaagaaagttagatagtcaggtagttactttgtgctgacgattacgtacctgtgatcctgaaatacgctaatgtatcagaagggaacatctgaaatatcagaagtgagctgatcccctttaatctgatcgagcttgatcacttctcaaatcctgttcaattattcattgttaagaacacctcaaactagccgtgcgatcccgcaccttttctgttcgtcacaccgtgcaagcaaaccgataatcttttctctctttatcgaagcaaggaaatggaaatttctaggcaagattcaccaagaacaaaaataaaaaaaaaagattctggataaagtagttcttcacctttgctctcgctagtcatggcatacacctgcgccgcaactgatctccgccaaagctgggttggtcaaggtagcttgcagtggcggctcgccggtgatctgagccccatcggaggcggcgatgcacgattccggccaccgcacaccgccacgcgccgccgtcctcgcgagatcgacgatacttcatcaccagaaaaagggaaaaaaaaagtagaaaaggcgaaatggatcgcagccgtccaaaaaacaccaaaagctctcaccaaacaccatcgcgatgaatctcagccgtccgatctggtgggcccacacttcccccgactttgttcagtttggagttgcgacactgacatgtgggccccacttttactatggcccacacgtcagtgacacaacggcaagctgcacaagggtcaggcgatctcgtctccgcgagttcgctcgcgaccgcttccgagatccgttcaaccccgatctacgccgccgagaacctcgccggcggcgacgacgacgagcacctcgccggcggcggaaggcgatgatgcctgtacgcacgtaccaccaccaccaccaccacaacaacagcaacaaccatcggctacgccgcatcatcccccgagtcctcctcgccgtcttcgccatctacgccgtctcgttcgcggcgtacctcctccgccaccagtcgccgcacccgcacccgcaccctgccgctgaccccgagcgcgacgccgtggacgcagccggaggaggcggaggaggaggagccgtggaccgtgtgcgggtagaagcgccgtcctcgcagaagccatggcctcgcctcccctccttcctcccgtggacgtccgcctccgttcggccgccgccgaagcactcctgtgaggggtacttcgggaacgggttctcccgcctcgtggacgtgctccccgcgcggggcggcggcggcggcgggtggttccggtgccaccacagcgagacgctgcgcagctcgatctgcgagggcgggagggtgcggctcgacccggggctcatcgcgatgtcgcgcggcggcgagccgctcgaccaggtgatgggccgcgccgaggaggaggagctgcccaagtacgagcccggcgcgctgcaggtggaggcggcggcgaagaggacggggccgttggtggaagcggggttcctcgacgcctacgtgcccaccggcgggatcgggatgcacacgatgaggtcgctgctcgactcggggcgcgtcgtgccgcccggcgagctacactgctcgcaggtacacacactctttgcctcagtaaccagtagtagtagctaaaattggaagtgtaaatttgggagaatttattgttgtatgttggatccggttcacatgaacactgacttgcttaaacatttcatatatctatgaagattgcaacaatgatttgaactgtaggagtaataatgagtagagtccatggcaaaaggtgggaagatgtttatagcatgtttcctgtagtaattgcgactaaatttaattaattaatcgattgcgaggaaatttcaagaaggccagggtgtaaaagaatttgattgagtttgggtcctcagtccttgctcttctgctcctgcaacagaggactgaggactagcggcgagcaattgagtttgagttagtttggttcagcaagataacatctgctctgggtggcacccactattggatctggcaaattggcaaatagcaaggcagcaatgttagtgctggccacaggtttattgggctagtatgggaactcctaacaatgagtcaatgagctcctttctttttgtttggtgagggagatgggtgtgggcaagaaatcttacaggctataatttcagtcttcaaagtggttatagttgtttcattccctccctttcttttttgttctactgttgacttggcagtttgatggaattttctttttctcttgttaatgagaaccccatgagaaccaactggctatataatgaataaatattttgattcggttatttggtttagggagaaaaaaaaagctttcggttatttgattagtcaagttaatcgtgccgacgccttgtgcaactgtattgctgtaacatatttgatgccttgattgatgcactgtactcatgcttttggttatttgatttagttctgattggttgcaaatttaccatatcaatacagatgtagttgactatttagcgaattgcttaaaattttgcttggatatgggtagtctgttttgagctttgaagatgtatctttgtagcctttataacactagattttttatgaagaaacacatgaacctctcaagaagcagagcattgaattcattccatgactcctattgttatattgcaggattcatttcttcaccaatgtatacatatcacagtaatattttcgtaaagctcccctaggataaattcctttctaatgttattatatttgttgcagtgggttgaagaaccaacacttctagtaactcgttttgaatatgcaaaccttttccacacaattacggactggtacagtgcatatgtcagttccagagtcacggatttacctaaccgccctaatgtggtctttgtggatggacattgcaaggtacgttacacgtgatgcattttgagttgctacattctttgattgttgatgcactgcagtttagttggtctatttcatgaactatatagcctgagttatggactttatggtaattagtctgtttcccttcctcatttccctgccagccaggctgccacatttccatttcccttcgctcctttataatgtgattctcctctttccgggttattacaatagcttaatttgtagtacattggaatacacttcaggagagtatcaacgtcatcttagagaagtacagttacagacagttgtattgaaatactagaaagtgaaacaagaagcagaactttgactttattggtcataaaatcagtcaactggggttaaccattttgccattttagagcatgcctcttcacccatcatctcaaaacctgctcataaatagcagaacagtttcatcacttcatgactgcactgcatgcgattctttcgacttgttactgtgaagtcaggccaggaccaagtagaataatgataattatattcctcttctatttaatgatgcaacggaaatatctgagtagggtttcttgtgcaatgatttccttcatattgcaaatcaggagcatggtggttcaattttgccattcatataggttttattcaacgaaacctgaaaacatgcatgcagatactgtttgatgagtgcggcagcatattgtgtgattaatgctagttaacaagacggctcattttttactcaataacagtgtatatgcttttgtcttttaacagtatgatctgacattcacaggcacaactggagcaaacatgggaagcacttttctcaaatgtgacatatgttaagaatttctctggccctgtttgttttcgacatgcaattctttcaccattgggctatgagactgcgctatttaagggccttagtgagagctttagctgcgaaggtgcttctgcggagtccctcagagaaaagcctgatcaccagaaaacggcaaggttgtctgaatttggtgagatgattttagcttcttttgatcttctgagggatgacatactgtcatccaaaacatcaaatgggctcaatgttctctttgttcggcgagaggactacttggcccatccacgccacagtggaaaggttgaatctagactaagcaatgagaaggaggtatatgatgcaattgagggctgggcaaaaggtcagaaatgcaaaataaatgtcatcaatggtctttttgcccacatgaacatgaaggagcaactgcgtgctatacaggaagcttcagtagtaataggggcacatggggctggtctaactcacttggtttcagctaccccagatacaaaagtccttgaaatcatcagcagcatgtatcgacgcccacattttgcattgatctcacactggaagagcttagagtatcatgccataaatctccctggatcatatgcaagggtaacagatgttatcaatgagttgagtaatatactgaaaggttttggatgctgagacagagctaggtattcatcaggaaagtcaccatactaacaacacaaatgcttacaatttcaatggatgggaaggaggttatttgcatctgtgatctgtgaactgatgcattaccagggctcatcacttcatcggaggaatttttatgctgccaaatgcagagagagattgtgctgacaagtgacaatctttaatctgcatatcgtgtggaacaagaaggcaatccttccccccttcctgacatcagccgacgacatgaaaaccaatccatgctgcgcacacttttctaccatgaattcatggtcttgaggaccgatcctcaaactgtaattgtaattcatcatttgggacattcggcgacaattcttgtatgttaatgcataatgttgagtgcttctcccccactgttcatatatgttgaaaaacttgcccaatggggcatggcaattgaccaagtgtcatgcccttcctactcccgtgtgcatgatgcatgaccagcctggttttctgccatggtggcctggtgattactctggaagatgaaatggagccgtcaggctcataacaccggtgtacttgcttcactttgttccttttgcctgccattactgtacccctgttttattgatgtgggggaagaagatatattattgatctgttgttgtggacttgtggggggttcgacatgttttgagtcgaagctttgctgctgttatttgtgagtatcatttaatgtttcacctactgtttgtgctgcatcttgatcgatctttgttgattcttgcaggaggaggacaacacaagctaaggggaaggaaaagggagaggaagaagaaggaatggggaggatggctgtgggcacggtggtttgcctgcctgcatgcatcccggaggagcacatgccttgttgctgctgcctggggcgtgaaatgggcgtggctgatgatggacgctagctcgctgggaatcatgcctgtttccttcagcatttatgtgggtcggaggatggagttggaattggctccggtttctgcttggttgggtggcctggatgctgtggcctggtctggactctggacagcgccgaggccttcggatgcggcggtgctgccggtggttacaggggtactgccacagtacatgtacagccttgggctcatgccactaccaattggcaaaggtatggtttattctagctagcaacgaataaatttggcaggtggtctattttttgaacagttctacgaaagaattattattcactttgtttcaaattacttagcattcgctttattatcctaagttaaaaattttctatctttaaacatcaatttctaaaatcaacatgcgaattagttaaatattataaaaatgtttctcatggtggatctaaaaacaaaacgatgttaaaccatataaatttttagaaacccggtagtcaaagatacaaatatttatctcttcatttaagccttcaatgcataaagactacaaataggaacaacttatttgaaaaaactcaaatgtgaaataggtgtaacttttatcgatggagggagtaatttagaaaagagagtactggtatctgacacttgctcaaatttagaatatgtaggactacttagggcatgttcatatgtagagctcataaaaacttttagataatgtatgtttatttagagactatccttacaatagtggagataacaaagattcta

SEQ ID NO: 3805 - DNA, 2055 bp, Oryza sativa
tattgtcattcgaataacatttgtactaatttagtgtattactccctccgtttcaaaatgtttgacaccgttcactttttagtacgtgtttgaccattcgtcttattcaaaaaatttaactaattatttattcttttcatatcatttgattcattgttaaatatactttcatttacacatatagttttacatatttcataatttttttaataagacgaacggttaaacatgtgttaaaaagtcaacggtgtcaaacattttgaaacggagggagtatcattttagataattagtatccttcgataacttaattacaatgaactctgaccggtcagagtattaatgcgtcggaaacttttctaagtatccagaatcgtatatgcgcttgaacaaaatagattagcaatatacaggagatcaattttgtagaaacggaagcttgaaaggtatgtatatgtactacgccttgtttaaataaggcagtgtaatgctccaatattgcttgttcacacttgtacttcatccgtttcataacgtaagactttgtagcattgctcacattcatgtaatgttaatgaatctagatacacatatatgtctagattcattaacattctatatgaatgtgggcaatgctaaaaaatcttacattataaaacggagggaattagccagattaaggccctgtttgggggagcttgtcccagctgcagcttttcccaaaagctgcttctactagaagctgcccaaacagtccacagcttctgagaatatgtagttacaaattctgaaaaatgaactaagaagctggagaagctgggtttcagagcttttccagattctcagaagctggctaccaaatagctacttctcagaatctaaagctcccccaaacagaccctaaaccaagataaatagagttggctagctttgggaaataaaattatggaggcaatccgatccatacaaatcaaagccgttactgaactttgatcgaacaacttcttgagagacatgaacatgtggacgagtgatgattacagtactagtaaacaccatgcttaaaaacactactaagtcccaaaataagtgcaaccattacacagctgtacttattttagtacggatagagtgtgcatatatggattgaaacatcgagaatcaggactgctaggttgaaatttatgtgacctgatgacgacctagctagacaaggacatactgatagtcatatttccaaatctgaaaaatttatttttaataggcatatttcaatccaacaacttatcatcttaatgactttcttggatttaatgcatgactcttcattcttccatacatgattggctacatgggcattgagaaatgtaaatattaatgaatcgcttgtttacgaggaatgactagtagcatatttaaatggataataagtagaattaattatccttggtctgtgtgccaagatgaaatatgactatcaaaagtagatggagggagtacacatgcatgtacatcccactagtccgacaagtagctagctactccatttccatttagaccgacctttggatagttatattttaaaatggagggattacttacactattgacaagcgttactttaatccgatagtcgatataatattttgatgaacaaatattgtgtaatcatatttaacatacaacatacttcaataatattttcatgaacaaatattgtataatcatatttaacattacaacatagtacttcaataataccatggtatatcttcaaacattttacagatttattactcaaataagagtaatcagagtttgattgtaaacagtgtctggtgagtatttgggaacggagataataactaccaactgatcgatcgacaggttcatcaagtgacaacctttaattttctgcactagaaatcagcagaagctcacctcagaacagacttatgtggtacaccggaccgtgaggtgagacaacgtacgagccccaccaagcttgaaatacggagatatgtttgctgttccttttaaagcttctattcagat

SEQ ID NO: 3806 - DNA, 5890 bp, Oryza sativa
agaagcagcagtagaaactgtagaagaagcagcagcagcagcagcagtagagatcagcttgagaagtgaagtgaagcagccaagcttcctcatggaagacccctacactagcttcttcaagaacccttactactactactgcacctcggctagctccttccccaccgcgcccgccgccgccgccgccgccgctcacctccctccgccgctgccgccgccttacgctgccctgtatcctaccgccggtggcgtcggcgtcggcgtcggcgcgcatcatcatcatcagtacccgccggccgcattcttccacccgccgccggtgcaccagcagcatcaggcgccgccgtcgccgccgctgcgggaagcgctgccgctgctgtccctgtcgcccacgccggcgcgccgcggcggcgtcgtcgacgcagcggctgactcggactccgacgacgacgacgacggcgactgctgctaccaccacctgcaggatcaggagggggcggcggccgggtcgacggccacccccgccgccgccgccgcgcgcgcgccgctcttcgccgacctcaactgcatccccacctgctgcggcgacgacaacgacggcggcgacccgatggacgtggaggtcgccgggacaacggcggacatcgacgccgcggtcgccctgcgcatcggcctgcctgccggcggcacggaggccgatctcctctccgggctcaccggcgccggcgtcgaacacgaggaggaggaggaggactgcaaggtggacggcggcggcagcggcggcgacgacgaggtggtgccgctagggttctcgtcgacgccgatcgggaagctgaacaaagggcagtactggattccgacgccatcgcagatcctcatcggcccaacccagttctcctgccctgtctgcttcaaaaccttcaacagatacaataacatgcaggtcagagctaataatcatcttaattacattcttattagctactcatttgaatatatgattgatcttatattgctgtttaattcttgttcttggacacacaatatgattgtgataactttgcaggtcagagctaataatcatcttaatcacattcttattatagctagtactactagctagaaacatctcatctgaataattgatcttaattcttgttcttggacacacaatatgattgtgataactttgcaaggattggttggtcatgattttgttgattgcaattaaagtagagaggaggtgggtagcaagctgctagctttggagagcagatgcatgccatgaaatagacttgagctcacaggagcatgcaacagtagtggtgtctgccttttgtgtgattgaactagactggcatgccaggagcagctatagctagaggtagagctagagcttaccatgcatgcaatctttatgcttttctctccttgagttgtttggcttttggagatgcatatgagtggccaagctgcagtggagatcccagtgaagattttatctttgcttctctcactgtcttagtacacttccactgatctcatcagattacatatactcctttctggaggtgtagtttctacttgtactagtactagtactacacttgctatcatgcacctagtagtcctgaatcctgatcactcaggactcagggctcaaataagatttgggtagatatatgcatgggggttgtttcaggacaggctttcatggtttggaaagcataagattatggagctgctgctgctgctgaacacatctcccaagaacagcaagagagatctgcagtgtgcttcctgtaggcatgcagccaacacagtgccactctggctgcactctttaaaggaacaacaccaacacattgaacacaacaaacacacaagccaagctagcaaagggggcatagctgcctggagtagtagagccctcactttcaaaagatcacacactagctagcagcagctgcactaattgacatatgcatgcagcagcttcagttcgagtagttctctcaggtttgccgcagctgaatattgctagcaatgcaactatagctgcagtggtgcattaaatacctgcaatatacttactcgaatcatatgctgatgaacattcatttgaaatacatcacctcctttttgttccttttgtttatactagtaggagtaaatgtgaaataatggtgctaaatttcctgaaacaaaacgaacataaacaaaaaggtgatgcatttgaaatgaatgctcatcagcatatgattttagataaagtaagaaacattgagcatgcaatgatacgatcgctagggatctaattaagtgtgttctcatacctggagaggacgatcgacatcccatatatatacatgaagctttataaaaaaaaacttctgaatttgtttttattacattgtatatactactccctctgtcccataatataagggattttggatagatgtgacacattataatgaatctggatagacggaccgcctagatttattttactagatcaatatgtcaaatccacccaaaaatcccttatattatgggacatagggagtattgatttggtgaatatatacattttgatgtcgatcagaaaaaaaaacgagatggaaattaatgaaacttgttgaaaaaaaatgcatggatgcagatgcatatgtgggggcatgggtcgcagtacaggaaggggccggagtcgctgcgcggggtgcagccgacggcgatgctgcggctgccgtgctactgctgcgcggcggggtgccggaacaacatcgaccacccgcgggcgcggccgctcaaggacttccgcacgctgcagacgcactacaagcgcaagcacggcctcaagcccttcctctgccgcaagtgcggcaaggccttcgccgtcaagggcgactggcgcacccacgagaagaactgcggcaagctctggtactgcctctgcggctccgagttcaagcacaagcgctccctcaaggaccacgcccgcgccttcggccacgcccacaccgccctcgacgccgacgacgacgacggcgccgtctccgacgccgacgccgtcgtcagaccttcgtcctccatggctgcctcctccctgcagccgccgccgcgctagctagctactagcatacatatacacccctccatccaaaaaaagttcaatcctgtccaggttcatagctagagtttatgatcaccctatcgatctattagtgatactactatcacttattagttgatgttgctgtttttgtttttgtttgctacgttaattagggttatgggaaaatgtaaggtgtgatctcgtgctcttagtttttcttgatcaatatagcagctagcagctggctggttgtttattagcatgattatatagcaccgatcgatcatatgtatgatgatcaacttattaattacgtgttggtgatgattttgatgtaatcatgccgttctgctatgttaacccatggtggaacaagatcaaccaatgttttcttcagtttcaggtcatgaagcagtacgtaaattaaatctagctccagcccttgttaattactccagttaggactaccgatcgattatcaattgtgtctgtgttcgcaactgtacatgtataacgacgatcgatctagcgctgcatatatacagtgttgacatttattggtaattcggaggatgacgatcgattgccgccaccattggcatgcatgcatgcggtacatcattaatgtcagttctgcatgttgaaaaactttcacccgttttgttgtatgcgagctccagtcaagtttctaccactatttatcgacgtacgtatccccttatgtgcaagcatacactgcacatatacgggccgacctaaacgcttcccaagctaagctagtaataattcgtcgacacgatattgctccaactttaacggccactttaaaactcacgattaagaaaacagatgaatagaaaaaaaatacatgactttgttggcaatgcaaatccaaaaaagagaattacaaaacacggagaatacagcaatggaatgatcatttgattaaactatagaaaaaacgcatgaattgaataagagatgaactcaggaaaatttgcaagaggtgctagagctcctgttaaattttttttccaaaataagctatttcttagtaatttcataggatatgggaagctccaatcctttgttttaaaggacaatataggaaaattttctattggattatttgaatcctacaaaattattccacaaatccaatggcggagccaacgacatcatcaagcccgaacgacactaatagcgtttttcaatgattgactaatttttataggggttgacaactatagataggagacggcgacggagccctggcaactgctcgacctatccaggagatggctccgccacatcacaaatcatttgtttgaagggggcctaagatgaatcctgatatgcataacatacgtatacacatactcgcatacactttattttagcatgcaaaattttagtgagatcatatatttatcaataatctccatatatcgtctaaatgcatgttaaaagtgacgctcatggatctatatatatgcatgtgaatcgtctagggtaaaaacaaccaaaatatactcttgttggcactactataaaacaatttttgcagacaccagtgttttattttttttcagatggggcaataaaaatccttttgtaataatagtgagaaagctcttgtggtatatgttcgtctgcaaaaatcgattttcgtaagtggtcgcttaacacgtctacatgtgaaaataaaactattttcacatacgaatgtcttaagcgactacttacggaaatcaattttcgcagacgactgctaaagagcactagccgtgaaaaacttatccagcaagctagtctggatatgtatcctcctctactaaccatagagtggataagtctcaaccacatcctctcccagtgctcctccctcactccctcacaagggttggtagtggtagggcttgaccgctcggtgcccgctgcggcggtggggctcaacgcaacagatccagtgtcatatcccccaccatcgcgcgccgatctggtgggagctgcgacaacgaatgcggcgatgggcctcggcaggtgtgaatccgacggttgggaggtcagtgacggtgggtccagcgacagcagacggccgctctcgagcttgggcttttacgatttttctgtttttgatttttttttattgtgcaagaattctttttgaagtcaggcagcataacatgccgcatgcgaaaatccatttttttgcgtgcaattgtgttgcctgcctagaaaaatccctatttttacatacacctggggctatacgattgctataccagcatgtgaaaatgcattttagccgtttgggaaaattgttttttagtagtaagggacaggtccagcacaaaagcatagagcagttgcatgcatcttcttctaacactactacagaaatgatttttctatacgaggacccctatagtttgtagacggataataactggtcacaccagcaaaaatcgaccagtattttcgcatacagctccttaagaggctcacatgcaaaaattcgcacgcgaacctcttaacacatccgcatgcaaaaatgagtctatttttacatgcgaaaacagcatgcgaaagtagattttcgtatgcgggctacttacagagcacatggaccctcacactttttaccacaacattttttgaactccccttctttctctacaccacaccattttctcctctcccactcctccaggctaactcctctccctctaccctctccacatctcttctccttccctcccccctctcccc

SEQ ID NO: 3807 - DNA, 652 bp, Oryza sativa
aaataaggagaaataattgatttaatgggtgagtaagataggttattctactttgcgctcacctggaataatttgttgtcaccacctatatgatctgttgtgcacccttttgttcgctgaaacataatttgtatgtttatcttatcgatagcactattgtgcttgtaagtgtggtatattattcaattaatcagtaaaaatcctcacgattttgtttgagtaaagcataagctattgacacatgtatgccaagagtaaaaagtatacaacctgagaaaatgagtaaagtccatcaccggtccctaaacttgtaccgctgtatcatcccggtccctaaactcgcaaatcgaccgttcaggtcctcaaacttgttcgactgtgtcatcccggtccctaaacttgcagatcactcgtttaggtcctccaacttgtttagttgtgtcaccctggtccctaaacaggacggcctaaaaactttatatcaaaaaataattcataactttttcatgtgaactctaatgaagacaaactttatatcaaaattgtagccctcgacacgacctacaactttgtagttgaaaagttttttccattaaaactgtttagggtcccaaaatatgttgcatgtttatagattttgaaattttaattt

SEQ ID NO: 3808 - DNA, 664 bp, Oryza sativa
atttagaagttcctttcacagaggaagagataaagagagcggttttccagtcaagatcagatagtgccccgggcccagatggtttcacaggtggtttcttcaaaaaatgttgggaaatcattcaacaggatctagtccaggctgtcaacagggccttctcctccccgccagaccgtcttagactaataaactcagcatacatcatcttattacccaaaaaagagaatgccttccgtgtaggtgatttcagaccgataagcctaattcatttcttcgggaaactgctctccaaactactagctaacagattggccccgagactacaacagatggtatcagcaaaccaaagtgcgttcataaaaggcaagaacattcaagacaacttcctctttgtcaacaacatggtaaaagagcttcactcctcgaaaacgccggcgattttgctcaaactagatatagccaaggccttcgactcggtcagttgggcctacctcgtagatcgactaaaagcgctaggctttggtcatagatggattgactggatcatttctatcctggcgagctcttcctccaaggtgattttaaatggcagggcaggactcagcttcatgcatggtaggggccttcgacaaggcgaccccctatctccgatgcttttcattct

SEQ ID NO: 3809 - DNA, 627 bp, Oryza sativa
atatgcaacaggtgatgcatccggacttcatagtaccaagtttcttaattttcatgcaatttttctctgtccaggctccagagcccctggcgttcttgatgttcatgtgatgttcttagtaacattttttgacttttgtgaaaacagacgattaccaagctgacagctcagtgcagtgagaaggcttttgaattagaggtgatattttaaaaataaatgtttcagtatgctgtctaaaataaaatttatcccataccaagtattaacttttctcacgattgtgcctttttttaatgctacagttaagatcagctgataatcgcgtccttcaggagcagctacaacagaaggtgctctccttttctttatttctttcttatcgttgttcagtttaaaatgtttgtgaatggtgaatgactgaatggtgcaatttcaatactggtttaacacaaaaatcacccctacttgcagaatgtggaaatcaatgagttacaagaaaaagttctacgccttgagcaacagctgacaacaaatactgaggcatcccctgaacaatgcacagaacatgagcttcatgatttgaaatctaaacttcagttgaaggttccttttctgatcctcatttcc

SEQ ID NO: 3810 - DNA, 2210 bp, Oryza sativa
ctactgccaaggcggcctgtacagcagtacaggcgtcacgggcgcgtttgattgttggcagttggcactgataatttgttccacctgcgtttctttctccaagtacgttgttgagtcaggttagtgatttttgttgaagggctcgtctagtgcgttgctgtgagcctgtgatctggacgtcgtgacgaagcttgtgaactaaaaggcaggtgtgtgataagctgtgttgctggcttgcagttgaagctggtgaggtttgtgcgtccttttctgctcctagttgaaagagtgcttgcacttgtgacttgtacaatctggttgttattgactcgctattacaagaccgcccatcggtgtctcagtctcactaccgacggatggtgagaccagccaaatcgttttttccacttggacccaggctaaaacctgccaagttataaccgggactcatgccctggtagtacttgcagttgcagaatcactatcaggtgggtgtccaattggatccttaaccagtggacgtttagtgttaaatttgaatcttccaaatgtgaaaatctagttaactcctgttaaaattctatggaatctatttaaaactcttacatccaaaccgaatttaaagatttgacgcttatatgcgaattacaaaatatctatagcaaagaatgcatcttcttcaaatgtacggcgtgccactatactgtgtaccgatatcacatatctatgatcgaagttgcaaacacttgaactgagagtgctctctccgtctaaaaaaaaatctataattgaatttaacatagtattccttcggggcccctttgatttgcaggaaaaatataggaattttggaggatttcaattctgtaggaaaattttatatgaagccctttgaaacctttgaaattcctatggaatggactatcctatagagattttggagaaaatttagtaagagcttcaacctcttgtaactttcctttgagtatatctctctcatcctgttcgtgcgtttttcctgcggttcaatcaaacggtcatttctctattttttcccgcgttttgctatcatctgttttacacttacattcctattaaaatcctacgtttttcctgttcctacgttttatcaatcatgcgattcaaaggggccctcagtctcgtaatataacaacaatcgaagggagtactccctccgtctaaaaaaagccattcctaacatctgatgtggagttagtggagatggagaatgactaaaatgaccttaatcattgaaaaaaaagtagtaaaagtcatgtgtaggtaaaggatattaaaatgataaaacttatcgttttacgtgttgagtataggtaggatggtagaagttattttttggtgggacaaaatttaaattgtaggagttgagtttttttttttttttttttttttacggagggagcataccgtgtcatatactactgcatcctcctatccatcaacccaaccaacggttctctcaatcaatctcaccatccgacggtcgcaacgagccaatcggagaagagaaaatcaaaataatcaatcaataaaacagaaaaaaagtaaaaaaaaaaaaagaagaagaagaagaaagtagcaagccggagtcgagagcctctcaacccatcggccatcgcccaccaccgccattcgccaccacctcgcctccgattcagatctccctcccccccttccattccacgcccatcggattccctcccgattccgctccattcctccccgcctccgcccccatctccgccgacctcgtcgtcgtcggcgtcctcatccaggcagtctcggcggcgattcgatcgccgccacggtcgccgatggaggccatccggaagcaggcgtccaagctccgggagcaggtcgcccggcagcagcaggtgagcccagattcgagattccctacccctcctcgtggattcctcgatcccagctcgccgtgtctccctccggtcgagatctcgtgctgccgctcgcgcgcgctctcccatggctgacacctcgggagtttcgcatcgcaggccgtgatgaagcagttcgggggcgggtacggcgcggacggcgcgttcgccgacgaggccgaggcgcagcagcactccaagctcgagaagctctacatctccacgcgcgccgctaaggtacttggatttgttcccttgcagttttacttatggtaa

SEQ ID NO: 3811 - DNA, 6034 bp, Oryza sativa
  unsure (1)..(6034): unsure at all n locations
ttctgacatatggattaatatcattaggtggcagaaccgttgagggctatggtgatgggagctcctttggaagatgctcgccatcttgcccaaagatacgacaggatgcgtcaggaagccgaagcacaggttatctcactatgaaacatactgtctttactacccttcatatgttgcctattgttatggtgatttctattaaacatactgtctttaccctttttatctgttggctgcctattgtgatggtggcagatttgagtttcacactgatatgttatgccacaattttattttcattgatcatataagaaacttagtaaggtactgtgagttctgcaggctattgaagtctcgaagcgccaaatgaaattaagagaaacatctgggaatggtgatatgatttcaagattagaggctgctgaatcaaagttgcaagagttaaagtcaaacatgggggttctaggcaaggaagccgttgcatcaatgactgctgttgaagctcaacagcaaagactgaccttgcaacgactaattgcaatggtatattctatgcttgtttagtttggccaattgattagttccttgtttgccttgagaaataaaatttctttacatgacactactgacttactgaaggtcgaatctgagagaagttatcaccagagggttctgcagattcttgatcaacttgaaagagaggtactgatgattttgtacagcatccttatcaaacttatacagaaaaggaacttgttaactatcgaaaaagaactgctttgttttggttatcctgattcagtctcttgtttctttacttttacagatggtatctgagcgccaaagaattgaaggagcacctcctccagctgttgagagttctatgccaccaccaccttcatatgaagaaattaacggtgttttcatgaggaatccaacagtcgctgaattggtggaaactgtggaattcttcttggctgaggtacccaatcatcacttcaccacaatgcacaagtttgtagcttactactacagtacttctaataagttttgtctgttgagattttattgctgatttctatgcatggtcatctttttgacaggccatccagtcttatcgtgctgagagtgaaactgagctcaacctggcagctggtgactatatagttgtccggaaggtacggccctatcttcccattggacatgtttctaaccataaacatatctttgctggacttttgtgggcaaagttggctacactaaacttgtgttcattaacctgctcaatcaggtgtcaaacaatggatgggcagaaggtgaatgcagagggaaagctggctggttcccttacgactacatcgagaaaagggaccgtgtgcttgcaagtaaagtcgcccaggtcttctaggcgttcaatgagccatacatacataaccctggtgttgtacactgtattatgatcgttcgtgatcttcaaagaccctctgatcagagaaatcacaaatattcttttgttctattattgtcattatcactaccccttttgtcaaaaccagtgcagccttttgtatgacatcttgttgcatggctagctttctgaatatttcaaaatatacagcggagaggacactgttcatatacattcattctccctaaaaaatacacccttgatagtcttttaggtatatatccgaaggacaaattaatcaatgtttcaaagtcgcaaagaccttttgttgaagaatcacagaatttaaattgagggattaaacattggtttcagctcatttcagctgtatggtgatgtgccgatctcatttttacagtttgtatatgtcttgcgtatgtatatgtcttctgaaagtctgaactaaattgaaaaaaaaacaagaaaatgttctgagctactccctccgtaccctaatataaaagattttgatattgacattttgcttgtactgtttgaacattcatcttattcaaaaaattttagaattattattttttttgacttactttattatccaaagtactttaagcataatttttcattttttatatttacacaaattttttaaataagacgagtgatcaaacagtgcaagtaaaatatcaagtccccatcggttggtaatacttgttataagctataatggcttattagcgattaaaaaatgatatgcgagtaaaacttttgtatgtatgttcgtactgattgaaaagacaaagctaagaaaaaaactatgttgaaaaagcatcaaaatcaaattcaaaatcaagttttaaaattcaaattttggttttggcttgtaagccatagggcaaacgaataaaacgatgaggccctcaaagggcctgtttggaggagttttaaattctgagaagcagctgtttggtaggcagcttcagagaatctggaaaagctctgaaacccagcttctccagcttctggcttattagttcatttttcagaatctcagaagccgtggactgtttggggcagcttctagcagaaacagtttttgaaaaaagctgcagctgagacaagcttacccaaacagggcctaatctcttaggtagtgtttggttgtaaggatgggatgggatgggatgggatgaacccacttttaggggtgtttggttgagaggtgagtgggacgggatggtccctggagaggaatattcctctcagatctgggatgaaacggtccgccaaaatcggccggaccaatccatcccacttcgacggagcccacggcgtcagctcccgtagcctcaagctcggctccgccgcagcgccgccgcctcatccgcgtcgacctccgcctccgcgaccggccgtcacctcgtccgcgaccgcctccgcgaccgaccgccgccgctcgttgtcagctcccacaccctcccgctcagctccgccgcggcaccgccacggccgcccgtccctcccccggcaccgctccttcccctggcgccgctccgtcctcctccgcctgctccctccacctcgcctcgcctccacgaccggccgccgcctcgtctgcgactgaccgccgtcgctcgtccgcgttcgcctctgcgaccggccgccgtggctcgtccgcgcctcgtcgcctccgggaccggccgccgctcgtctgcgcctcgcctcgcctcgcctccacgaccggtcgccgcctcgtccgcgaccgcctccgcgaccgaccgccgtcgctcgtccgcgcccgcctccgcctctcctccgctcgcgctgacgagctcctccgtccccattctcaccactcgctccaacctagccgctgggagcagacggacttaactgtccgtgaaacattgtccatcccatcccatctcaatcctttctaccaaacaaaaaaactataaccatcccataccataaaccaaacacacaactcgaaccatcccatcctaaaaaactgggataggtctaacccatcccacttggtccccaaaccaaacacatcttaagggacggagggagtactatacaggtcatacgtgagacgtggccctgtcaggtgggaccaaagctttgatcacatcttacactgccgggtggggtcagcatctgtcagacggtcccacgagttcttatccccttctctgcttccgcagtttgtgtgggctttgccgctgctgtcccctgcttatcccctcctcctcccgggttcgcattccgtcgaacaccatgacggcggcggcggcggcagcggcggtgaccctcctccgcctccctctcgcccgactctcctcccacctccgctccctccctccccgtcccataccgccccctcggctccgcgtctacacctcccaccgcctcctctcctccctcctagctcccagccacgtccccgccgtctcgtccctggccgaggcggtggctgcgccggatggtgagggggtcgaagtggaggaggaggagnacgaggaggaggaggcagaggcgcgccccaccaccttcgtgctgccgcggctgccgcggccgaagctgagcgtgaaggagcggaaggagctcgcgtcgtacgcgcacggcctcggcaagcggctcaagtcgcagcaggtcggcaagggcggcgtcacgccgtccgtcgtcgccgccttcaacgacaacctcgagtccaacgagctcctcaaggtgcctctcccgtttccccatcctctcgcattataaattcgtgacatgatacaacacatagtttacctacaaatacaatgagaacaaatacatcaatttcagtgtatgatataccaatggaaatgggatgcttcatcatgctgctgaatactgatatacaatgatgtcatgtgattttgtttaactgggaattaggatcactgtagggtatattcatcaatagttattaaagttaactaatgctttttatggttcgaatctgattgtaggagtagataggatgctgaattgctgataaccgcatgcttttggtttaggtagacatgcaatattcaatttaaccatgactaggttgaccttgagttttccttattattggcttgttctctttccacctcgttttgacggccctcatatttcttgttaggtaatgcaaagggtggtttacatgctagctaattctgtgaaaaaaatggtgattgcttttttccaaacaaacaaaccagcatgagctcattattacagtaccttatatgttatactagtcacagtacatgttacagatgtattttcctcctgtttgtattccttccacacaattgcgctggatacagtctttaaacttcttaattgggttgttgttttgaactttacccccatggcatatattagatatccttaacttcttttgttactataggtcatatgcacgcctcttcaaattgagaagttttctgacttctagggtcttaagtgagtaacagggatttcaggttaaacttgttctgattggtcttgtgttagtatttttggtttggctgagttgcataattgttgggcttttttctgtttgcatttggtggttttaacctatggtcagccctgccacaaatcatataggtaacacaaaaccattgttcattcggaagtcattacaacccacaggcctttttttattcaaaagtctctctttcaagaagcagcaaaatttgtgttatagtgcaagcaagcgatctgacttctaacctctgtgaatgcatatagttattaaaccaaaatactcaagtttttcataaatatggaattgacttatactgaataaactccacatctttattctggcctagccaagttgtgacagacaattgttcgaattgagaagctaagtgcctgtgtccaacacttaatttgcacacaaattttccaataaggctgtgttccatgtgtgcctgtgttccattctacgtatttcgtatgtaagagagccaataagcctgtaggatttagtgtcttgtgccttttcttgctttagtgagcccttttgttcggctttcctttctgtgatgttaagttgttcttcaacattcggcatatgttatgacagctaaaaattcatttgaactgccctggagagctgcctgacgtgatactacaacttgaggagtcaaccggatccattgctgttgaccaaattggtcgatctgtcattctatatcgtcctagcaccagtaagatgaaaaagagagaagaaagtgctaggaatagaacaagatttgtaagatctagagaaccatcagaagaacaacctagaagcagcacaagcaagagatttataaaatctggaggagcatttaggccacaacagaagagaagaccattagcatctaaggaatcgtcgtatgggcgaagatagatgccacattcaatccttcatcttgttttttttcattgtctagacttatggaaatcatgtaaactttagaccatctaatttgataatagatattagtgctgagtttttatcaaactatggtccaaccatatgctgtaaatttgtgtaggatcatttcctctttattcaaaaggaagttctaa

SEQ ID NO: 3812 - DNA, 578 bp, Oryza sativa
tcatcacgattcacctgctgtcatttgttgatcattttatgatccttgactataccctacgcttagggagtgtgtagagaagttgcaacttctgggcactcctgaagaaagagcacgcatcattaatgaagatccagaagtacatgttgacccatgtatgtctcctgattatgaatctgctgaagaattggatgttaagaaagctggtatttcatgtctctgaactctctctaactccctattctgctattgtatactgatgtgctctgcttataaacgttgatctttttgcaactttcttgttgactttgtacgcagttgattcgacaagtaggaatggatcagacctgttatttcttggaagaaaaggaatcgaaacaaactctctgcagaatcatagacaaaattgttctgccactagtcatcacacgactacaagtccacctactgagggtatgactcatggacaaggagaagagggtaacattaatttgcttttaagaaatggatgcgatattcttgaacctagcattgatttgaacaatattgcatgtgaaacagcatcgtttgcatcgtca

SEQ ID NO: 3813 - DNA, 3097 bp, Oryza sativa
  unsure (1)..(3097): unsure at all n locations
caaccgcaatgctctacccctattgcattatctccttgggatgaaacaagtgactatcaaggtgaagctgttgattctgctctatggggtgtccaagatgaccaaaacaatgaaatgtggtcattgtcttcaccaacacctactctccaaccttcaggttaatggaaatacctttttttaatcactttatttgtttgcttgataatatttaatcttgagatattctacaggtattggagctgataccaaaggtgcttcctgtgctatagaagaggtgatagtagcccaaggaaatagtggtgttgttgaaccgtcaccagcactggagaagaaaaggattgaaaaagtaccaagtgcttccatagatcgtggagtaccagagcaggtaatgctaacttaaatatttaaatactaggcaaaattcatcagcattatgcaaagagaatcctagcaacatgatgtacccaagttttaacagcagttttattttgacttgtttaggtaaaaccaaaatcagatgctgcattatctccagaagagagcagaaaaccttcaggtttgcaactatcaagcacatatctacaagggagcacaaaatcttcaggtttgccaccgtcaggcacatctctagatgggggcatagaaccttcaggtttgctaccttcaggaacttctttggagtggggtacaaaaatttcaggtgtgcaatcctcggcctcatctctagaggggagcaaaaaggcttttgttaggcaaccatcaggctcttcactagagggaaacacaaaagcgtcaggtaggcagccgtcaggttcatctatagaggggagtaagaaaccttctgataggcagccatcaggtgcatctcaagaggggaatacaaagccttcaggctggcaacaatctgtgtcgtctcttgaaggtggcacgaaaccttcaggctggaaaccttcaatttctatagacacgaatacaaaagcttcaggttggctgcgatcgagctcatctcctgatgtgggcagaaaagcttcagcatggcaatcatcaggttcttcgcctgttgcagggagctcaaaagcatcaggttggcagccatcacctcgcgagagctcgaaatctaagcctaattccacatggggtgccggccaaagccgcaactcgtcttcgcaccaatcaacaacaccaacagctaaatactcatcagaaaccccaaggagacaaggaaacaacaacacaaattctgctggctggggagactctctcggaaacaagagctggcattcaccctcaggcaatgcgagcagccgaggcagccattctagccaccaccatgaccggcacaatcagagcagcgaaccatggcgtggtggctcaaatcattccaggagatcagatcatcgtcaagaacatggcaacggtggctcgtcgagatcatcgtcgtcgagggggcaatctcaaagggggatctgtagatactacgagaatggctactgcaggaagggcacttcctgccagttcctccaccgttgaaaacgccctcacatttttgtacagccctaaatgatttctcactcactccgtagtcagcacagaagtgacctttatttaaccttctcggcaccactcagctgttagtaagtatatacatatccatcagcacaggagtatgattaagttagcattttatgcttggaaaaacagccactgatgtacggccacgactgtagatccttctctttaggtgaatgatgcattttgattgatcctgttaggtttagtggaattatgagttcacccgctttaaatctcccttgatcgcgtatgcaagaagcaaaattttgatatgtttgcactgtgttgtctcgtctccagaatttgtaattcaggcagcttgtttacctgggttactagaaatcggaagctgccgggctannnnnnnnnnnnnnnnnnnnnnnnnnnnnngacggctcgccggagcaatcctggcgtcgccgacatgggcagctccaggaacgaaacgattgtgttactgtgggttggaactaatcctccacgcaatgcaacgtaaagcgaaataatggattggtatataattaattatatgttagtaaaaaagcttttgttttaaaaaacatacttcctccgttccgttttatattttatattgtaaatcgtttctttctttctgctcaaatttctttaagtttaactaaactaggtttatatatatatataaaaatacagtagtgctttcaacccaaacaaacatattattaaaatatatttaattttagatttaatgaaacttatttaacattttagatgttgaaataaaaaacagttagattaaaagaaaaaaagaaagtcaaactggcttttggaaaagcagccgtgggttttggcttttgcaaaagtagctttggaaaagcagctacgaggaagtcaaaaacctgtttggttgatcagatgtgacttttggaaaaacttctcacttacgactggaccctgcctatcagcctcactgcattcatcctcctcctcacacggttcgcgtgggggctcgttgtcggggtgcgccggcctaggctcgtcggccagccatgaaggcagcgtgggacgagggaacaggcggcgacggggaagagcagacgcgcgtggtttggaggaggccggcgacgggagtcaggggatgcggtaggggaggagcttgccacctcgccgcaggtcgccgcctcgccgggaggagaaggggtggcgtcgggcggggtcggcataggatgaggaggagaaggtgcggcgtcgggcggggaggagcaggggcggcgccggccatagatgcgcctctccacccccactgctgcacgctagcggtgcgggaagacgcaagaggagtttatcgaatcgtttttttataatggtagaggtgggaaattttttctctcaaaagccagtgaaaacaggggtagaggctgcttttggatttgtactacactaaaagcagctttggagaaaaacacttacttcctccgtcccaaaatgtaagcatttttgaggttggcacgggtattaagaaagtaggtgagaatgattgaagaaa

SEQ ID NO: 3814 - DNA, 1328 bp, Oryza sativa
cgccgtcgcgcggctcgcccacggcttcaactggtcgctccccgacgggatgaagccgtccgagctcgacatgtccgacatcttcggcctcaccgcgccgcgcgccacccgcctctccgccgtcgccacgccccggctcacctgccccttgtactgacggcggccggcgaccgcggcggcgtacggcaagaatggtttgcaggtgatggtgttaaaagttcagacgcgtgtggcgccattggaggagcttggtgtggctagcttagcttcctctgggcctttttttttttgctggtttaattttcttttttttttctcctttgtaatttaatccatgtctccagaacaataagtggattagtagggtataattaagggtgacagtgtgatatatagactataagatcaaagttgtaaatttggtgtccggtgtgcctgtccacataagcacagcctctgaattttcttgtaaaactttgtcatgaaaattgagaaagaaaacacctcgctttccacgcgtacgcttaccaaactattaaatggtgtgtttttttaaaaaaaaattctatggaaaagttgcttcaaaaataatattaattcatttttaaaatttaaaatagttaatactcacctaatcatacgcgctaatgacatacctcgttttgtgtatctttttttttcctctcctctcaaactatcgggttgctatatgttattaaaacgggaaaaaaaaggcaaactccgaatgtttgttgtgaatttacatttctactaaaaatttaggaccgcatgagttgtgatgtagtggcctgagatgtgaatggggagagatcgtacagggccaaatatttccccagcggctgtacagaaagaccacctatacaacttttctcaatgtagtaatattatactccctccgtttctaaatatttaacaccattaactttttagcacatgtttaaccgttcgtcttatttaaaaattttttgtgaaatatgtaaaactatatgtatacatatgagtatatacttatatttaacaataaatcaaatgatatgaaaataattaataattacttaaattttttaataagatgaacggtcaaacatatttaaaaggtcaacggcgttaaatatgtagaaacggagagagtaattttcttaggcatcctaccagcattagtagttagagcacccgcaatggtaaagtaaggtgctatctataaaatatgtacatctcagcaatagactaaattaatagtaaaacacctcaatagtatgtctacataggtatctatagctctctaatcaattgagggctgcaggaat

SEQ ID NO: 3815 - DNA, 3706 bp, Oryza sativa
tataaagaatcctataggagttaaaagttccactcaacaaagttttcatgtgttttttcttaaataaaagtgatcctaataaaaaataatcttgctaaaaggaattgaggagggacatgcaatgatattctcgcaacgagtaagagacaattcaacatttgtttttttattatcgtatcgctcgttttgcctggctatatgttttccttgctttcactatccccctatccaagacgccaaatttttttttaattggttcagggagtacctagacacatgaaaaactgatttaatttgatactaatgcattatgctaatcaatctggggttaccaaaataaaaaaatctagctcaaaataaaatattaatatgcgatgttaccatagtaggagtaaaatactatgcacagcaatgttacatttttagaattggtagccaacgagatctcttttttcacaataggtggcacagtacatattggccaacttgttagaatccttgttctctttttagcttatcagtttatttcccttttgaagggtaattggggtttgtcttgccacctattgtgtttttgttacattaaaaacttgtttcctatgcttacggcagagtttggactttggagatgtaaaatatttttattacctaaaatggcacgatgataactagtggctgcacgacagctacagctacagtgccagcaaagaaattgtacagcatctacgtagctacagcctaactactcctatacaggaaaaacaatatgaatgaatgatgttttcggaagaaaacaatggccagagaaaataccatttataatgataactgctgaatttgacattggtaattgtatataaacaaagtaactaaagatgactggataattcaaaaaatgtaaataaagaaaaggaaaaaaacccaattagcattttctcaaatattctggaggacaatgatatatattttcagaatttcctttcaagatagaagatacttcgagagtgaagaaccaaagtttctctaaattaaggaagatctctctggcaagaggctaacagcgtcggcatctcgtaactgattgaacacataacaaagtttcaacctcatggttagccggccagtgattagtaaatttcaggtttggtgcacttttcagttttggatatacttgaagatgctgcaaactgctttagtttatcggtgaaccaccatgatggctttggaaactgaaaagcattggggggtagttttaacctgaaagttttttggtagagggtacaaaaatatatagttcaaatccaagcacatatttaaacaattttcttccttttagggtgaactagttatatattacaactggatagtccatttgtaaatatagtactagtgtgttgtcgcagaacttgttacaattgtatagtcctttagttttttgtactaatgtcatattggcaacacatattccttgttgagttggtactacctgcatcagcaccttaatctttcctagtttgctctgctaatgatgaacaatgttatcaccaagttagagcagttacgtaactatagagtatttgttgtacaaatttcttagcctacttgccactaataatataatggcaatatattcactcttctttacgagaatacatccatcaaaatcagatatgatctttgtattatcaataaattgtttatctatggggtccatgaatatgtgattgtggcttaggtcgtgttcgattcagccgtctggcagtattattgtttgtaattagtattatctattataaacttaaaaataaatatacttaattttaagaaatttttatataaaattttttacacgaaatgtaccatttaacaattttaaaaagtgtacttactttatgagaaatgagtaataaagctcatccgagaatccaaaaagaacgaaccttaattaggccttgtttgtttcctattgagtttttgtcttcaacttaaagccaacgaaagcttaaggttctcgaaacgaaattgtagcttctctacttctggaagaggctaaaagccaaaatggaggttacaaatgtatctatcagctgtgatcgggcccacatccatacatttctttaaagaaaaagaagaaagagaaaaaactctgtagctagtttttttttttattttttgaacttttaaattttaaaaataaacccttataaaacttgttttcaagatctgaacattttcgtcacgttagccaaactgacttggcaaaacaacattgtcacgatggtttggctgacgtggcagcattatttagtcacgccggtctggctggtatgacaatgttatttgaccactccgccctcgatgacgtagcagaataaaattgtcatgcccattatgtgcgacgtgccagtgttgttttgccacgcaagacagacgggtgttgctaaaagtttcagattctggaaaaaaagttttggcaaggttaatttttaaaattaaaaaataaaagttcaaaaaaaaattgtagctagtatggaaggtgctgagaaagcaactgaatgcaattttccaaaatggaatagttatggatttggcggatacaatgaaaataagttgaaagtgaacatttgtatttgttttcttgatccatcctttaaccgtatatggtgatgtaaacagctagtcttaagaaaactgaaaaatatatggtgatgactgatgaataccaaatgctaatcgtgtacggtcgtttaagcatgtgcactaaatatacaaaaaggaaatgtatctgttcaacatcttggattagactaagcattcatggatcttcagcccaactgtagtattgattactatttgatatgaacaattccagacctcgtgttggacaagttcaccctgttactttggccggctaattgccagtttgccaattgccaccacttgctcagtcagttgtgttactcagctgtgctaacgtaatttccatgctattggcaaacctaatttgctgcaagatatggaagtgtcaataaaaatatattacttttaatagtaacgaaaatataataagagttatgatataggatacttcatatatctaaaaatatactaaattctaacgatgtatttggatatatttatctaaatactagtcagaagttactatattttgagatgtggatatataggtgtcatgaaaaatgattgaaggagaaccttttcgtgatatactgggacccactgcctaaaaatatagaggaaaaaaaaacgaaaatgcatgtatctatggaaatttgagatcctatactagtcttaaaccagatataaaaatatcattcctcacctactcctcccaactctatataaaccctggatcatcctaactttctcctcagctctacaccaagagcgcttataaacataaaaaacatctcaaacacaacccaaaatagggccaaaattctagaatattatttttgttttgaaaggaatttaagtttgtgtggtgtgtcatccatggcggacatggtgaagttcaccatggagtggcttcaggatcctctgagcctggcgatcgtcgtcacggtggccgtcctaatcatgcggatgcagcggcggcgcgcggcgccgttcccgccggggccgaagccgctgccgatcgtcggcaacatggcgatgatggaccagctgacgcaccgcggcctgg

SEQ ID NO: 3816 - DNA, 3252 bp, Oryza sativa
gaacatggcgttcgcgcactacgggcccttctggcgccagatgagaaagctgtgcgtggtgaagctcttcagccggcgccgcgccgagacgtggctcgccgtgcgcgacgagtccgcggcgctcgtgcgcgccgtggcggcgtcgcgcggcgaggccgccgtcaacctcggcgagctcatcttcaacctcaccaagaacgtcatcttccgcgccgcgttcggcacgcgcgacggcgaggggcacgacgagttcatcgccatcctccaggagttctccaagctgttcggcgcgttcaacatcggcgacttcatcccctggctcagctgggcggacaccaacggcatcaacgcccgcctcgtcgcggcgcgcaccgcgctcgacaggttcatcgacaagatcatcgacgagcacatggagcgcggcaagaaccccgacgacgccgacgccgacatggtcgacgacatgctcgcgttcctcgccgaggccaagccgcacgccggcaaggccgccgccgccgccgccggcgccggcgacggggccgacgacctgcagaacacgctccgcctcacccgcgacaacatcaaggccatcatcatggtacgtgcagttgacaacctactagtaattaattactgccaaatttttcaccaacttaatctctctatcacggtaatgattaattaccacttactcctcccggccgatcaagataaaacccgatcgaaattaggcaacaccaaatccgtaaaattactggaattaatgattcaccgatttagagcaagtttgatagtatagccaactattaactctaaatcatctatagcaaatataatagctaatttatacaatagttacttactatactattaatatctggtcccacctgtcatacacacattacgtcttagagttcgtgctgcagctggctatagattttgtagcccgctgctcttttctctcttgctttatctttttaaaatatatttatagttggcttacttatagcctgctattgtaactactcttacacagcacagcagtatggagtagtaatatatatcttaaactctgacaattaaacatgataaattcatctgacgcaaacacaactgtacgctataaatacgcgtacaaatcagcaacagtagtgtacggggccggattattagtcaggtaatatatcattttattttaggcgattaagtcaggcaaattatcttgatccgtgtagattatttgacagggcagagatctctcctggtatagttgacatgaacaccatgtgcagtccatgtgtgtgttcgcctcgtttgcaggtgaatcgatatgatcaaccgttagatggcgccacgtatgcatcatggatcatagattaagccctgcaaattaaagccactcaatgaaatgctagatttgaggagtaattaattttagtgtagaatacagtggtcctccttgatgcatccctcgcaatgtatctgcacttctacaggcagtcaactcacttacataagcattgtcgactgttcccgaggagatcgacaccgtcagatacggcattaacctatgattatttatacccatatttcaatatacgggtagtaaaatattccgagaattttatggagtagcacgtactcggaggaagtagtaaaaatagctttgtacttatccctccgttgtataaaatatccaatccttaccatgtacttcctccgtaaagtcgttttgaacaacgatacggtctccaaaatacaactttgatttcttgtttctataaaaatatctattaaaaagtaatatatgtatacttttatgaaaatatttttcaagacaaatctattcatataatttttacattttcaaactcaacaacttaagagttattcatgatttatattcctaagatttgacttaaaaacagtcctaaacgacttcctttacaagcacagagggagtacccggatatatacgtgtctagttacgtggctagaaattgtctctctctttttcttttttttcttttttgatatagtagtatatcggatacagctagaagtaactatagtgttagccttttttagcgaataaaggtagaagctaatctttaaccacgttctggtaggatgacagctctaattttatttcacatcttttagatgtggatgttttcagcgtgtaatatatatctcctttttcaaaaaaaaaacctatattttaaacgaacttatataggaattttcagtggtagactgaataagtgttttgacttgctggtagaacgactggatatttgcacacacgaataatcttacagtcgcttggcgcaacagccaacctagcttgaggctcaaattaaagtcagagcacgagcctgaccaacgccggccggcggcgggtcttctccggcgccggcggccggtgatcgatttcatttccaggcttattctccgcgtatgcatgatgtgtcaagctactgagctatagctagccgtctctctcgtgtacgagtctcttaccactcttggctagcaaatctgacgactctttgactgaacgaacaactcgtacgtcttaaaagccaagaaaacaaccccggtaggctgtaggtgtgttcaaggggtattttgatttggtacctatatattcttgtctttatcaattaattcgtttgtaataaattgtacttacatgttaactatttgaattagacctaaagtataccaaatcaatagagtggtgtcaaacaggcactaccaaataaaaaaaatgcctactagcaatttttattagggtttgaaaccatacaaatcctaagttatctttgtgatactattgtcgtcggcctcacccatggtttgcatatggttgaatatatctgggattttttttcacttaaacggacatctccttgttattattttaaaaaaaattgacaataaagaatattatgtaatatttcaatctaaaaatatataagtttaaatttaacttttaaaatatattaaaaataataaatattattttgaatgtctgtatactagctatagtttaatttgtttttttaataacttgtggaagttaaacttagcattattcgtgtgcgaagtgatatatatcatattaatttattttatagaaaaagaatttttttataactgtttgagtggcctaagaaaaataatggaacatcctctcgaggaataaaaattcatctccaatatatttactgtgttgatctttcgctg

SEQ ID NO: 3817 - DNA, 7706 bp, Oryza sativa
  unsure (1)..(7706): unsure at all n locations
taatgtgctcaaggctatagtttcaagcagttggaatctatagaactaccataccttcctggtagactcccacagctcctccttatctgaaactggtgcacctatcatcacagctctttcaacgagtccctctattcacaatgaaaggtcagccaaacaagctataaataaagtttcatatatgcacatagttaagaggtaccattatttcccaacaaagctagttcctccaaacacttgaagacaacacgtgcccctagggaaaacccgatgagagtgacaggcctagaaatcccagtaaaaaattagttccattgagaaatgaagtctactggattgtacattctaggcagagaattacctgcttccttgcaatcctctgagcagcacttcagcaagcattttcccagtcttatctgccctggaaacatctactcaattaatttcttgtgcgctcatgtaattttggaaaggataaaaaaagattaatgcatacattacagctttaagtttgttgcattttttcgtttttatcattgctcattagtttctttttcgcgaacgcattgctcattagtttcaagataattgtattctctgttctgttttcagcttttgtacaactaatgaaaaaaaagagaccagttttgtacagaaaagggaaaaatgcatcagcattagtttatgtaatgagagttcattatgtcacctgtcaatagcaatggaccatttactatcgataaaatctgcagcagataccaagtaagccggccatgcaaacgcagaaacaataccacttaacacagtttgcattgcaccttccctcatcaactcaattgcaaatcctacatcattaaccaacaaccggacaattttatgttgagtaatcagtaaagtatgaaagaaagaaataaacgcaaacactgtacacgtcgaacgccaaaattacttgatgccagccaatcgcgtattgctgtactgacgccaattatatgcttagactcccattgcagaatgtacctgccaattacaagtttcttgtacttaagcaaggcaaacatgttctagaaaatgcaacgatattgatagggacaacagctgcatgaatcttacctgtattcatctcatgtgaatattttggtttctaaacagaatgcaataggactatcatggctatgttaataccaaagtacttgcaaactacaaagagaactttttttttgaaaaagtatttcgtgtgaatgtcttttggggggttgtacctctctaagtttgtcttccatccttcccatggcttcatataatcttcctcggtaaaggcaaatccagtgaccaagatggcaactgctagccgctgaaatgtcaatcctattaagtgtcatccactcgaaaaagttttatcgaagactagggataacatctttgctttatgctctctgaacctttccaacatcgaatcaaaataacacaagagaacaaaaactcacaccctggttatggttctcgccgatagtgttgaactcaaattctctcacacaaccaattcttttggccattttggtcccagtcaacccagctccagcagctgattttcaagttaagatgctggttagttacagatcctgataaaagattcctgctgggttcagaaataaacacctccaaataaggaatagtatcaccaaattaatattcaaaaaccatctacgctcacctccgaatgatgcagcaaccgctacagagcctgcagtatgtccagcagcagtagctatagcagcaaacccactagctcctattaaagggataagtgtgtgcaatgttggaaccagagcagtgaatcctgcagcaattgctggagcagctaaacctgaaagttcagacgaaattattcagttacagaacttatcttgatctgacatttcataagttcatccaaatttctttcaggtcatatacccccggagatggccatcagcgttcctcccgtcaaggcggctgcgccgatgattcctccacgcttccagttctcccatctgcttcttggtgactcgcttccttctgactgttcttcctctctcgctgcagccatagcagagcaagcaaccattatctcgatagcttcctacaatgccaaaacgttcgattacaaaaacatatagtttgtgtccatgacaaaactggtagagagatcactgttcttagcgtgtgcatttacatgtacaactaggctttctttctatcctaatttcacatggacgagaatgctgtgctgttatccaaaaaaaaaagagaatgctgtgctaaatgtaccctgtcatgtgttctagacttctagcattttcatgaaaaaactaatctagtgatcacagataatgagactactggacactatggtcataaaacatttgatgcttaggacaagttagtcaaacttcttttgaaactttgaccatgaataattcctcgaaattcctagttaaaaaatggtgtaagcaaatttcccttgaatagtaatatcgtaacattgaaacttattgtattttataaactcattctaacaaaaaaattatatggtcatagttttacaagtttagaatcttgtcctaaacatcaaatcaaatactccatccgtcctaaaatataaataattttggctggttgtgacacattctagtagtacgaatctggacatagatgtgtcctatcctactccaataccttatattttgggacggatggactacctatgatcagagggagtgttagtgatcttatcttgtaagaaaagcaatggaatctctggacaaatcttaccatcttgatccacttgacgtcgagccatgtcgcgagcagccggagcgcgacgcggtggcgggcgtcgtagcccctcctgatgcgaggcgagcccatgccttcctccgccatgttcacgtcggcgacgcacgccgagaggagcatgtacagcaccgccatcttccggtaatccttggtgcggctgccgccggccgacgacgccgacgccagccacggccacccttcgtcgccgtcccccccggagccggtggccttgatcagctcgtcggccgcgactacgtcgttctccagccccatcgccatcgcctcgacggccttggcgagcgcgagctcctgctccgacctctccgccgccgccgcctcgccgtcgtcctcgtcctcgaacaccttccggagaaactgagaaggaaaaaaaaagtatgtcacgattgaatcgccatggaaatggttttacattggagattgcattggggcgcgtacggctccgatgtggtgcttgggctcggaggtggcggccgtcgtctccacgcccggccatgccttgtggtcgatctcgagaaacctgagagaaattcatcaatcaatggcgatccatcgatcgatttgatggggtttggagatggatacctgaggacggggcggaggaggccgtgggagtcgtgggtccagaggtggcgggcgtcgacggggtcggcgagagaggggactgcggcagcggcggccggggcgtcgtcgaggccgtgggatccgagcaggacggactggtggatctgcgcctggcggagcgcgagcgccaggagcgcccccgccgcgtaccgctgcgtctggctcagcgtcgacgacgtcgccattgccgcgatcggatggcttggctgaggctcgccggtgggcgtgggcgcgggcgcgaagccgatcgaggaatcggtgccactggcttagccgcggcgcgcgcgcggaggcgaggcgagggcgaggcgcgtgcgccgtgcggggcgtgtggcgcgtgtggcgcggtgggaatggctgcctggctcgatcggcgccaccccgtcgcgcgcgcggcgcggcatgtcgctcgcgcatggcggggcgcctcgcgaggtgcaagtggtgttcgcgtcctcgcgagcggatggcccagagacatttggatgggcctcaatcacggcccgtttacgtgtagccatacacttggatgggccgagattgaggcctagctaacgaggccgtaatgtgagatatttggaataagtttacctaccgtctctcaattttacatgagtatgtaggccatccctatcccaatatcaaaaatgtctaccctcaaatggtcaaagccatgcaaataggtctcatggcagtatatatgggtggctagtggttacagcgaatgagcatgtgtatatccaaggtaaagggcaagagactctgtcaattcatccaatgagtaagcaggacagttaagttagaaatcctttaagtccctcttgaatttaagtaaactccgaaggactcccagactagctccgcagtacgagccccatacggagccgcgcccttgtgatatgataagaagaaaaggggccaggccgccctcttttcttttccgcaccaagccttctcttcttgtaaaatcgggtgtannnnnnnnnnnnnnnnnnnnnnnnnnnnnnnnnnnnnnnnnnnnnnnnnnnnnnnnnacgtgacatcctagttagcaaggagggaataaaaaaaatttgtggaagcccacatgacatacttactcctccctctactctatccaacgtttgcctagaccatggtctggaccgtctagaccccgtctagacgcaagaccgtacataggtttttgtcttgtttagggcctaaacactattttcttgtctagatggtcaaagactgtctagtccaagtaattagaccatgctgagccaagtctagaccgaaacaatgatacctagaccatggatggacccaaaacatttggtgggtaggagttcaaattttctggcctaccaaggccaagatgatttaaatttgaagctaattgaagattcattattgcaaaacaaggtaaaccttaaatctcatcttttcttgctctcaaatgttctattgaacttttgacttgttgagtgaatttacatatatagcaacaaaatatgctggtagcataatatatggtatacactctagattgagagttaccgtccatctagcatctagcgtctaggtgaacactgactctatctcctctctctctctctccccccctctccagtagcgcaggcgggcggtgtcgggcaaagcgacagcgcacgaaacaggccaatggggcggagttgataataataataataataataataataataataataataataataataataataataaacacaaaccacaccacgtgccaataacataaaaatccaccgcaaaaaagaagcaaacacagtaacgtaacatcgtattctgactacactttgtcaatgcactatcaagtgtatcttaagatggatccgttaaaaccacataccttttgtcattgcactatcaagtacatcttaaggtggatccgttacgtagggcactcactgtactcttttttttgaagaaacactcactgcactctagcatcaaatcaaattaaagttccaaactatgatacagttccatgcatgcataccatgccaaatcaaactggacactttgcgcattcttcttcacatgcacatgaacacaacacagctatacgctatttggctgatagctggtctctcactctgaagaatatcagaacactaccacgaattgttcatgtcctggctagctttttgccgatggcttggcgatcgccatcaggcttatcatatcatgctatgatacgtagcttcaattttcgcccacctttccgacggtttgacgcggcccgtgtggatcgatcgccagcagatctcgccggccgatcgggcgccgtcgtcacgcctgaaaaaaaggcgacgagaagatggcagagaacgcatcgatctctgacgactaaatcccgaatattttcaagctcaaaagcgacctgtgtgatcctgaattcttcctgcgttgctcgcacggtagaattatattgtgccgtgcagcgacagagaaaacttgaaagaaaaatgatcgcaggcgttacatcagtgcgtgtcacgtcgggtttggtgcgatgctgtttggtacagtggcgaatctacgaaatttttatgagtcgagcctaacaataaattatatagtatacccaatttggtataggtcaatagattattttgggttgagttgagcatttactttgttggtttgtttaattaagtatgtacactataccattgcttctgctagtgactaaataattaggatgattaacaatagcaaagtaattagaattaatttactgaggcatggctctgcttctgccgctggtttggtagggtcgatgatcaaacagatcaaccgtatcgaaaacgttgagacgttgctacatacacacgatgaaaatccgaggcccacgatccatgagaaagtgacactgcgagaaaatcaataatttaattaagccatgttgctgaatttctcttaattttctcaggatttttcagcgccatctgaaattagatgcaattgatgatgaggacaagcgcacttgagctgtaaaactgacttttgattcaaatccgtacgcgttaaatccacgtcgtcggagaatggcgagaacgacaaaacacaacgcaccgaggacgccgacgccgtcgccgtcgccgccgccgccgccgccgccttttactgtcgataatatcgtctcgtcggcgtggaggtggagccggggccgcgcgctggccggtgcaggtgacgaccaagcctgccgtccattttgtgctcatgcctcacctcacgcagcccagctaatatgggtctgtttggttgcctgtaccaggcttggctcgtaccagaccatgcagatttggtatgtttggtttcctgcactggcccgtgatacaggatgaggcgatgcaaagagccgaagattgcctccgagccgggccgagcagaaacgcaggaatcgagcttcccaacttagcctggcttgacggatgcagtggcgctgcacccacgcaatagtgcatattgcacccgcgtgtgcaagggggagggggctagtcacctccccctcctcattttgcccgcgtaaagccacatggattgtataacggcaaataaccctgaatattaatgtgttataaagtaaaacaaaatcatcctattgatcattttaattttgatctaacaaagttatgagttgtttcatagtcaggtttttttaactgttatataatatattttattattttgatgcgatactaagctcatgattaatggtgtggcttagagttcctataccttccgtgggaaggttagtaccacctcacattagggcgataattgtaatgtgtgaattttatctctgtaatttgaaatcaagatttccaaatcttacggtaagatcgtggttaccaccgttaggtcgtgataactgtgctgtgaccatgatctttgacttgaaaaaagagagagaagaaaaccactatcatacattgtgaacaatagaaataccatatatgatatccacaactataataattaattatagtgtccacaagcatcaaacctttattacgaagcaaactctccttttagtcgtgccaaaatatggagttagctttgcattttttcacaaaatcaaatttatcactagatatcattattacaaatgctgtactacttctaggaaatttttaatttttccccctttttctccaaaatctaaattcatacaaattctaccaaac

SEQ ID NO: 3818 - DNA, 1199 bp, Oryza sativa
tgtcttgctaattgcatattagtaacagggaaaacaaattctgataaataccttcaccggcagcaataaaagaaagagcatgccctggagataaaacaacttcttcttttatgccttctacatatgttccctagagcaaaaaggaagcaattcgtaagctcacaaataaaagagccacagaagtagatatcccgtagaaaaagctatatgtgcatataacttagctagaacactatgtgaacaaggaaaagcctagcaaagttagatatgaaaatattatgacacgcacaatgaatataaattacaaaatgattaaaaacttttcatgttcatcaatgtctgaaccaaatggcactccacaaaaaacaggccacattttgactttaacgaattcattacaaaatgagaatcgcacaaactgtttccacgcatcaaaataggagtgaatttatatttcagtacacactacacaacaatcaaatcctctgttctgatatcatagagatctaaatattccgttagaagtttagaacttttaaaagaaccattgtgccatgataaaacaaacaaggtctgaaggaaggtagtttgtctgctacagcattatctatatcaacagaagagaagtttacttgcctaaaaaggacaattagatgtaacagttgaaagcaaaagaagggatctcaaggggggtatgcaaacaaataaattagagcaccgatattatatagaagtacatgccaacatgataaccaatgctgtagaggattaacctgtgcatcttccctcacacgcagattttggccagtaggatcaagtagatcatttatcacctgcaatgagagagaaattaaatccattgagatgaatgtacataactacatatagaatacaactaaatctaacaaacctcaaaatttgacaagacctcttaaataaatgtggcactgcccatagtcataggtatcacttggacagtatttacactataggattggaaatatgaaggctaggcagtaactaactgcaaagctggaaacagaagaatatagccagcagaaatggttgtggattacaagggcaatggtgcagccagtaaattctatatgtatatatgagaacaattttatgcacaatctgggtaggtcatcaaccaatcctttggtgaaggcatgaagggcaagttcaaaaataactga

SEQ ID NO: 3819 - DNA, 2519 bp, Oryza sativa
attcctgcagccttaatatgtgaatgtcagtactgcaagtctgaaacatctcagaagttaaaacactaaatgaaatgatatggacaacagcaacaaacattgtacaaggaaaggtaatttgttcaatatgatatggtagagaacagtttggaatgaagtgtgtgccatcatggtgataatatattacaatatgaccatagagtaactctcgaacaataattgtcctccatcagatataaataaatggaaaactcatgaaacaatgtgtcggacaatctaaataaggataggtgacataccatttataccctccatggcacctttaacaacaggccgggcagcaacatcatatacagcctcagtagttgttttaggaccaaaaactctatctgaaaagaaacagcagtaaaaaaatgattggttattaagtagaaaccagatgataccatagagaacagcatcacaaaatgtgatattgttcttaatatgaacattgaaggtttgcattgatttcagtcaagttgattgaccatgaccagaaacataattacagtcgccagaaagcacagaacaaatgcttaataactggttgagggagtaggccatgaaacttcttgaatgaaaacattgatgtcaatttcattaatcttatagcataccaaataattgcaatcgggaactagcagtcttctgaaagacgaccacagtacaagcagcatgaaaaggcaacaaggcaatgaaacctcacgggcagtgttttagattttagctggctatcaacttcacagtaaaagctgactcttaaaatgtcgcgaaaatgcaaaacgaagaactgcattttcaattttcaattaatcatcaagccttgtcccagcgctgatgcatttatgcctatccaaaatcctaagcctctccttagtgatttcagcattgtgcgacttatcccataaatctgcggctgtgaacatccgacattggctgaacccatgaattcaatcccaagccccaaaattacagaaagctcaaatgtactattcaaatcaccacattgccaaattaaccgcacaagcaactgaagcatagtacttaccgtaaccataagccgtcgccgggttgtactcgcagcgcacaagccgttccccatcagcataccacgagatctcgtcgccgcgctggatctcccgctcgctgcagccacgcccaaatccagctcaaatcagtcgaaatactcacaaccacgccccgcaaacagatccgcgcagctcacactcccagatccccctcacctgagcggccggaagcggatggtgacggatatgctgtccccggatcgggaggtgtcctcgatgacgagctcctccgcgctggggaacggcacgggcgacggcggcgacggaaccggccccaccaaggaggaggaggagctccccctccgccccggggtggtggacctcgagcctcccccgctcccacccccgccgccgaagaaatgggaggatgaggacacggacgacgccgtggagtacgaccgcggcatgaggcggcccgtgaggtacgagccggcggaggacgacgacgaggtcggaggccgcctgctccccgccgagaacggcgagctgctccgcctcgacgacgccgacgacgacggcctcgacgacatcccgcacggaaaccgaagcttccctccccccacctcccccccgcaaggcgacgctgcgcggcgcgacgcggcgcggcgggggagctcgacggcgagagcgcgcggaggcggaggcgagacgcggcggaagaggggaaggtatcggaaggtcagaggcttcacatggccttgctccaaaagaggcgagaggccacggcgttgcgagtttttaaagcgagacgccaacgcgacgcagagggaggtaggaggcgactgtactacacgtgtcagcctccgcggcgctgacgcgcggggcccacggtgcacgggcccacctaccagtgacggcggtggggctcggtaatttgaaatgcgtggacaggttgcgggtggtgggcgggaataactgcgaggaggggtgtttatttattttcggggaggggtaaaaagtgaaaagcggagaagcgtagggggcgaggtgaaaaaaataccccaaaaaagggcaggtggtgtgccggtgcggtggcgcaccagcttttgattggtttattgcacttttcccaacccgttggtttgttgtttgttgttgttttcgatgtgatttgaaattagaatttgaaatttttcgtgataatgaccggcgctcggatgtggtctggtctctgttttcaaatgggaggatgagaagttgacaggggacgctcttaacaagatggaaagtacagtttaaatcaagcgtttgtctgtttcttataacttgtacttcctccgtcgcatttcaagcataaccataatttttcgtatttaactttgattgtccgtctaattttaatttttttttataattagtatttatgttgttattagatgacaaaacata

SEQ ID NO: 3820 - DNA, 11780 bp, Oryza sativa
atcaaatatttggacacatgcatagtgcattagatgtggagaaaaaaaaccaatggcacagtttacatgtaaatcgcgagatgaatcttttaaacctaattacgccatgatttgataatgtgctgctgcattaaatatttgctaatgatggattaattgggcttaatagatttgtctcgcagtttacaggcggaatctataatttgttttgttattagtctatgtttaataattcaaatgtatatccgtatacttaaaaaataaatttggcacacgaactaaacacaacctcggtttatataagcagttgagccaccaccttataacttagtagttgtctgtggaacatatcaaatactcccttcgtccaaaaaaaaataatcaagggtttgaacttggacacacactgtaaatcagatcaaacaacacacaaaaattacatgtctctatcacaatgttccatagcaacacacatttccaccacaaattcacagaaaattatctatttaataaaattggcagcttaccggttcgttaaaaaaaacaaattcacggaaaaaggtgaagaagatgggtcaaagaccaacaataaaagagctcgcctgcattagctcacaatcgtcaagctcatcattggtcccgtcctctcccacctcgatcaacttctatcttggcgacttagcatggtgcggtggtggtagggcaagcaactcccaagattcgtcgctcctgagtttgcggaagtcgtcactacttgtcgagcctcaccgatggcagatccttggggatctgggcctcgacaaagtggctgacgcggcccttggccgtgacggggacggtaacaacatccttgatgccccaaaacactagcgggcagaaaccaatacatatacccatgtcccgcgtgtatgggtaacccagtgggctaagtaacatatgaataatatctatatggacaaataattaaaagtctttaacactgctagcaaagttcacaacaattgttaataatagcaggttttagagatctacgggatcttccattgtcatcacaagtagagttcttttatagccgttagtaccaccccaaaaaaaaaagaaacatacatatgggaaatatctttttttttttaagaaatacgttccgagacattttgatgtttttaaggaaacatttgacagcatccatcaaacggttacacttcacgtgcatagtctttaaaaaaaaagggaaactagtacacaaaacagaggtcacagtaaaccgtacagtaaaccatatcgcatttgtgatccgtcctgaaagacgggacagcaccaaatgccgggcggccggtgcagatcggaatccccaagttaggaggatggtgacgatgtcaaggcacaacgcgatgacagcaacgagtggacgaagagggatcaggcccagctggggcagctggtgagtcgatcgatccgcccctttctactgttcggggcgcgcgctgcacgagagccacaatacacgagatggaggaggaggaggagcacgtggtctcggccacctgatcacgctcgcgtccacggatcgttcggtggcgaaggcgatggaacggtagtagatgtagaactagcctggaccgtgcgtgtatactgcccgcttttggtctttgcgtgcagcgcccaacaatcgcgctgttgcgactcgcgaatgaggaatatatacgtcgctcccaaactggttctcgtggtgaaaacgttttctgaacgttcacggaactggatgagacctttttttttaattgctaaatcacatctgacatacattttgagccaaaaaatttacagactttcaacttcaagatctgtttcactattagtgctctgatgagcctacgtcctctcctccagcgctgatgacccttttcctttagctttgatgaccatggcgatcggtagcggagtgggagggtgcggagaggagggttggccagttggtcatgggaggcgttagaacgggcgggcggcgccaccttcgaagctgtggggttggtaaccggcggtgagctaatgatgtaacggtaacagtagggattgcaattgactagttataatataaggacggtggctgtgtttctccaacaatatgggaagatggtggggtgggacactcgccgcctttagcttggggaggaggaggagggaagaggttgattgagtgggcctcattggtgatgtcttttgatgcgggcaaggccaggcagtggaggaggcaaccaagcgaccttgcgctcgctcacatgcatatgggagaagtggagtaaaatgataggttgcttcgtgcacggttcaaaaattttgagagtggggttttcttattacatatataggtggtatttttctcttttaaggcttccaacctcgtttacagcagagttttagatgagatcctgatcgaagcacacgtttacagcctatggctggtgaattatgaaggagtgaaatgtacccaccatctagggagtgaaatctctcacccatgtactttgcttctaaatatttatacgaataaacgggccttaaaaaagaacttctgcttgtaatacaacgtttccatagctaaagtggccgtgaaacattttgtgcatgaacaatctaattttccagaaacgcataaaaagtttaggtttgtagatctgaagagcaaaactgaaaacttattatttattcgagtgggaaaagtccattttacaccctcgaactcttatgcttgtttaaaatacacccccgaactacaaaaccgggtataatacactcttgaattgtcaatatcggacacttaaccccccgggctgtttttaccgtggtttttgccacgtcagccctcgccacgtcaggacacaaggtaatatgggccaagcccatactctgttcgttcttctctccctccctgttcgttcttctcttcctcacgaccactggcggcagcggcacggatctgcgaggccggcgatggctgcggcggcggtgcggagctgttgcgagggcggcggtgctgcgaaggttgaatatgaaaacattttatgtttttgtaaatggaacctgatagattgaaaaaaaaaagagagtagaagaatgcatcactttaagcatttgatgtatttcctttgttcctcgaaatttgcagagaggaatcggccactaaactatcctgcttagccacaagaagatcggccctcttatggcacagcacacacatgcaaacaaccatcatcaatcgtctcaaacacaatcaatcttacaaagcacgataaaaaattcctgtccttccacagatcaacagcgggcaccgcctttcctctcagatcgaacacctccaccccctgcaccccctgcagagatttcgcgagctcttccaccggcgccgcagctgcctccccggtcgtccctacaaatatcatcgcacatatcaacggttcagcaccatgcacgcgaggggaaggaggagcggggcctggaggcttaccgacggcctcgggctttgcggctgctactggcgcaatagagaagcaaaggcggcgcgggtggaggagggacccgcactggcccctcgcgcggaggagactcaacaccgtagccggtcgcgagctggtagtggccacgtgtggaacggggagccgccgccgcagctccgtcctcacagccgtcaccgccctcgcagcagctccgcgctgctgccgctagcggacgtgaggaagaggaacgaacaggggagggagagaagaatgaacagagtatgggcttggcccatattaccttgtgtgttgacatggtgagggctgacgtggcaaaaaccacggtaaaaacagcccggggggggggttaagtgtccggtattgacagttcgagggtgtattatacccggttttgtagttcggaggtgtattttagacacgcataagagttcaagggtgtaaaatagacttttccctattcgagtagatgttgaatggaatttcattagcgacgagtaaagcatttcatcagttccattggatttgtcaccatccatttgtcagcaaggacggcccactacaacgcaaaaccagtgctggaaagcccagaatacacaggcagagatgccgggtagccattacgacccatttaaatggatttggactcctaatttgggaggtcgttgagtactttgaattagactccgagcccctgtattttcacgaattaaatttgaaaatatattcttcgttcttttttctctctgaaatattcttgatgcggtttttttgtcacaaatatatcttcgatatcgctgaaagtgatggtggagtgacgacgtgggtggtctcgcacggtgaggacacgagaccacgtggtgttggtcttgcgcggagagggtgcgaaaccgagcagtctcgcattatcagcctgcgagagtgttggaaatgaaatgattagtgattaattaatcattgattagcgtccaagaacagcatgctggctggtctcgcttgttggtcatgcaagactgacaccgagcagtctcgcgcgggaccgcaataccaactgtatatttgtgtcgataaaactacatcaatatttttgagaaaagaaaaaacacaatatactttcaaaattaattcgtattttcacttgcttggttgattaaccttggaaacaccgtattgaaatcaaagccaaacacaactttatgtggttttaaataaactagaagattcataaattcatattactaatacagcccatctaaattggacttggattcgttaatgttgtttgggccttttctcaaaaaaaaaaaacatatacgaaaaagtttagaaattcagattactaatacgacccatccaaattggattactaatttgttggtgttgttgagcaggagagtttgtggggtttggagaattggactccgacccccatattttcacatgtttggctgtttcactatgaaaacactgcattgaaattcgaaaccaacacaaatttatgtggttgtacatatatgaaaaagttcagaaatttagattactaatacgacccatctaaattggattactaatttgtcgatgttgttgggcaggggagtcagggggccgacccccatattatcacctgttttagctatttcacttaccgaaacgtaatggaaaaatgtgaacaaaaccacttgggtatggtaaataaagcgccgtactgaaattccaatccaagcatgacatctagaggaataattaaaaaaagagagaggagaaatcccgaaaattcagattactaagatcgttttgagtggtatatactggcacaaatcttgcatggatttacagcagaggggacatattttcatcacacatagtctaagcacaattttgctcagtatacattgcagagatcccatcatcattttgttaacgtctcactgacagttggctacgcagtttttgggacaatttttctcaattatcaatgtcggaacagggaaaattacacaatttgtcaaataggaaattaaataaaaccttacaccattcgcacagcaagatgcccatcaccccggtgcatcggcgtgcatttttattctgagttctgacacatcacacacaactcgaactattatactctgccgttctggacgaagcaaaacggggtttattacacgcccccaaggtctcatttgaaaaggcctcaaacccggcccatctacgtgaatggaccgaaaattttcaaccaaaatcacggcccatattcacgcggatttctcttggtgttcggcccatgtggaacaaggcccaaggatgacacgactgatttttttttaattggaagccatataatttgttcaggttaactacgtcgtgtataataatttgtttttatggatatggatttggatatgatttggatcagcggcggaagctgcgctgggggcgcggggtctcgccgttctcgtcgcggagcttcaccgccgtgtacacgccggcgccggcgaccgcgcccagcgtcggcgcgatcaggtatatccacagctgccggtagttgcccgccgccaccgccggccccagcgtcctcaccgggttcatcgaccctcctgtcgtcggcctgcaccgcacccacgccgccggttagccggagatcaaatccatccattttttttttgtttgttggaaccatgacaccctaattttgtaaaatttaaaatatgccacccgtatctcaatgacacgtaggaaccacataagttaatgtcatgtgggtcagggtgtcatatcacaaattttacaaaatttataaaatttgtgtggcatggttcaaattttcttttttttttggaaatccatccatttttagtgctcattgtttcatattataggtcgttttatttttttttcaaaatttccttttccaaatttatagaaaatagtttttaataaaactaacttttaatatgtttatttatgttagaaatgttactatattcttatataaatttaataaacttgcaatataacacagaggcagtaacgtgctacgagcagggttcaaaaattctgaaatgaaatttccaaaattttggttattttggatcccctatgtgattatttcggccaattttttttattttggtaataatttgcttaatttgactaaaatttgatccaaatttcggtatatcgacacgttccgatagaaacattcaaactgaaagattaaaacctggctacaaggaggaggaagaggattatacgtacccggcgatgaggatgttgagggtgacggcggcgccgacggcgatgccggcgagctcgccgacggcgcgggtgtcggtggcgacggcggtgacgacgaagaggaggttgaaggtgatgatgaactcggtgaagaaggcctgggcggtggagatggtggggtcggggacggtgacgccgccggagaggaaggggtggaagacgcccttgagggcgaagccggcgcagatggagccgagcacctggacggcgacgtacgccgggacctgcagccacgggaagtggcggagcgcggcgaaggcgatggtgagcgacgggttgaggtgggcgccggagatgtgccccgtcgacaggatgatggtcgtcacggcgagccccgcgcacgccgcgttcccgaacggcgagatcgcgccgccgtacttctggttcacgatcggcgccgccgtcgcgaagaagatgaggatgaacgtccccacgaactccgctccaagctgcaccgcagtttaattatttgttcagcgttaatctcccagcttaattaacacactcatacagattactataatttacgagttcatgaattcataacggagctctcttttaaaaaaaaagtgaattcataatagagttaaaaacttgtttagatctaaaaaaattttggccaaaaacatcacatcaaatatttagacacatacatggagcattaaatatgggaaaaaaaccaattgcatagtttgtatgtattatgagacgaatcttttaaacttaattacgccatgatttgactatgtgatgctacagtaaacatttgctaataatgaattaattaggcttaataaattcgtctcgcagtttacaagcggaatatgtaattaatctaagtttaatacttcaaatgtgtgtccgtatacttcaaaaattttacacctaaaaactaaacacaccataactgtaactgtatatgaatcgtgtaaatttgcaatcaatttaagacactctctctttgatgattaatttactgtttgattgatcaatcaagcaaattgagctggacatttcagtttcagaagtactttcaaaagtccatccaaaagtctatggatactttcaagtgcgtctgattgattatgtggcaatgctaaactgcaaaaaggtgtaatcagacacaaaagtttgtgattgcgtacttctgaatttagcgagattttggtcgtgacaaaaagaacagtaggaatgtgggatcatcaggcactaatcaaaagctgaaacgacatatatgtttataaagttttgtttctgtgcatgataacaaaattacccgcttttagtccaaaagaatcacacagcaatgtcccgttgaaattttacactaaaaccatgcgcttttcgcaaataatcatgaaccaataattctgcggcgattatgtcaaatcatgaactgattaccctcccagaaaaagaaacgaaaaccagggacagattagacatgacaggcacatagcaaagcaaccactctctcctcacggatggatggctcgaagcgatcgttgagtcaactctgaattttggacacggccctctcatgtcacatccaaaaaaaaccttatcaccaaaaatcattgtactttctcgctcgcacgtttttttattttaaaaaatgcatttttgtcatcgacttcaacagtgccattgataggagtagtatttaattttctttttccaaatggtaagtactccaaatggagtacaacatgaccaaatttttaatcgaatcatcagttctggatttctgaaattgcgatgggttatgggacacacagggatggcgtgaacagtaaacgcggacttgacagacaaaccgccggattacgcgcgccgccgccgactgacgccgagcaaggccaagaaaattcagcatctttgcaggttttatactcacaaaattaatcaaacatgatgtaggctagctaggacctaatcgccttaggtagtactgtactgtttgatcccatcagtgatcattgacaatataaaattcagcttccaaagatgagcattgcgtgttttctttgtagacggcaagataaatagtattagttaaatggagtacatggaccttcgattaaggacatccacaatgtactacaaaaagtagtctataggaaataaactattccattcagccatctagtaacataaataatattatctatctctacttctctgtcttctcctaatattacattgtatctatatacattgtgaggattgctatagttaaagtttattatatgggtcccatctatatagaccacttttgccatatacattggtgatgtcctaagggattgttttgaagataagagttccacggtaatttggtatgtatttcattgtaatttggtttaacttcgttataacatcattattggttttcttcacttatgcttatacttataagctaaaatttaaattctaaaacttaattttgaaattcgtaattcattttacaacactagcttttaaatactaagaacatgttaaaatttttactcccaaatttttatttgtttgctaataaaaactacgaatatgcataagcaaaagccaattgatgactccgtaagtttgatgacggcaatatcttcacacaccacacatgagtttgatttcaacgttcgaactgaattttgaaacttttaaaggtttgtttgaaacacactgaatacaatgcggttgcttgaatcgtcagaatattttaaaatttctcacggaggaccattgccagagtggacctgtgtaaaattttgagtctgcaggttcggatccaacaaagctctgctgacggcacccctgattccagtgtgttagcactgtgtaagtacagatctaaccactgtcacttccttaattaatcacctactgaaaccgcgtcagtgtgatgttgctcttttgtctccatacgtcactgttaacacatttcatttcaaaaagtacatgtaccccatgtaacatccaaactttataccaccgttatataactttttttagcaattttacggtccttaaagaggtaccatgagttattattttttctattgtaaatttggtacctcttggtaactaggtactatgaggtaccatgagttattaaattttacactaaaattttggtacctcaaggaccgtagaattgctctttttaaaaaatgattttgcatgatatatggttttctgaatgagcactttggccaaatagaagagcatgttggtactctatatatcaaccctccatttttatttttgatttctttctaagaagagaaatataaggggagaaactgttcaatatttagggggaatatacggaatttttttcctcttagagactaattaatcgtcacttatttagaaatggcacctagtaatttaaaactaaccaaaaggacattggatcatacccaacttggccgtataatataccgtgtatattacggaaaaaaatactagtactattcagcaactagcaataggacgatcgatcagttcctctgacttttttatttctgaagcttcgtgacaaacaaaaatcatgtgtttcattgtctgttgtgtatactctctttgtctcgtaaaaaaaaaatccagatttattgcactgaaaaaaaaaattcctgctaggaataggacgatcgatcagttcctctgactttttatttttatttttctgaagcagatggatgccagagagtatttttgtaccggatgcatgtttgtacatcagtacatgtctctgacattataccgtgctggttgtgtacgtacgactacgtctacgacatctcgcgcacaatttcagaagcagagtaaaagtacaccaaaaagtaccagcacgttcaactccatagtacaaaaacaccccaaaaaaccattttaaaaacatacaaaaaaaggttaaaagatgaagggttagtcatgttatatccagcttattaatttacccaattattgatagattatttgctcgacgctcaaaaaatacgatttttttagtcatgttgaaaaactttttttcattatattgcttatatctcttgtttggagctatttattaaatttattttcaaaaatattttattcatacctacaaatcaaaccaatagtcctcagcaataatccactgaataatcaaatcacatagctgagtgggagaagagagctagctaagagtgtccaaacattttctttaaaaaaggtaaaaaaaaatggatggaactcaaataattgcatgtatatcccctccataaaaagaaaaaaaaatcaatcctacctgtaaacctgatactagttttttctttttattttacagagtacttcttgcttaaagttgatttattttaaaacgaaccgaagcaacagaagaaagaaaggtgcctaaatttattttgagacgaagaccgagtttagctccaaaatttttctttaaacttctaactttttcatcatatcaaaacatttctacacatataaactttcaatgtttccatcacattattttgacgtgaactaagaacacccaaagtgagaggagggaattgaaagaagcggtgggtgtccacgtgggggcgtcatgtgcatgggggcgcgtaccttgcgggtgagcgagacgtccggcgccgggatctccacgacgcagccgtgcgccgacggcgcccacgcctccgccaccgccgccggcaggcacttgcaccgcggcatcgacttgcgctcgtacgacagcgagtccacccgcggccccgcgaacagcggcgccggcgtccccggcgtcgccggcgccgacgccccgttcaccggcgacgacatccccgccgcgccgcccccgttcggcgccgccatctccattaatatatcaactctttcttgctctcctcttcttgcaacttctttttttttttgttcttgtttttttctcttttcaggcgaatgatgaggtagaaataggatgggttttta

SEQ ID NO: 3821 - DNA, 985 bp, Oryza sativa
aaggcttggccggcatccaagcagttaatgtacctggagttgaaaatgtaagtgtgttgcggcattcaactgggccaaaaaatttcctctatacagctaaaaactcgataatatttctgaactcacaggttgatgccagtgagctcatcgttggacattcttcctacttgacacttgtcaatcaaatcctggaccagcttgagctgaacacctactatcctgtcttctatcccagcacaccaaagtgcggcacaccgaagtcaaagtaaccactgtaattgagctgcagaaaattatatatatgttttacgactggaaaagccagatctgtgctttgcaaagaagtgtatatctgatagcttgtggaacaaacagctgaatttagtgacagacaggttgcagtaaataaagctaactgctttcttgaatcaaaagtgcctgcaatatatagtactgcattttactcttaaaaatactgtttataactctttaatagctattagctaggtaatcactctgattcacaaatcacaactacaaatcgctcagatttgcaaggaatcgacagatgaatgaatgaacatctgcttcgttatttccgtgtgaggtcatgagcaagggaggagactcggtgcactgacctcgtcggcggtgaggaaattggagcggtgccatcgagtcgggacgaatcagacggaggagaggatggcgctcgccggcgccggtctggagagctcatggcgatttactcatgggcgatttccggccgccgtggcggcggcgaaaccccattttacagcttctccagaacatgggctgtactacggccaacaaaatcagccaggctaacatccgtgcggcccattcaacggtaggattgcgttcttttctctcctttcctcaattgtaaattgtactccctccgtttctccgtttcacgtaactcaggtgtgtttggtggattgggattcggtgatattccccc

SEQ ID NO: 3822 - DNA, 6466 bp, Oryza sativa
tcctaaatagcaagattcagaagggctatttaatagccctccggatccaaacagggccattgtgcggtgtcacttcgtgttcctagctactccaccttaccacactacattgtaggttttgttggggaccaagaaaacacgtactccctccgtccaaaaaaaaagacaaaccctggtttctgtgtccaacgtttgaccgtccgacttatttaaaaaaattatgaaaaaaattaaaaagataagtcacgcataaaatattaattatgttttatcatctaacaataatgaaaatacgaattataaaaaaatttcatataagacagaccgtcaaagttgtacacgaaaactcagggtttgtttttttttttttgacggagggagtacacaaaatattccgtagctctatcagagttgagctgatcgacagaaaccacacacggaactcgatcgactccaagaaacgtctccattcattcggtagctttagatttaggtcccccaatcttaatcgttgttaatactccgtgttacgtaaggaatcggagtatataacatggcttaattggaccatcaatcggttcttgcaaaacactaagtacttgaaaaggatgaaaacgcatggacgggatgatttgtcgagcgccacacataggtgatcttaactgttgatttgcgatttctactatcagtaaatatatatatatatatatatatatatatatatatatatatatatatatattactagttattatgatggtagtataaatagatataattcattaaattagaaaatataaatgatctagattatgtctgctactgaagaaaatattgtagaacaccttttaatttgtcgggttttttctgaacgaattaatttgacagttgagtcttaaacaaaagaaaaagggaaaaaaaactcaagtagtaggtgaaatttaggaggttaacctcacaatttttgaatatgaattgattgagctacggatgataaaccgtagaatatgaatggaatagcttaaaaataatttatgagtaaaaggtttacatttttattattcgcgatttaaaatacaacgattgaaaatcaatgaaagaacctcaaattcaacctttaaaattaaatttgaaaaaaaaataaaatttggttacaacagtaatccaacaaacaaggagataatgaagcttgccccctgactctggcctgtctcaaactctaaacatccaagtcaagcctggtttagttccaaacttacaactttttcatcacattaaaatttttctacacatataaacttccaatttttccatcacatcgtttcaattttaaccaaacatctaattttagtgtgagctaaacacacccaagttgcatgagtctcctctacaatggccgagtttagttccaaattttttcttcaaacttttaacttttccatcacatcaaaacttttctacacacaaacttctaactttttcagtcacatcgttccaatttcaattaaacttttaattttggcatgaactaaagttgggaactaaaccacaagcgtcagtgaggatctttttccagccaagccatggccatatcaaccccgcatgcaggcagccatgcatgccatgcacgcatcggcatcactgtccaaacggcagctgcactctgcaaaccgttcctctcgagctcgaagaagtttggagtttctcccctggaaggtactccctccgttttataatagatgatgtttttaactttttattcgtaacgtttgaccattcgttttatttaaaaaattagtgtaaatataaaaaaagataagtcatatgtaaagtacttttgataataaaacaaatgataaataaaataaataataatttcaaaactttttgaataagacgaatgatcaagcattgacaaaaaaaaactcaaaaagacaagtaatataggacggagttagttgcagcatctcgctctcactctcgtagtagtcagtctcgtcacgaggcacgagctagtatacctggaatcccaaaatccagcgccccaatctcccctccctgaactgtcatgtcacctcaattctagcggaatctccccgtgctgtagcatggcaacgcccgctgctatattgctatccgaagatctggcgatttttggccggcaattcgacaagttttttagatcgctggccaatatagtgcaaggatcttggcgaggccattggcactgggcagggggggcccgtggatgcatgtggcgttttccatcggttttaggtcggtttggtactttggttgtgtgtttgtttgatttgtcttatagtttggtttggtactttgatttgatagttgcacgaccctattgattcacttatgtttatacatgtaagaaaaaatttaaattttaaagcttaattttaaagttgattttgtagtatcattaatcatggtttattttatagcatttattttttatcgctaagaataagtatataaaagttttgagtaaatttcacaaaactacatatatattgaccaaaatatcacaaaactacagatttaaaatgatgcatcacaaaactacatatttaacacaaaatttatcacaatactataaatttaaggtggaatatcgtaaaactacagatttaattacaaagttatcacaaaactacaggtttagcatcaatttaattgcaaaacatggttttttaaactcaatcataacattagtgctaaggatttaaacttgtcagggttacgggtaaggtataccctctacccttcgatatacgtcacacatcgataaggtatacatacgcgtatacggacgttttcggcatacgttaaggaaattcatcatggagttcacagatggaaggagtcctactcggacaaaaccgggtcatcattgtatcgtgccgggtctgatgtctccgagtcctacttggagaccagttgacctgcgatataaaagggacccccgggaggacctaaggcatcgaatctcatagccaggacaaccaccatagcctatgaagccggggcctataggattcaagtcgccgggtgatctagtcgaatcaactcgactacgatctcgtcggtatcatcgagttccgcttttccctttgtaatctgtggtttccatcatataatcccataacaactggattatggctattacctatcaaggggcctgaaccagtataatctttgttttctgcctgcttgatgtcgtattacgtagatcctcgtaccagcgtaccccaataccctctatatccggtctacgggtatcccccgtccatcaaactccaaaacatatagttttctgataattttattattaaacctgtagttttgtgatacatagtcttaaacctgtagatttgtgataattttattgttaaatttgtagttttatgatacatcaccttaaatctatagttttatgataatttgatcaaaatacctgtagttttgtgaaatttactcaaaagttttttttggctaataagctgtacaaatatgataagcgaaacaatggggccatggtttgtgtagataaaattgagttacaacaagtaacccggaaatgaattgaacaacccaaatcaatattttataggtaaaacttctattttttttactagcggtttaaaagataatataaaaatagactatatggaataattttaaaatcaacttaaaattaagcatcaaactttaaatgttagctacacggctgataagataaaaagctaatgataagaggccttcctgggtttaggataaaggctggcgtagacacagacagtaagcacatgttgtttattcggagaagaaggattctgatctgctcgtgggattgaatcctgatcagggttattttgatctctgacagaagcttttgtgattgcgagttgtatattctgtgcgagttttatattggtcacgaatatatccagcatctgggatcatttcttaattggaattatcttttcttagctaaagagtgttttagacaaagtgagatgcatcatgctgcagtagtagtaagctaggtcaaacaaacaagtattggttggtcaaccaagtacacagaagcaaatttcttccttgcgtttcatcttcccaagagcaccaaattctcaattttgcacagcaattctactctaccattgtttgaaattttcttccatgttatgaaaaagaaatgatcacggcgattgggtcaatagctcaatcagcccagaaagaaaataagaagaagaagaagaaaatttccgttgttctctgacattattcaagccaagatatccgaaatggtcagtttaatcaatctttttttttactatccagtgatgaaagcatagaaaggtggtaataacatactccctccgtcccaaaaaaaagacaaaccctgatttccgtgtccaacgtttggccgtccgtcttatttgaaaaaaaattaaaagacaagtcacgcataaagtattaatcatgttttatcatataacaataataaaaatataaattataaaaaaaattcatataagacggacagtcaaagttggacacggaaacccagagtctgttttttttttctttgacggagggagtaaacttgcaagtgacgctagaacaaggaccaccacctgacctgtctgcaagaaaaacagagcacttggagcaagcaagcatcaattgtacacagtccatttcaagaataaattaatcaaatattgcaaaaataagaatggatgcagccattaaattttggtattagataataataatggaagacaatgcatggatagatagagagatatacacgacatgaatccatatgtatccaaaataaaaagaaatcacccataaattagtgctcatttattggacaacatatcctatgcacacaggtcctcacgtgtacacacgtgcacaccaactaaaaaatgttaccaaaaaatctagaaaaaatcatacacatactttcaattgtattacacctagggttaaatcttaacgtcaaattcattatattttagccgtaacaaaaaaacaaaaaatctgacagtgcaattttgtcagaattttatcttttttgttattctctatgtagaatgaatttgaagatgcgactttgcacgtagatgtaatactattgaaagtacatgtatgaatttttctaaaattttttgtgataatttttagttggtgtacactgtgtgtacatgcgaagacttgtgtgcataggatacgctcccccatttattgatgcatatcttggagatatgcaagattggaagggcgtatatttagagcactacatttaagagtgccttcaaatactagaatacatttaaacgtagtcgtatctgtttgtatttttgtgttgaatacatgagagaaaaaaaaatcccgtatttcgaggggggaaaattgggtcacatggctttccgcgtgggggatgctactgttacttcagtgagggaagggaggggacacggacctagagcgcctatacgcgtagggtaatgacaggtggggcccacggagggtggggcccacatggcagtgtcaggtgtgccactgaccacatcctccctacgccatggatgatggattgcactatgatatgatgatcactcgcataaatccagttgaatcgcaccaccaaagagagcaagatgatcaatttgatcgacggatgtatcatttgatttttcacgcggttgaaatttcacctcctctatcaaaaatgatatggtttaatgatggctcgtgaattgttttacaatgtttcagtggtagttagtcttctttttctagataaaaatgaacgacgtaacggtttaaacggtaatgacgatggtgtacgctcgttatcttctagggcatcgcttgtataacggaatttgtcgtttgacgtgcatgagttagatacacaactagtataacggaaagttggattattcgtgctcgtaaaacctaaaaaggtagaatatgagtaacggtatcaacgatcatattgatattgaaaattatataaatgagacatatacacctttgttgggaatcaaaagaaatcctactcacattaaaaaaaccacgtgctttttaaattatagccgtctcccttacaagagttgcaatgcaaattacttgaaccgtttaatgcttagcatcccattctcatcaaaagtaaagacacaaaactccaattcctcgcaccccgttcaacacatatccaatggtctcacgtccatgatttcaaataacaaatgtcaccgaccgatcactactagaagacacacgagaacatgtgtcgctagccacaacaataaagagagttagagaggggaaatccctaaaagccccccattaaactcttggaagcattcttccaaactcgtcagccgtatctctctgtgtacatctgtacaacggctaaattcaa

SEQ ID NO: 3823 - DNA, 719 bp, Oryza sativa
ggggacgccgaggaggaggggggcgagccggcgaggtcgtcggtggcggggagcccgtgggcggggagcccgctccccgagggcatcgcaccgtcgcctgcgccgtcggcgaccacgccgaggcggttcttcaggcggccgttcccgccgccgtcgccggcgaagcacatcaaggcgtccctcgcgcgccgcctcgggcagcggtcgccggccacggcccaggcgcagcaggccgcgaagccgcccgccgaggtcccgatcccggagcacgggggcgggggcggcgccgccgccggggaggtggagcgggagctcgacaagagcttcggctatgaccgccacttcgccgccaagtacgagctggggaaggaggtgggtcgcggccacttcggccacacctgcctcgcgcgtgcccgcaagggcgacatgagaggccaactcctcgctgtcaaggtcatctccaaagccaaggtctgaccattcgtgatctcactctcctctctctctctctctctcaaaaaaaaaaaaaagaagtgcacaatccatcgaatttctttagacttagctcgtacatagagtcgccactttgctatgatccatcgatgagttttatgatggatcaggattggtggtttggtttggcagcaagtatttagccacctggtaattccatcagcagacattgcaacagcgatttaatcatttgcttgttaggataa

SEQ ID NO: 3824 - DNA, 1668 bp, Oryza sativa
gtctgtagactacccctcgggtggagcgtataagtcatactcctaggtctttagtaagcttcctagaagattcacccaaaatcttcatagactgcaaccaacagtcaagctcacaaaggtgagttccttcaagaatgctctgcaggacaacatctttgctaattaaagccaacagaactcattaaggcatagccaacctgccttgcagctcacaagagtatatgcatcttcacttggatagggtatatatattggtactctcctctagtttattaatggtttgttcttcccaggatctaattcacgggatctccgatcacatagactgggttaccaccatagtataactcacatgggtctcaaacccatctccttcgatgcattgtctatcacatttcgtgatagtcccttcgtgaagggatctgccaggtttctcgctgtttggatgtaatccaacgttataactccggagtttcttaatttcctgacagacttcaatcgtcttttcacatgtctagacgatttcatattatccttagaactattcactttgacaattaccgtttgattgtcacagttcataaggatagtcggcaccggtttttcaacaacaggcagatccattaatagatcacgcagccattctgcctcaacagtagcagtatctagtgccgttagttctgcttccatggttgacctcgtcaaaattgtctgtttgcaagacctccatgaaacagcaccaccacccagtgtgaaaacatatccactagtggctttgatctcatccacatcagagatccagttagaatcactataaccctccagtaccgcaggatacccagtatagtgaagtcccaattccacagtacctttcagatagcgcattactcgctcaagcgcacgccagtgatcatctcccggattagaagtaaatcggctcaacttgctcacagcaaaggagatatcaggcctagttgcactagccaggtacatcaacgagccaatgatttgggagtattccagttgattcctagcaattctcttgttcttgcgaagcaacaagctaggatcataaggtgttggagaaggcttactatcaatgtagccaaagcgattcaagatcttctccacataatgggactgcaagagagtaatcccattctcacctctaattagcttaatgtttaagataacatcagctactcccaaatctttcatatcaaaattttgagacaagaatgatttaacctcatttatcacctcaaggtttgtcccaaatatcagtatgtcgtcaacatacaagcacaaaataactccctcacccccaccatggcgatagtacacacatttatctgcctcattgactgcaaagcctgcagatgtcaatgttttgtcaaatttctcatgccattgcttaggagcttgtttcagaccatacaaagacttcaacaatttgcacactttgccttcttgaccttcaactacaaacccatcaggttgatccatatagatctcctcatccagctctccattaagaaaagctgtcttaacgtccatttgatgaacgagaagaccatgtgaggctgctagggaaagtagcacacgaattgtggtcaatctagcaacaggtgagtaagtgtcaaagaaatcttcgccttctttctgagt

SEQ ID NO: 3825 - DNA, 34898 bp, Oryza sativa
  unsure (1)..(34898): unsure at all n locations
atcaaaagtccgggtcttcgcataatgacaaccattagcttttttactttgccaccgtaataaaaaccctcaattaggaagccgaggctttgcgttgaagtggaaatgaagatgaaagatgcaactattccactcagaaatattccctcgttttttaatagataatgttgttgatttttaaacacatgctcggctatttattttattaaaaaaatatgcaaatgtataagatataagtcatgtttaaaacattttaaataataaaataactcgcaacaaaataaattataattatgtaatgtttttaataaaataaattatcagacatgtgataaaaaaagttaacgggctcatcaattagaaacggaggtactagtatttaaaaaagaaaagacgaactgacattagggcattaggcttaatcaagtggagtacatgcatctatatgcgccgaaagcctgggagcagaacaaagctgctttccaacgacgtttcctctgttgctgtcacactggaatatcattctacttatcaactgtgctctgctaaaattgcttctagaagagtaggaaaagttgcttaactgtactttagttgccatgctttgcataaagtttatagtatgggttatctattttgataattaaaattagcaaaatgagtactatctggtctaagaaatacgatatttttaaaaaaggaaaaatatttttagagacatgatcaaataatccgtggcaataatacaatgagctattccccttattttaaatttagctgtctaagtcaatcatgtctatattaatttgaccatcattttttaaaaatacatatagttttaaaaaatataaattatataatttcttaggtgattaaaacataaatcttactatcaccttccccaaatgtttggcgttggttagttaagttttgaacaaaccaatgtcaaataaaaaaaaagaaagagtatgatgctaaactatataagtttttacaaatcgatgatcaaatattaaaatatttgacttagagaaaaactgaaaacacaagtaatttaaaaagagtagctaaggacatccacaatgtagtaaaaaactacagcaagcattaaatattctcttgttacctagcaacaagtattgtgagagtgatgaataactactacttggttatatggctactaccgacaacaagtaataaaatgttatttgtacagtgttgatgagtattaatgaattcttttcttggaagagtcacgacagctgaggattggtgagtttttatggtgggctcatgttataccctaccatcaaacaaaaacaatgtggagttcatctcctactactagggtttaatatttcggaccgaaatttcggtcatatcggaccccccccttacgatatcattttgacagaaattttaaatatttaattttttatgaatgttagcaatatttgttcaaatttaactaaattttgtttaaaattttagaaatctcgccatatcggcatcctcttatacaaataccgaaaccgaaagattgagctctgcatgctactactgcctgttgtccggcctacattactaccgagctcggtaggaaatggcctacattatagccctaaaacaaatgggcgtaaactttttatgggctttattgggctgaatgggttgaagagaccgaggtcaaagcgccacggtggacaaaaccagcgccacgtaggacaaaatcgtgtgaaatactgccctaggaccacttgtgaccggttttagtacaatactgccctaggaccacttgtgaccggttttagtaagttaagggacccccgatatctggttttacggtttgaggatgtttttttttatagtgacaagttgagggaccttcggtgtactttttccgaagagaaatcatataggacttaattgaacagttgttcatgggctaagttagggcaaagacttgtttatggtccaagtcagcgcaaacacttgttttgaggtgctcgccagtaaaagtgacagatatgaatggcctcaccaattgctttggaccaatgtatgggcaagtccgattcaaaacaagaaggtactgtactgaagtctgtaactgtgcctctcatcgttttaaggagcatcaagaacttaattaactaataaactgataattccaagagctaacacagataaactagataaatacctatcttagttaacctcaatatagattaacagtgtctgttggatacttggacgccatcatattacaagctaaaaaacctatcctctgctgtctgctccatgcgtgaaactggggcaggaacctatgcaagatttgcatttcttccccttgctaacaaactcatgtatcatccaaccatgcccaatctcaccccaaaaaccatccataacttttcctttgatatagaaagaattagcgaaaggaggaagaaaacaagtgaccagatgatatcttctgttatgttacaccgaaatggcaaaactccgatgccatcatcacagctctgaaaacaatcgggggttcagacttcttcagtcttcagagaggtagccgagcctgtgttctgtgctgtgtgcagtgtgctagtgctgctctgattcatcagcagtccagtatgtcttgaccgccacaaggaccttctccgggttgaagggcccgtcctcatggtccaagatgcggctctcccaccgcatccgcttcgctatcgcctggaccttggtgaggacgtcgaccgtgtcgcggatgatcgccgtgccctcgggcctcaggatcctgtccatctccaagaggatgttggttatgtcacacctgcaatgttgaagaaatgtgcatcagtaagcaggctataaaccaataatgtgatttgcagttttgcacattcagattgccccactaattcagacattattgctggcatgggatcatgtgtcagcgaaagcatgagcaccggtagaaatatcagagatgcgttttcaaaattgtataaaggctagcggtttcacaggcataatgaacagtgctgtacaggccatacaagtcatggcaatgatctaaccagtaccaaaggactatgatgccagtagtcttcatttactacttgctcattttctccatcttttggtgtataattgaaattcagctaatatggagtactcagtactcacagctgtgtagcttaagctatactcgttctatctggattcacctagaaaatgatgcagaatgaacacttgaaatatcttctgagggtaaaactagaccagtagattctttaatggctaagctaaaatcaacatacttgggagggtgtccagtgtaatgcacaaccaaatggtggcagcttgaacatggttaagcagaactaagagctagcagaaatgatatgtagtataaaagtttctcacctgtcctgatagatgctaaacaaattgtcagcatgcaacaggtcgtaggttctgggatacgtcgagaaagcttcacaccagtcctggtacgtgccaatgaatcctcgctcataaattgctccaagcgtgtcccggtctgaatttacgggaacgacgttcatcacccacacagggtacttcactaaagaagcagcaaatccgcccaagtttgcgttcatgtccatgacatttctgtatctcccatcggctatgggtagggtgcgcttgtagtacgccaccctcttttcccacaacttcttgtcctcctcaaatttactcgcatctatccctggaatcatacccctcttcacccttggagggaccgcgaatgccctctgtggccatctctccaaagctccacctgcgatctcaccctggttgcttacttcaggcaatggagtaacacatgcttccatctgcttgtacctgttcacatgaaggggtaaaagaaactaattcagtggcagacatctaaatgaattatcagatagtcttgttggtgcagcgattccataccaggcagcatcaggattgtcactcttgcatatatggggtgtcttatacttcttcttgatgttggcacattcaaggtggttcttaggcttttgccagatggagagatcccccttctcaaccaccttgttccagcaaaggctcctcgcgacatcctcaatattgtcttgctcttccttgaggtcttccttagtcctctcccaccccttgtagtgtgtcttccaattgatcggaggacccgagagaatccagtatcccccgggccttagaattctgtcgacttcagctaggtatattccatctaacaaaaaattcagaacatccaactcaattagtgaacaatatttggacctaaggatagcttgaaaacttggggcaagatacattgaaaccaattcaaatgtattgaagtgctcaccaaactcatgccaaggaatcaagcagcgtgaacaatgtgccatatcaaatgacctagatgggtaaggcagccgttgctttcccatcacgccgatgatggccggcacaccccgctccagcgcgaattgcacctgagcttcatgggtgtccctcggtgcaaacgacattgcaaggatgttcctcttcagcaagtaagcaccccagctagcaacctgcaaagaagatgcaaaagcatgagcacattgccacgacatcaagaaacctgaagctagatgtttcttctgatcttctccccttaccccgcaacctgtgtcgatcgccgtcctgatcttcccgtccgtcaacgagatgagcttgccaatgtcgtcaatgtaggcgtcggcgcctcgcgggaacatggtgccgccaccggggaaccggaacctctggccgtccacctggatccagttctgcacggccttctcgatgctgagctccttgtgggggatgttgttgaaccaggcgaagtccctgctctgcggccacttgaacggcgtcctgtacttgggcggtgccgggatgaggcaccggatctcctcgtccttgccggggcaatgccgctcccggtacaccagcatcgcgcgctcgaaccgccggccgcgcttcctgtcttcgcacggcgtgtactcgctgaagttgagcgggcacgccgggaacggctgcaccgccgcctcggcgcccgtgtcgtcgaggctgagctggtggtgcgcctcgaagtcgagtgactcctgcgaggccgacccgaacgacggcacggcggaggactgccccgccgccgccgggtcgcagccaaccttggtgatcgccgagctcgccgccggcttgggcactgtggtgttctgccacgcaccgaggacgtagaaggcgacgcagagcgcgctcaccacgaggatgtaggtgagccgctgcttcttggattcttgcagctgctgagctttgggggaggcaggatactctttagccatggctgctgcaagtttcaagaactcgtcagctaggagcttaatttagctgaaatctaagctttgttggatgcagaaaaaggcatgaaattgaagaacttgagctacaattgcctgatctgagctgaaaacgaaaagctgaattgatatgcaaggctctaaagttgcctaatggatgaattggagttgtattactggagtatggtacaaatttaacactatcttaaaaattccccatggcatgtactgcagcacactaattgtggcaccaaccttagtactactagtgaagatcacatggcaataaatttcggattacaaatttgaatatggagtcaaatacaacagatcattgtaaaactctgggatctaccgagcaaaattgtttaatctgactactgacaacaccaggaaacatacacctgactgtttgtcttaaatttattaagctgcagcagttgaaacaattcaagactatgaaaacagacgaacagatagcattcaagaaagcaggaggggacgcaaaataccactaataactgtagatcatgaaatgattcttaggaagaaaaaaaaaacactatgcttcactcaagaggaggaaactacacagaagcataggctcatgcttcttgctgaaggcttatgcttcaccaaaatcagtacaagcaagatttatgcttccagctgaaggcaaagaaagttgctactaggataaagggcaaagaggctaaagaagataaatattctaggcaaaaggcaaagcggaagcagcaagatggtggcagctaagcaccacaggccacagagatccagaaaatctcacagaaatggcaggggcaacccacatgaatgccacaccacccagcggtagctagcacctccattccccaatggatccacacacaccgacaccactccaatccaagaaacaatacgagcaagaaaccaagctgaaaaaactacggacctgtagtaaagaagccagctcaggaagaaagatgaagcagagacccctcctcttctcttcctcctccagaggctgagagggagaggagaggagcagcagctctgcctatttatgcgagctcttgcactagcaatggtgaattggtgagtgagtgaggcagccactgagccagtggagtgaagtggtgtgatgccaaacacggtgtcacatgtcagcagcggcttccttcctcttcccagctaacccaacccccctttcataaataaaggagaggaggatgtgcgtgtgaaagggggccatatgccgccatggtggccatactacacccgcaggggcagaaagatcacgccgacacggggattaaaatagggtggaattgggcaggaaaagaggggggtgccccactaccaacaccaaagctagggttcttggagacctctgtttcttggctcacgtggtaatggcacattggtacagtggcagtggaccaaaatgtccagatgaccaatggaaaactaaattcagaatatctccttatttctgcatgtcacttaaaaagttataaaaaaattgaaaaaaattagtaggatagatcaatatgttatatgtcacttcacaaacatgcaaattcaaattcaacttatacaagtagaaacaaaaataacaaatttgactataaatagaacgtgtaattcatggtcaaatttgttatttttgtttcgaattatataagtcgaattttaactcgcatgtttgtgaaaagatatatcatatattgatctatcttaacaatttttttaaaaaaaattaatatttttttaaacgacatgtacaaaacgagggaatgtcctctggaggaccaatatccacttccgatggtgacccagtagtggatttcttggtttcctgcgaggaagaagagccccggtctccggtccttgcaattaggcctcttgcactgagtgtggctgtggctactggctggtattttgctgacgggttatctatgttctttaataagctaaaatgatttattagaaaataaaaactaatttataggtaaactattgtatgtgtgtcattagtgacttaaaaaccaatatgaaaaaactaatcttgaaaatatcttaaaattaacttctaaattaagtttgaaaatttaaattatagctttgactttagtttaggccaaccgatggagcctgaatgttctagcgctattgttttccgaaccgtcttggacatctgagaaactcaccttcagtggttggattatttttagctcttggggagggaaacatggaccaatcatcttccatttctgtgctaagcttcggtttcaaggtgtaacagttgggacttgggagtttgtgacgctaaaaggaaaatcacttccactatgcagaaagatcaaaattcaaaagtgctttgctttggttcttgtactttattttttttgctttttcttcgacaattcacttctcaaagcattgcaccaacagtaaaaattcttttaggtattaaaaaaaactgtctaggtcatacaaaactatagcatgactattctaacaaagagaagggggaattctagcaatcgattttacgataaaaaatgagcaattgcaaccatatattaatcatttctaccagaatagggatagttcgtctactttagaagcacaatttaaaaatatgaagaaacgaccacaagatacataaaccatacatctccaggatacagaacaacaatgccacaggaatcatcaacaaaaggaatgcaagaactagagaattggaatttaccttcagaatgcagagatcctagatcctccctgtgacctcagcaattgcgctctgccgacctcacagccaaattgtgaatttctatcattaatctgggcagctttgcccggccatgatggtggttgtttgcagtagaagcaggggggtaaaaaacccaaaaaagcgcaactttttagctattccctttttttatctcctcacaccaacttcctgacgcttttaccctttggctgccttgcaaaatctgcatgcttggagtggacaggatttggtcaatggcgaaacgacaacgcacacagtggttttttttggagagagattgtcggccctccatttgcttccctgcattttcatcgtttttcagctttttcttttgaacttaaaaatgaatcttgacagtggatggaaaaaaggatgcttgtttcatgatgcagtatgatgcaggaggtgatggagtagtgtcggtgcaatgaaatgcatggaccacaagcaacataatacggaatctctatgcctttgtcacacttgttctgcatgatgatattttgcatttgatttttttttaggataaagagatatttctgcaagtgattttactaccaaatactaacagtttctagttcatgtctccgctataccaacagtttcattacagaagattaaattaaagttaaaaactaaaaaagacgtgaacattaaggaagaacttaatatcaaataataagaaaggggtgagacttcgaacccagttcgtctaacctaccacattgtggagctagccggaagacccctgggtgtttcttaattaaagttaaaaactatgccaaacacatcagtttttttacggatttgagaggatttttaagaaataattgaaaggggtcaaggaatttacgatcatccagatatggcttgaaaatattgagaagaaaagactacttcgtactatatgatgatcttgcagctggaccaaaagcatttgtggacgatacaaatttttggatcaaaaggacaacgaaacaaacaaaaaataatagtaaaacagaagatttgcacgcaaccggaagaatctcaacaaaaggaatgacatcttcctcctttctaccgaatcccgcatcgaggtacctagggtttcatcaaatccatcaactagaccctctccctccccttcgtgcgatcgccacaaagaaaaaacgcaagcgaaattgctagtgattccagccatggatccactcacctcgaggatcaaagtagagctcgaagtcaatccgcgcaaccagggaggggggagagagagagagagagagactcgcctccgatgatctcccagttcgttgcaactcgaacgcttttgaattttggagaagcagatgagaagagaaaagctcggtgccgccattaatgggctctccgtacaaaaagaaatccaaatccgaattctccaagcccattaggcccagtagtagtaagcccacgaagcgagggcttctcgcggcttcgcttgaggcggagaggcgccgccgccggccgccgcgatgtcgctgccggcgcggctgctgctcgcgcgggggaagaccacggcggcgcagcacgtggcggcgcggcacctggaccacaccttcgagaagctcgcggcggcgcacctgccgctcgtcgcggcggcgccgctggtggacgccctgcgcgcgtcgcccgccgagcctctcgcgctcccgggcctcgcccgccgcctcccgctccgcctccaccggcggggcgcgctccacttcctccgcctcttcccgcgggtgttcgacctccgcgccccgctcccgctctccctctcgctcaccgcgcccgccgccgagctcctcgccgtcgccgcatcccccgcggcggcggctcatgccctccaccgcctcctcgcgatgtccgcctcccgctccctcccactccgcgccgtcttccgcgtctggcgcgagctcgctctccccgacgacttcgaggtctccgtcgtcgccgaccaccccaacctgttccacctcgctcccaaccccgccgagcccaacacccacatcctacacctcgtcgccgatccggcgaccgaggagttcactccggcggtcgacaagacacggccggagaaacacgccttcaagctgcagttcccgccgggattcaggctgaccaaggaataccgtaagaaggtgaaggagtggcagcagctaccatacatctcaccatacgaggtatcaattcagaagggtgtgggaagcaagagggtgtctaagatggcgaggaagaagatggagaagagggcggtggggatcgcgcacgagttcctcagcctgaccgtggagaaaatggtggaggtggagaaattcagccagttcaggaaatggttcgggatcgaggtcaatgtccgggacgtgttcttggatcacccggggatattttacctctcggcgaaggggaagcggcacacggtgttcttgcgtgaggcgtatgatcgtggcaagctcattgagccgaatgatgtgtcggaggcgaggaggaagcttgttgagctcatgctcctccgtcgtcgtgggcttgggaatgccaattcaaatgctaacatggcttcacgtgcctgtgctggtgctaaagaagacacaagtgatttccaggaggaagagatttgatagttatgtccaagaagctggaggagaaagtatgctgcggatttcatggacaatctttcgtctaccataacctgttcaacaggtgcttggactaccttgagtggtgaagatgttggtgatgcataatcatgggcagtaaatttcgcgtggcatccattaaccagatgagggatatggatttttttcagggatttatgctcattgtttggcattatctgttgatgcaatgtgctggactgagtatagttctggttgatgctcaaaactgnnnnnnnnnnnnnnnnnnnnnnnntgattggtaggtcagaattgttgttgaaatgtagcggcaattacatgtccgataatgtttttttttcccagtatggcaatttgcttctgcatgtggaatagtatcaccaagtatttaccataccagaatattttagtcggaacacatccttttatctttcactagtttattttcataatgaaatgtgcttcatatagttcatctgttcttgttagctcaagatttttcatgcccctaaaccagtcacatactttactagccttgtttacagcattgggtacacgaagatggcatttggcatttttttttcttcttcttgattttctagctttataagttcctaccaaaatttctacagaagctaacatgacaaattgtcatttaacaggtctacaattacgccagagcaaaagcagtgtgatgaaagatcttggctgaagtttgaaattgaatatcccttgtttcactggagatgatgtgaaccgaagatgattcatataaactagagaatacaaaattgcctttcttgctactgattgtgaactgcggaaggccactgggatgtgattcacaataccacgggacctatgatcaaaattgcagtcatctccgactagagaatcctgtagtttttatcgacaaactaatatgcatcagttgtcattacagcagctcttcatcatatacagtttaacttttgagtgtacttttgtcgctgtgatcatgcccttgtaacagttatcccatatgtctggatgtcttccttttccagtcagtaaagatgtacatttagtttgactgaaccagggtccacaataccgacgaaaactgatcaaaatataaaccactcaatttctcagtcatgttaaaaaaataaactgaatctttgtttgacaaaatttatctggatttcatcggtatttgtcggtttatcaacgtttttccgcttgtgggcaatttttcatccgggtatcggaattgcgaaccctgtgcagaaccaattcagtatctaacattaaatctgcccaggtgaaactaacttaaatatatcacagtgattatacacattcctacttcttctaatatcctaccttaaatcctacctagctgtatacacacacaagtcaccaacatagctgcagaattacaagggattatggatgtttaggagtgaaactcttgtctgcagcaacctcctgaacaccttctcgctgccactctccatctcaccaatgcattcttccagctcctccagtttctccaatgccggcgacgccgccttcttggccgcccgagtcacgccaagccacgcccacttgtgcgatgccgctgtctgcaccatggccggcacgtcccgcgacattgccgcgcaccggaggaggatcgcctccgacgccgccgcggtcaccgcggccgcctccgccacgatgccgaccacctcgccgtcggcgtcgttcgctgtcctcgacgccgccgccggcgtgcgccgcaccgcgtgtcgcatcgcggcggcgaggcggcacagctccctctccgtccgccggtgcgctcggagcgccgtggcgaccgtcgcgccgtcgccacgccgcgcgccggcgcgcagctccgccgcgctctgcctgagcgcgagcaccgccgactcgaacgtgccgtaggcgtcggcgagcgccaggaacccgtcgagcgcgcgctcgcatgcggcgccgccgccggcgcggtggatggccgccgcggcctgcggcagcccaagaagctcgccgagcaccgccagcacgtcctccacgagcgcgagcccgtcgcacctcccgtcgccgtcaacaccggacaacctcgccgcggcggcggaccatgacctgagcgcgctgatgccgccgtcgagccgcgccacgaccgggtgcgagtgctccctcggcaagctggccgacctcgccgccgccggcctgatcgtcaattgcattccaatcatcgagctcaccgctgctgctgccactgatcaggtcgcttcttcaatcttgatcggtcgaatgaatccttcgtgttcgtgaggaagacggcgtgcggggttttatacgggaggcggggggcaggtgatggtttgcacacacttgcacgttgaaaaatagagaaatcgttggctttttcgtgtgttggctaaggtcatttggcttgggcagctcggcttgcccactttggagttggtggtgcggtgcacggcgccacggcgagctgctgtttttctctcctccggcatgagcgcaaaactgctaatctaatctgctgctagtgcttagtactatactggtgtcagcatgagctttactgggaacagctgtgactgcctaaatggcttgaaaaaaatggcacatggataggagcagagtttacgaaaccgacggcaccgcgcttaccgccgagatacggtaattggtaaggccacgatgaattcaccaaattcaaataaattttaaaaataattagattttttttatgaattttgtacgttcctcttgggtaaaccgtaaccgtgcttatcgttggggtgccgtaacaccagccccgaaggtagggaaaaacctggataggagtacaaggtgtaggtgagctggtacatcactctagcagagtcagctccacacttatatttgaatttttttgggagtgacagatggtattatactactactactactatactccatgttgttgaattattttgtattgtatgaatttaaaaaattccatctccatgtcagctgtgcgctgcgctgcactgaacttcctcccctccggtttgtcaggtccgctgttttcttcacctgccaaaacctcccaggtttcagagaagagccacaaagcctgttcctggttggagcttatcttaagctcaactactaaaggcaaggactctttagcctaatctaatcatctccaaagattaaaagaaaccacttgattttgtctagtattctagaaaaggcagataaaatatcaatctgacccaatactggcaccatagccttggtagtggttgttcagtgcacctgttcctgtgtcatctctcggtgccaacaattgcgacggcacgagagcaagaagaagacgacgacgacatcgctgaagccactaatcctgtcctgtgatgtgcacacgcccaaagatggtggcgccaatagccaataggcgcacgcacaatgcttcgacccgtcgcgtccttctccgacgagaagcaaagccactgccatgccatgatcaggctcgaacaaggtttggttggatcgatcgctgggttggatgaatgcgatgtcaggcacggcatcgcgacaaatccaccctctgttgcggttgattcgcactgccgttaagtcaggtgactttagagtgacatatgagttctcttttctatgcacccatatatcagtgattataaaagttatttgacttaaatcaaaagatctcaatccaagtcgaagtcgataagtaagaagatttcaatccaaagctgtttttttatatagaaccctgagcttctcaaaacaggtgtaactttttagcatgttttgtcagacgataagaaatcgtttcggattgactagccaattgtagattgttcgtgcgttgtaattggaaactggaatgtaagtcaaatagacaatgtggaaactgctcgtggaaccagccattgtggactcgaatagaaatggatgtgcaaaggggttaaatatcgaagaatgtatgaaaatgaagatgtggtattggcacggcaaaattcagaattttctctgtttctttatctgagaaattacaagggattatgaatgttaagaagagaaactcttgtttgcagcagccgcctgaacaccttctcgctcccgctctccagctcgccaatgcattcctccagcctctccaatgccgccgccgtcgccgtcgccggcgacaccttcttggacgccggtacgacgtgcaggtgcagcctcgccagccagtttttggatagcggcgagctggccatcgacgacgacatgtccggcgacatcgcggcgcaccccaggaagaccgcctccgacgccgccgcgatggccgcggccgcatccgccaccgcgtcgcccacgccgtcgcccgtggtggcgtccgccgccggcgtcctcgacgccgcctggcgcatcgcccccgcgaggcggcacagctccttctccgtccgcctgcgcgcgcgcagcgccgcggcgaccgcggcgccgtcgccgcgccgggcgccgcaccgcgcccccgccacgctctccctcagcgcgagcagcgccgactcgaacgtgccgtacgcgtcggcgagcacgaggaaagcgtcgtcgcgcgccgccgccgccgcctcgccaccgtggagcgccgcgacggccaccggcagctcgaggacctcgccgagcgcggcgagcacggcctccacgagcgcgagacccgagctcccctcgccgccggagcgggacgtcgccgtccacgacatgagctcccgcacaccgccgtcgagccgcgcgagttccgggtagtggcacgggtggctcgccgtgcgggcgtgcgccgccttcctcccagggctaagtgtcaagtgcatcgctgcgtagtcgtcgtcttcgtgatcagtagtaaaacgaagcgacggcgacgaggagtttatattatacgcgacgggaggcggacgcgcgggtggttgcgagttgcggctaaaaaaaatcgcgggatttcacatgacagcgtgggtgtttttttgcagttggcacacggcgccgcgcgcgctgctgtttctggcattgtcgaccgaaaactcggcgttcgactggtggtatcgcggagttgacaccaatattcagtgggaacagctcagaagctcactgcctataggctaaattatagtataatttttcgggtgaaaaagtaggtgcggcgttgacaggattgtcacgatattaatacgatgaatcgatgataaaagtaaggcacaggtacaggtgatctatcagcgtcgctcgagtcgtcggtttttgaagttgttcgtgcggccaaaaccagaaaccacagcgtgcacaaagggtggaaggctaagcgaatcattttatccgggataaataaattaatgggaaaacgaagccatctgctgcttttctggtcggatcggaggtgacccgtgcagccctgccgccgtgctgcggatgcgggtgtcatccggggaagcgattttggccggcgagtccggtcgtttttggcaaatccaagggtcggtgacacagttgggtacacgaccactctcccatccatgatccgtctctgcatctcgcagctcatcgcgacgcgaaatcaccggcatctgctcccctattggctgtttccaccggccagcgccgaacgtttttgcacacgaagaatgtgctcgtgtgaagtaacttcccacctgacgtgatcactgacgtggttggcacgtgaatggtgaggcctacgtagccatccccaacccaaaaactatcaagtagtttctatacttgccatgtcatataaacactctgtgtagaaactatgtatacaatggatgctgtctttaacttaaattctcatcaaatcacccctcttctctctccttttattcacatatcatcttgtttttattcttggtactttatgtagagatggttttttacatgaaaaatagttttttttttatctttttacctctctctttattaactttcttgccatataggatttttacttatgtgacgatgtatttaatgctatagaaactagataacatggaggattaaggatggcctaaccgcctaagggaccaagtccctctaaggtcctattcgtttccactgctagcagtggatgaaattttggattttcgtggcacgcttttcaaactgttaaacgttgtgtttcgtgcgaaaaatttctatatgaaagttgttataaaatatcagattaatccatttttcaagtttgtaataattaaaactcaattaatcacatgttattaccacatcgttttacgtgaaatacttaattttcatattctaacattacgttaaaagatcttgatcgtattactttagcctataaacaatcatgttctaattgtgaaaataaattctctaacctggattagaagccattggaagccgatatttgttttccttttattcctctgttccttcttcttattcacctgcacgggaacggtttgcgctacgaagcatcccagcattacgcaggatgaaaacacaagcagcgcacccattatgtaatcctttcgagaactgatgtaaatcatatttatcttagaatcttcagctctcccaataatacaaataccgacaatttgagaatatgtaattatataaccctgaaaatgaacaaaaagctacaatttgggaatcctagcattttcatattttcactagctagctacttcttaaaatctcgacctccccaaacaggggcatagtatcttcaagtagtacaagctcatgacaaagaggatgaacattgcaaggttgcagactagcagttgcggtactagaaaagttcaagaatctcaaatcaatttatgaaatcaaactacacacataatgttcttgactccccacgtacttacggaataattatattggcatacacaaaaaccggagctaatcagagtagatacacccatagacaagccatcagacccaacaatttttttgtccatgaaacagccagctaatgctaatagacaaggggttctgatggaagatacagctaggccacatctagaagcacttcctgtggacgatagctgggccagattcttcatactcagcccttgagatccacatctgcacaaaaaaaaggaaagaaacatatgtcaagaaccttctcgaacaatctagaaagtgtatcaagaattaactgttggatgattttgcattacctgctggaaggtgctcagagatgcaaggattgatcctccaatccagacactgtacttcctctctggcggagcgacaaccttgatcttcatgctgcttggcgcgagcgcggtgatctccttgctcatgcggtccgcgatgccagggaacatggtggatccaccactgagaacaatgttaccatacaggtcctttctgatatcaacatcgcacttcatgatggagttgtatgtcgtctcgtggatgcctggagcttccatgccgatgagagaaggctggaacatgacctctgggcatctgaagcgctccgcgccaatggtgatcacctgtccatcgggcagctcatagctcttctcaactgatgagctgctctttgcagtctcaagctcctgctcgtagtcaagagcgacgtatgcaagcttttccttgatgtcacggacaatttcccgctcggcagaggtggtgaatgagtaacccctctcagtcaggatcttcatgagggaatcagtcagatccctaccagcaagatcaagacggagaatggcatgcggaagggcataaccttcgtagattgggactgtgtgactgacaccatctccagaatccaagacaatacctattgacaaaaaatatcaagaaacaaattacgagagaacataatgacagtttttgtgtattgtaacatctgtaaaacaaggcagtaacttaaattttatttggtttgaatggttcaatttaagtttactttagacaatatattgctaattttggttgtgagcatagcatttgatttgaacatcacccggtttgttcctgctctattgagattccagagtagcaaaacagaatttacaaatgaaaatgcttattctttgttcacttaccagtagtacgtccactagcatagagggaaagcacggcttgaatagcgacatacatggctggaacgctgaatgtctcaaacataatttgtgtcatcttctccctgttggccttagggttaagtggagcctccgtaagaagaattggatgctcttctggtgctacacgaagctcattgtagaatgtgtggtgccaaattttctccatgtcatcccagttgcttacaattccatgctcaatggggtatttcaaggttaggatacccctcttggattgggcctcatcaccgacataagcatctttttgtcccatcccaaccataacgcctgtatgtcgcggacggccaacaatactcgggaaaacagcacggggagcatcatctccagcaaacccagcctatgaaaaatgaaaacagttaatacttgatgagcttctcaattgtaacaataattaccatcaggtagaaattttgttcaacaatgcgatgccaagtcatcactttttattaccttgaccattccggttccattgtcacagacaaggggctgaatgtcctctgcgtcagccatttattttaactgatctgcataacacaaaataaatcattcaaaacagtgtttacaaagactatagattaatacagaaaaatgtaacttgaactaaacattcatcctacaaaaacacgagtcttcatcaaacatgaatgacaaaatacatgtctttaagatatcacattcaaagctattaattgactaactagtattgcaaattgtgaaagagggaggattattcaaacaaaaaggaaggcgcagataggaagaagtataacactttagttgtatataggaaactcccaaaatgaatggtccatgatgcgtaaattataactagatcaagtgacttgtagttaagaaattcaaatcaatcaaccgaggctggtctgaatcaccaaccctccaaaggaatggtgctctctcctaagagcatacaatgcaatgtgtatttgaatcgatttagaccaatcttcagggagaaaaaagggacatgcttcagtggatgaaatgaatgcaacatgatctgctcatatcctggattgtctgattggttgatctgaagcattattttttttctgatcagacagccgtcatcaagatgtgaagcatcttagaatagtggtccataagcatacattttttagtacaaaatttaaactccatgatttctgaaactaggcagttttcagttaagcaacttgcttctttaattcagattttagaagccatgtcacataatgaaatcgttggtatgcttgtgtttttgtgtgaactatgaaatgttttgttgaggagaaaaaagtctcaaaagaaagtcgatcggtacagtactgaaaactgtttttttcccacgccaacaagaaagcaaccgtggaaatgaaaagaaaggaatcagctttttcacaagtccccacctacggaatgaccaatcaagacagtttcttgagtaccgcaaacaaaccggctatgagcatgcgaaagtctgtcagttgatctacaattcagagaaactatacccccaacttcacgccttaggccttgtttagttcgcgaaaagaaaattttttggtgtcacatccgacgtttaaccggatgtcggaaggggttttcggacacgaataaaaaaaagtaatttcatagctcgcctagaaactgagagacgaatttattaagcctaattaatccatcattagcacatgtgggttactgtagcacttatggctaatcatgaactaattaggctcaaaagattggtctcacgatttccatgcaaactgtgcaattagtttttttaatctatatttaatgctccattcatgtgtctaaagattccatgtgacatttttgggaaaaaattttgggaactacaagaccttagcacaacacaacataaacacgaagagatctactgcaagactactcgtcacctcagcacaaacaagatcggatacatcctcaactaaagcaatggatcggatcagcattcaccaagaacaacaaacaaccagtatacgcgcatccctgaactcctacagtccaacggatccaacatttgacaacacacaagcaaaagcaaccagccacacctacttcagcaactcagttcagtagttcacccatctaacagaactagaacacatctccgattgcaagaaacatcaagcattaaaacagaaagcaagcagggtccgggagggcctggacatggagaggcagttgctcacctaaagaagaggagagaaccgaaccggggatggcggcggcagcaagaaggaggcgaatggcgtgggagggaggagggggagggcgagatataggagaggtggtggcaatggcgatggtggtgggaaattgggggaatgagatgtaaagaggcgccggcctcactggaaagttgagagcttgaggctgtctctgcgctgcggccgtgccaacgcggaataatttgctgcactgcacacctgggccaacctagaaaatctgccttttttatgtttactcctacgtgcacatcactatgtacccaatactttcttattctattaaaaaatgatattttatcattttgcttttagaaataaatagtagtggttgatttttttttttacagggatggaatggaaccctcactgctatggaaggtggacatacacactagtagagagacgaatctaaaacgaaaatatcgaggagactgatatgttaaagtcataactaacttaagcatattgaaactatgtttgtcgatctactgtcaatcaaatttctaattcacactaccaaaacataatgttaataaaagaatgtgcaacatgcattttttttattttgttgtacacgcaattaatagttcggttagctataaccaaatgcagctagtatagctttttcagccaacaatccctcgctcatttattgttataatgcatcactatatcatgccaacatagggtacttggtagaacatgtttggctggctagagctgaggccgaagccccaacaagctctaaaaatagacatatcactaaacgtaaactcaaggaatcaaattagttgatgtaggcatggaggatccctaatagagagtagtttaagacaagaaataacttagaaaggagagctttaagaggcaacggcaacacaacagccgttaccgatgcctaaactagaatggttcttttcaacgcagctcttgattaaacacacatactaaactgatatacaatgtaaccttgtggacgcgtagcgatttctctttttctttttcccatgcgtgtgtcaaggaggagggccatcgatcaactgtttgtacaaactttgcaatctattcttcgtactaccatcgcatcttccttttttccccttgttgtcgtatgccttgagctgtcgctgctttcggttgctacctggagtatgaaggccctgtttagatgtgactaaaacttttaaatccctatcacatcggatgtttgaaaattaattataaatattaaacgtagactattaataaaacccatccataatcttggactaatttgcgagacgaatctaatgagcctaattaatccataattagcctatgtgatgctatagtaaacattctctaattatagattaattaggcttaaaaaatttgtctcgtgaattagcttttatttatgtaattagttttgtaagtagtctatatttaatactctaaattagtgtctaaagacagggactaaagttaagtccctggatctaaacaccaccgaagtttggcacagctctagctctagctccatcatttctggagttggagctcaacaaaacagtttcagctccaccaaaactataagtgaagctgggtaagctctctcataaaatgaattagagttgtagagttgggtttaggcagctctataactttattatagacccaactcttaaagtgaaatttaggagttggagctgtaccaaatatgcccgaagaaaaaacgagcacatgaatcaagctacgaaagatgaggtggtggacggtggcgctggggccctgcaaaggaataggcaaaacaaaagcgattgggtggggggcaccacggcagccttttcataactttattattgcttcgttttacagctgctttacggctacgcctcccttccatccggccaacgtttttctccctccgtcttgaaacataaagaattttagataaatgttacccatatagtattacgaatctctatgatattaggtgtatttagttcttctggtgtaaagtttttaaagtatacggacacacatttaaagtattaaacatagactaataacaaaacaaattacagattctgcttgtaaactgtgagacaaatttattaagcataattaattactgtagcatcacattgtcaaatcatggcgtaattaggctcaaaagattcgtctcgcaatttacatgcaaactgcacaattggtttttttcgtccacatttaatgtttcatgcatgtgtccaaacatttgatgtgatgtttttggccaattttttttaggaatctaaacaaggcctttggctttctatccaaattcatagtattatgatgtgtcacattcatctaaattcttttatattttggggaaggagggagtagtacccagggttcacaattccgatgaaaatcggtcgaattccgtgaaattttgaggtttcgacgaggctcgaaagtagaagccgtatgagatttcgatgagtttcatctaaattcaaatttaaattgataaaaaaataaaaatcaaataaaatcttataaatagtatgatattcatagaacttattgggttataaatttttgaaaaaaaaattgatgtatcgtgtgtatttactgaaatttacgagaggaaagtaaagaataatgaactaaaaaatgaaaacaatttcagtttacctctttttctttttctagttaccggttgaaatttcaaagatttcgctcggaatttcaccaaagctggctggttttcgcaagcttatcgataaactcaatgaatttgtattcaaaatttggtttatgaaatttgttcaaaatctaccggctttccaccggatttcacgaaaaccgccattccgccagagcccgaaacggaataccatctcggaatcgtaaaccctggtagtaccaccacactttgctccttggagggcgtcaatcctctcatctttctgcatcctttacattttaatctttttttaaaaattttgttttacaaatatgttcttgcaaaaacttattttagaaacagactttttttctcgacgcttgcaatgaccctagtgtcggaatttcaacgtcttggtgccaatgatgctagcacctacacgctcgctccctgtaaaagttaagtcactgatataaagggggtcggcgaccatgacactggtgctgagaaaagggtatgtttctaaaataaatttttatagatgtgaattcgtaaaataagttttttaaaaggtgctaaacataaaaagaaaatccagtcgtccttcatcagtacaggagtacagcaatcatttttttttcctgaagtctgatttcacgctgcgatcacttgggttggttgttgacagtggctttgctcatggtgcgtcttttttatgtggcttttgctcacctcacctgattcacttgctgaagtttgtatgagctttgctcacttggtacgtttgctgtaagtctgaatggtgagatcagcaatgagattgacaccgtcgaatcaacgaatttttttatttaaatatttacataaataattttctatttgaaaaatttataaaactagtcacccattgtcgtctggagctgccaaaggacaattttgccgacttggtagacggccgttagctctcccataacggccggccatcaaggacgccaaaattgtctaggccggccccttgccgccctctagaacggtggtttcttaccgtgcggggttgcctactgcaaaagggtgacgagggtgtcttggcattcttacggtcggcctccttgccgttctttgggagggcaattttctacagtgcggggtgccgccggattaaaaggtagtaggggtggaattttttcaggcagcccacttgtcgccctttgagagggctattttctactgtctgaggggctgcatgcaataatgtcaggccgccctcgccgccttttcgcaggcggcccctgttcagtaaaaaaatcaccctcctagaggacaacaagggggccgcctgcaaattttcagcgtccttggtggccggccattatggaagggctaatgactgtctgccacgtcgacaaaatggccctttgggagtgcgatgaggtattaattttgtaaattttttaattagaaaattattatttaaatattttaataaaaaaattccgaatcaaccgtcatgcaccaccaaccagcagcccaatgcaccgaccgcccatctctaagcccatttgaccgcgatggcgtggcccatgccggccagcccaaatttcgccatttctaagcccatttgacctcagaattcggaagccttcgggccaatggccatgctaactcgattggtacatcatgtttctggtcaggaataagttcatctgtggtcccttaacttgtcaacgaatccgattattgtccctcaaccggaaaaccagatacaacgggtccctcaactatcaaaaccagtacagattaggtccctcggcggtttggatggtggttttgactgacgtgacacctacgtggctaatttgactcggtcttcatatggtgtggcagtgacatggcgcttacgtgacaattcgatttggaaaataataaaaaatataggccccacatgccagtttcatgaaaaaataatttaaaaatggtggggccgatgtgggccccacatatcattctcaccactcctcttcttcctcctctatcccaaactcccctgtattcatctctttccccctcttctctgtcctctcttctccatgcatgcatgaggagacgcggcgcgcggcggccaggcaaggaggggcggcacgcagcggctgggcgaggaggaatgcggcctgcggcggctgggcgaggggggggggggtgcagccgggcaaggagagaggcggggcgcggcggccgggaatgagggatgcggggcgcggcaaccgggcgaggaaggatgcggcgcgcgggacgcagcgccgccaccatggcgcgatggatatccgacgaaccgtgcgctcctcctcctcccccggggcatcagtttcgtcacatccttcgagacagtcgcggtgacgtctcactgcattgcctgtcgtatcgtcttctctctagcctctcttcggtccaaccagcgacgagaaatgcagagactccagtggtgctgtgaggattttcgcggcttccggtctccagcgaggtcgccctggccgcagcggtgcgtgccctccacccttagtttcgttttatacccaccacagcggtgcgccacctccctcctcgcccggccgccgcgcgccgcctctcctcacgcacgcatggagaacagatgagagaggagaggggtagagagatgaataaaggggagttgaggagagaggaggaagaagaggagtggtgagaatgatatgtggggcctacgtggaccctaccattttaaaattattttttcatgaaactgacatttgaggcccacattttttttattattttccaaatcaatttgccacataagtgccacgtcactgccacgtcatatgaagaccgagtcaaattagccacgtaggcgccatgtcagcaaaaaccgccatccaaaccgccgagggacctaatctgcgccggttttgacagttgagggacatgttgtatctggctttctggttaagggacgaaaatcggattcgttgataagttaagggacctcggatgaacttattccttctggtcatcacgatgatcgccggagaaaagctccagcgccaccgttgaggcttcttggtggaccccacatcgccgttgccggggaaggcagcggttgcgagacccataacttccttcaccacctgtcacgaactcgccacaaccactgaacgtctcgcctagtgaagattggttcaggaattagagatatgatcatcagatttagggatttgtggagaaaaaggcaagagaagcataggagtacgaaggggatttgatctctattcttccttccccaccaacacaaccgcgtttaatttgcaggtacagcaatccaagacagtagtacattgggtctgtttaggggagctttagattctgagaagcagctatttgatagtcagcttttaagaatctggaaaagctctgaaacccagcttctccagcttctggcttcttatttcatttttcagaatctgtaactacagattctcagaagctgtgaactgtttggggcagcttctagcagaagcagcttttgagaaaagctgcagctgggagaagctcccccaaacagggccattgtcccacctcgtggatcacacaaattgggtgcttcaatccactgcatctcaactatactcccatcagagcccaaattttcagaaatacaaaaaaaaaaaaactaagaaccgtagctagctattgtatttctctgtgtacataggagatagtactgaactactgatgtatgatgcgcaagatcacaaacttttacaacacccaaggatggtgccccatactatcaattacttaggatatggaggccaccacaaaatttcattgagatcaagctggctggcaacaattttggagataaagggtgccatgcagtgtttccaacatgtgcaagtgtacaagataaagagagaaatgaatagggtggcgcacgatcttgctagaatagcaatgagtactaggtctaatgctgagtggaggctatgcgccccagcacaaatcctagacttgttaaaccaagattgtaaccatttattcagtcattaataaagctctctctttaatgtaaaaaaaatacttaggatatggaggccaccacaaaactcaaaatcttggcatcacctccaattcctccatactgctgaatttctgtggaaaaaatgaagtttgtgtccggtacatcatactctctacatctatttttgatagtcatattttcaaatctgaaaaatttacttttgatagacatatttcaatccaaccatctattctcttaatgaatttctcggatttaatagtgactctctattcttcttcacaagattagctacatgggtatcgagaaatgtaaatattaatgaatcgcttgtttacgaggaataactagtagtttgtttaaatgaatgataagtagaattacttatccttggtcattgtgccaaaataaaatattactatcaaaagtagttggagttggagggagtatgttacagtgaaaacagctcatcattttcaggggataaaaaaaaagtaaagtgtattggcggtccttaaatttgtagggttgtgtcatataggtccctaaactcttaaaatacatatttaggtctcagaacttgtcaaagtgtatcatctatatctcaaattgacacatcccctctaggatcctacgtggcactgatgtggcaatgccacatggacgtgacgtgtcctttactttttttttcttcttttctttttctttttcgttttcttcttattcttttttttcctttttttctgcacaggtcacgagaagaaagggaaaaaagagaaggaaaaatgaaaataattaaatgggtcccatttatcaatcaaaataatgccatatcatatccgtgtggcatgccacatcaacgccacgtaggattctaaaggggttttggcgatttgggatctagatgacacactatgacaagttctaagacttggatatttattttgagagtttagggatctagatgacatacccctacaagtttaagaaccgcccgtacactttacttaaaaaaaactcaaacttcacttcagactaaagaaaaacccaacttactaccaataatgcatcgccattgatacaaactgcataaattcctacccccaaaggcccatccaatcattggacctggaagcaaagcatcagcaatgggatttcgctgcttctgctcgaaagctcaagctcagctcatcctactgctaccactactagtgctagcttcagcctcgtcatctgcagccaagcagcagcctcacaccgcctgcagcaacacttcaccagcgacggggcagccgccatgctccggccaccgtggtcaagtccctgcgccgccaatcttgggacttcttggtcgtaggcgagcaatcagagctccgcctccgccgcagccacatccaataacgtcgcctacctctccattcccggggcggccagtcccgccaccgccgccatcgccgtgcttgtagccgtcgactctgtcgttgcaggttcagtagaattcagaactttcaatcagcaagaaagttccatggatttactctgtttcagcgcacttcagctctcggcccctcccaggctctcaccattgtaaagtacgttctgctcgtttctgtcaagactcaagaccctttttttctgctcatttcgaacgagttagaagatcacaaggtttgtagtggatctttcgttttttttctatttttccggaagatgttttgtaattttaatctttactcctgagtacagtctgattatcaatcataatgcgtttgtccacaaatgttctattctggtcgagattcattcatgaaattactgttcaagattatggaaaaatatgtccaccgatacacagctggaagaatgaaagttggcgttttgatttttacagtgtacgaaactactgcactttgcaaacccagaagaacaaagaagttgaaagaaagagggaaaataaattacaagttctttaagaccaccaatgaaatctttgatctaacaacataattctctcctacatttaacaccaactacaactatgaaaaagctcgctacttcacaaagggccttctaggacaaaaccaagaagacggcgcccaatttgtccctccattctgaagccttcttgggtaagggatcacttccaatgcacgcacctgatcccaaatcgaacacaaatgcccaatgctgtaatccgtgatcctcatgttcattgttgccgcggcgcgccaagtagtagacatgattccccttgatcgtaggaaactccattgcagagaatgcgaaacattcgccatgccccaagaggagagcatgatcaccaagcctcgtccctctcttttccgggaatacgcaaggagcgcatcatttgtattaagaagaaataaagtttatgtaaaatgcaggctcgtcactctctcatggatctcaaaatgttacgggcagtacatcaaaatttgtccacttgccatcttggaattcacatgtcacattggattgcgaatttctcataccaccgcaaaactcaaaatctcgaccgtatctccaattcctccataccgtacgtcgaatttctagagacacgtctttgtctggtactacacgtgttacaatgattagctcggcattccagtttatttgttgataaaaagaaaactcaaatttcagttcaggcttcagaaaaaacccaactcctcaccaatgcataggctgcataaattcctgagacaatgagagcttcggcatttgtcaggaatgggatttcactgctgctttgtggctcaagctcttgtgatcttgctagtgctagtttcagactcggcaactgctggcaagcagcaagtgcagcaacctcgtcctcatgccgcctccagcaacacttcgccggcgccgccggagcggcctccgtgctccggccaccgctgtcaagtcccgccggcgccgccgcggttggggcttgtctacagcgaccgtagggcgcctccatgcgcacgccgatgtccgcctacgccgattccgaatccgaatccgaaccaccacccggcgtacgcatacctatgggctatggccacatccgctgcgtcgtccattcccgattagccttgcgccgcaaccgccgccgccgccgccgccacagctcttgtagtcgccgttgcaggtttggccgggccaaatccaggatcttcaatcagcaaggaagctagctgacggatttgctgctggttcatgcatgcacttcggttattgctaattgctaaattttgctttcagctgattttttttcagactttttggggcttttttttttgttttagaaaaaacgtgttctaagatcaccaggtgtgccgtgtgcaatccctcaaaaatgttttctttagacggacaacggtggcaactttggtgtcattgccttcttagaggaggcgttgtgtaggaagtctttttccccgtctttgacttcttctctttgtctggtcgtagacggttcttggttgtcgtcattaggttatcgtaagaggcgagtggatcttcttctctctcgtcctctccctatctccaacccctctacacgaggataactagaaacccgtcaatgatcttctaagcggagtcggtgcgcgggaggcgtttgtgaccccctttagacctagctgcgttgggtcacgtgagactagctgccaacgtgcggcgatggtgtgttgtcttttgtttttcctatttacgatcttccagtgttgtaatcatgtaatttttatatgttatatcagtacgaaacttcacactatcttgtgtgggtcgtttgaaaaaaaaatcacctcacttgtatcaacatctcaggtgattaaaattgtgcatcgatccttgtttagatgggagggactaatttcactaaaatacaagcctatatagtagtgactaaaatttatgtgagagggattaaaattagtatggacttatatttctgtgagagggattagtcctcccatccaaacaaggccttaggaatagggcacatagggataggtgacaattagcatatactccaatgtataatcacatcttaactattttctgcatccttcaactgagccttccaaacctattgaagtggcctacttgggggcaaatcctcatttcagtttgatttttacccagcctttgccttgacaaacacacatgtctcaaatagtgtgcatcacataattgtactttaatcctctcttcactgtactaatttcatatagtacataagcaccaactaaactaaaccatcgatttaaggactctctaggaatctatttaggaaaacataagattatgagaaccaacgggttggtagccagattttaagaatctgaaacaaaaaatctgacttctagttcatataactaacaacttctttgaatctgaataaaaagggcctctttgatgcgcaggatagaaaaaacacaggaattaaagtagtaggtttctcaaatcctacaggaatcagcaaacacaagaaaggcaatataagtcctttgatagtgttctgtgaaaaacaaaggaaagttcacaaagaggtcacaccgcttgctaaatgtgaagaatagaaatacaatcctatgaaaaattttctttctttcctatgaatcaaagggacatataggaaaaaatccataggaatttaaatcctatgaaaatccttcgccaatcctataaatcaaagggagccttagattctcagagaacctgcagttgtcagaaactacacgaaacagaccttaagaacaaagtacaagtcagcttgtatctgcccaaaggatggtcgaatcccatattgtggaatactccctccttcccaaattaatcatcatatcgtgaaacctaaatttttttaaattgatcatcatataaccgcatgagaatgtggcatgctaaagagtgtaattgtgcattattttttaatcgactacaattaatgtttaattgatgcgatttaaattatccctgatcttggtacataaatattataggacaattaatttgggatggagggaatacttaggatttgaactttcagtccaccacaaactcaaaatgttggccttacctccaactccaattcctccgctctgcagaatttcagaagaaaaaaaaatgtcttcatccggcacttcacatgtcaacagtgtcggtaggtgattaaaaaaaaacttagatttcacttcagaaaatccaacttatcaattatgcataaagccccatatgccatccaggcattggactcggaatcatccctctgcagccagagatgggattcagctgccgcttggtgatggctcgagctctgctcctgctcatcctagcagcgctagcttcggcctcgtcaatggctgccaagaagcaggggcgacagcctcgcggctgcggcggccacacctcgacgtcgccgacgccggagctggagctgccgccgtgctccggccaccgcggtcaagccccagcgccagtgttggggcttcttggccggaggggatcacctggagctccgcctccgccgcggtcacacccgccggtatcatacgtacgcccacagccgcgcccgtggccaccgccaccgccgcatccgcagcctccattcccgatcagcccggttgcgccgccgccgccaccaccgccgccaccgtgcttgtagtcgccgtcgttgcaggttcagtcggattcaggattttcagtcaggaaggaagctcaaatgatttgctaatctgtttcgggcacttcggaactattgtaaattctttgccttttgggggttcaagattttcttttgctcatttcaaacttgttcgttctagatcagctgatgtgtcatgtactcgtgtgcaatctctcaaaaatgttcatgtactcaggtgcaatctctgtcctcctataaatatgaaattggcacatcctgtgccggttcgttcagaaaaaaaatagtgcaatctctagaaaatgttttgctcgtctcacttggtcaccgcagtatttcgaatctgaaaagctggaattcttatttttaaattggaagctcgaattcttatactctaggatatgcaaattgcaaagaactcactggtagagtatcattcatgtgcgcgctcgaatcgcaagacaaacaaattcaggtcaaccatcgaaagtttcagtataaattcagtttgagttcagcagccgccgtgcgcctgcagtcacaaactgttcttggctacgatgaggctgttcgagctcatcgccggagttgccatcctggctgctctgtccaccaccacctcaaacgcgccatcgccggtcgccgtggcggcggggagggcggtgagggcgccgccgtcgccgaagccggcgccgcccataaggccgctcttccgggcgccaccaccacctccggcgaggtcagttcaaccaacgtgttcgtcagcgccgccaccacctccggcgaagtcagaactagctatgagttcgccgcctctcgccggcgaagtcggttcaaccaacgcctcagagctaccatgaatccgtgatctttcgtttactttgcaactcaacttttttttttcatgagaaactttgtaattttaatctttggtagtctggttatcaaatcatgttgtccgagatgtttgtcatgttgagatctttatcaacgaaattacagatccagatcacataaaaaccgtccaccaatccacagctcgaagaaaaagttggcgttatgattttgtaaaaagaatctagaacatacaagaccgaagaacagaagtttggcgttctgattttgcatgcataaaaacgaaaaaaaacatattaacagatcaaaaagaaactagggaagggtgaaagattaaacgaaatgttcttaagactactaga

SEQ ID NO: 3826 - DNA, 830 bp, Oryza sativa
atttataaggcagaagttgaaaatcaacttgacagaaagataaaaaggcttaggtctgatcgtggtggagagtttttctcgaacgagtttgacttattctgtgaggaacatggcatcatacatgagaggacgcctccctattctcccgagtctaatgggattgctgaaaggaagaaccgcacactgactgacttggtgaatgccatgttggacaccgcgggactgcctaaggcatggtggggggaggcattgttgacctcaaatcatgtgttaaacagagttcctaacagaaataaggacaaaacaccatatgagatatggattggtagaaaaccatcactttcttatttgcgcacatgggggtgcttggcgaaagtcaatgtaccaataacgaagaagcgcaaacttggacctaagactgtggactgtgtttttctgggatatgctcatcatagcattgcctatagatttttaatagttaaatccgaggtaccggacatgcatgttggtacaattatggagtctcgtgatgctaccttctttgagagcttttttccaatgaaggatacacatagtggttcgaaccaaccctctgaaataattcccagttcaatcacaccaccagaacaaactgaacatacacatgaacttgtctctgaggaggatgtcagtgaagctcctcgaaggagtaagagacaaaggacggctaagtcttttggtgatgatttcactgtgtacctcgtggatgacactcctaagtcaatttcagaagcatatgcatctcctgatgcagactactggaaggaggctgtccgtagtgaaatggattc

SEQ ID NO: 3827 - DNA, 618 bp, Oryza sativa
cttcatcatatacctcctctgataccaatgctatgaaacttccagcttttttcttgattttcagatagcacaacacacctgtggttgcatgtacatgtaactatacaccatgtagtcccaccttgcataaaatagttttctaggtttaatatacttgatacagggaggtggaatctagtttcttgtatgcataaaatagttttctaggtttaatatactaatccttttattttcccttttcaatgcaacaggctctgtccagagcaataacagaagatgagcttatctacatcagagcacagtacaacttgctagaaccaagtagtacagatggtcgactatgcattgaaaacttcaggatggtaagtgatcttatgctatcaagtcctcgcaatcatgattttgagtaggttgttcacgttctttttttttttgagcatttgaattactgccattgtgacactgagactcaattactcttttcaacatttttactctccaggctcttttacaaaactctacagatgctatgaaggaatccagagcccttgatatcttgaatgcggtatgaaatgcccactcagctcacaatttcattatcttcatataaacatatgc

SEQ ID NO: 3828 - DNA, 3305 bp, Oryza sativa
cccagaatgaggctagctagaagcagctatgactatgatacgatcgagagacgcttcaagactgacgtgaagcgaccggtcgaaagcgaagagaagaaagaatccccttcaattcgttcgcggtggcacgcgcgccggccacacgttcgccgagccgcacaaacgagagatcgagcatcctgcgtgcggtcatgtggcgcgccttctctgcgccctgcaaaagatctcgcgcgcgcgcggagagaatgatccaggtaataacacgacgccgacgtgcggcggcggcgcggtctggaggcggtgtcagcgcgcgtcacgtcgcgccgccgtgcgcgcgcgggcagccgtggtgaaatcgctggctaccccaagacctgttcacttggatgataaaaaaaaaacttaccaaattttagcaatgttaccaaaattttaacatgatttcttatatagttaccaaaatttgacagcaaactaaatgtagctacttttttgataattttaccaaaacttggtaaggttaaaaatgacataaaaataaacaagcccttatttgaacgacgaatttgtctgggcaccatgcgcagattgtattacgtagtaaacctctgtttcatatcacgggttgtttgactctttttacagttaaacttgtttaagttcaaccaaatttatagaaaaatacaataatattttcatcacaaaacaaatatattatcaaaatatattcaatgttagatttaataaaactaattttctattttatatgttgctaaatttttctacaaatatagttaaacttaaccaaattcaactaggaaaaataaataaaatggcttataatatgaaatagatagagtatttacgtgcgactttgtcactttgggtagataaagatataaaaacttaatgaaatatggctctctggtgagaaagcgcagtacttaatacacgcagagaccaaatcgaattatgcatccactataaatataggagtttatccatgtttgaatttggggcaatgtcatccacgatcaggataattaagaagacacggaggagaaaatttccggtcaaccagcgaggcctatagcacgcttacgtttaagcccatcatagttcacctcatatgtgaccaccacaagaatatccttcatttccgtaatccacccaaaccgcctcgaaacagaacgcaaaaacaaacccgaccttgaactcgaaacaggcgcacatcccacacctacccatttgaccgtaccccaaaacaaccgagaaattagcgggagagatcgacaagcaagaaacacacccgaaactaacccaaacacgaacaaaacccccaaagctaataaaaaaagccatcctaatctgaatcacaccgcccctagccgcaaccccaacaaaaaaaaaaaatccccttatccccaaacgcgactcgcgcgcgcgcggtcgcggcttggctaacgacgcgcgacgcgacgcggccacgacgtggtttggtttggtggttacggcgcaacggccggttcagaccgcgagatcggctataaaatccagcgcgcccgcgtcgcaacgaggagacccctcctcccctcggcaacgtaacacaagagaagaagagatcgccatgtccaacgtgcccacctccctccgcgactcctccctcaccgtcttccgcctcgccatctccagctccgacccctggcccttctccctttaaccccatcaaacgcttcttcctcttccaagaagatcacaagcttcttcgtgttcttgttcttcttcggatcactcggttggtttcttggtttcttggtttcttggattgttgcgagatgcacgggaagcatcagcatcagcagcagcagcagcagcagggggggatggtggtggtggcgccgaaggggtgcgtgacggtgagggtgggggcggagggggaggagcagcggcggttcgccgtgccgctcgcccacctcaagcacccgctcttcggggcgctgctcgaggaggccgagcgcgagtacggcttcgcgcagcggggcgccatcgccatcccctgccgcgtcgaccgcttcgtccacgtcgagcacctcatcgtccaggacctccacggcgccgccgcctcccacctcctcgacctcgactcctcctcccaccaccacacccagatccacctccacctcccccgcttcgccggttgcttccgcgcctgatccttccatcatctccatggatgcatcgccatggcggtggagcggagctcccagattgctcttcttcttcttcttcagggttggttggtcgattaattacttagtttagctagttttttggtttccttttgcttcgtcctccgatctctcggtttgttggggatggatttcgattgggtttgtggacgggagaatcggaggacggattcgatgctgatgacgacgaaaaattgagatcgatctcaaaagtgtaaagacagagtaattcttcttagtagctttattctagttttattttttttatcttttttctttgcttgtacatccacttcttgaaacacatcaataatacagtatactttgatcgatatccttgttaatttaatttgtactttgtttttttttgctaattgtttagcctttgacaacgcaattgccacatcacaaacgcgtggattcaacgttatttataatgataaaatacgtcttttttcggcaagcatgttgctttcgcttgaagccttcgacggacggaattaatttcgaaggaaaacttcacacgaaatgagttataattagtagtattattaatctttgcgtgcgtttggtaagaaataatctttgtgtgcgtttgggaaagaaatagtcgctgtactggtttaaagacagaattagaaacgtaagtactttcgttaaagttgtactacaattacaaactcaaattggcgcttcatatattccgttccccacctttctcattactcattagcttattcctaagtaatattctatattccgtgtaatattctttttgaaggaaggcaaaagcttacttttatagtgatattgatagagaagtaaaaacctctctctgataatctctcttgagttttacggtccccgccttgatttaagtttgcaaatattcgggggctaggagtatttacatggtctgcattaaaacaacactgaccaaaaaaaaagttgtgggaactactctccgaaggggataatctgtgaaatttgagggaactactctccaaaggggataatctgtgagttttacggccactgcctttgtggttgttttaa

SEQ ID NO: 3829 - DNA, 1188 bp, Oryza sativa
gcatatttttcacccaccaacttccacaactggacaaataacaatctgaacccattcgacaatgatttttttatcacattgtagtggcattcgcttgtgtaaactgtaaactcctgttatgattgttttgcttatatgggtcctatttagttaggtccgcataaaaaaaaacttacttaataggagattaggagtttgtgccagtaaactaccatctgaatcaaaaaaaaaatcactggaatagggttggggttttatttctagttttcatagttcggggtgagatataatcatttttttttggttcagcgtgaaaaggtggacttcaagaagaatttgagagcaactttacaaagatcaaaacaatcaactatgtaaggatggaaagtcaacaatatcttaaggaaagaaaagaaacgtactccatgattatgtagacattaagggcatcctcacatgcatcataaaatttgacaagattcgaatgcccagataaagccttcagaattttcacctctctacgcacatcctcaattgatattgctgttgtcatctgataaaaaggaacacaaaattgagatcatgttccaaaggtaaatgtgaatatgtaataggacaacccatagaacttctattttatttggccaagtgcaaacaaaatttgtgctaactgattgatcatcctattagatacttgttcaagcattaaaattaggtacttgtgtaaaaagaaaccattgccgacatgctgatacatactatatatattacagaaaggaatgcaattacatgagatgcaaatagaacaaaatacgaaagaattgaactacattaaacaataaatatgattggggctcagtaatttatggaagtagtcttctgcagtgaataaaattgttgtgaaatggaatagtcaataacaatgcaagtaataatgctcgatcaaaatgtgtttacatgcacaagaaacatcaatgctctcgtgcacatatacgtgtacgtacatttgttatgacaatgtatactagattttggcggcaatttgttgggctgacataaagaaacaggaaataaagattgaacagtgtctaattcagtaatacatgtgatttcaaggacaatcatcttattatcaagattactcaactaaggaaccaaaatatagaagatacttattcaccacacaaa

SEQ ID NO: 3830 - DNA, 615 bp, Oryza sativa
tgcaaagagatatgcaacagttttcaaaagttaacagattcgaatgggatgaatacatagtagtaaaaaagaattgacaagagttgcataccataattgttgcaaatttctgcatctactaatgaatttgatgagctcaggacctcgcacagtagcataactcagattaagtgatgtgaggccttcacatacacaatagaatgctggcagataatctggaacagcatcccaagccccagaaagccttctcaagcttttacaacctccaaacgccgcctccagctttgcaaacagatcggaatggtaatcagcagagaatttgccagttccgagttcaactagctgaggagccttatgaaggaggctagcaagcttgtcaagggggatagcattgttgagcttaagagtcttcaggttgtgacatctggtcactaaccgttcaagtacagtgatattgacctccccctctaagcatgaaaagtttagagttactagagaagtgaacgattccgggaagaggctgagccaatgaatagaacaatcctcaatctcgttctcttgcaggtcaagttctcttaggtgtctgcaatattagacaaaatcagaagttgaaga

SEQ ID NO: 3831 - DNA, 964 bp, Oryza sativa
acagaaatttgttcacccaaaagcacataaagtcataaactcaacattattgtgcagaaatattcataaaaatgaagctctaataaaaaaaatctttcaatttaaattgttccatcaaatttgaacatatggattttggtgcagaaacctacctttctttgttgtagcgctgcatcctttctgggagtcaagatgggaacatagtttaagataagaagcaatgcatgtataacaagaagatgcgtgttttgttaaattatacacctgctaatcagattggcctctggctctatagcatcagcaataacagcagcctgaaatgtggacatcagagatgttgacacaatacatcaaacaatgcattgaagatgcatagctgaggggtatctgtgtatggacataccatgtgcatggacttagcatctccttcctcactcctttcttctgcaaggttaaactggaagatgcatgtttgagtgtttctaacaaattaaagcagaaattaaatccaaaatcgtgatttcatctcactttttcgtacatgccctcggtttccacttggagtgagttaatctgcaaaggaggcatcaaagaatcacactagtgttgcatataagaaaggttaatcttaaagtggagaaagatagctgttttggacttttggcagatggatccaaaagtccatacaaacagtcataccacatttcgctggaacaagaatcaaggactaaacatagatgagagcaaactcatattttaggacaaactcaagtagtatataggatattctgcatttcctatcattaattttcttatcctcctgtgttttcgaagaaaaaaattcttagaaaatgctgtttatgacaggaatcacctcatcatgaagagaagaagatgtgcgccgcgctcttagagagcttccaagatcaactgatctcctaaggatgatttagcctatattact

SEQ ID NO: 3832 - DNA, 609 bp, Oryza sativa
agcagaattttcatgggaatcattcctttgacattaacacgttataagcatctaaaatactgtcacaagaagacttcttggtcttcaacttaggaaacaccaaaagtaaatccagatcatacacaagtaaacagaaaaaaaaactgtccctttgcaaattaaacaccaagaatagatcaaatcttagcagaaagccacatctacttccacatactactcaatgaagttcaaaacaaagttaatataggaatcatggaagaacaaatcacttcagctagaccatgaactcactaaagaacactgtgaagaaagaaatggcaccaagaaatctgtcatgttttagctaaaaagaagacgaatcaaagcttgggccgtgaaagattcctctcaaatccaagaacaacccaaagatcccatgcttatttagctaaaaagatttgacccaaacaacactctccacctcacctgcaaccggcagcaatggcggcgaggcccgcggtgctgaagccgtcgcaggagacgaggcggagcacctggaagttcctgaaggacgcggcgatcatctcgaggcactcgtcggtgaccaccatgcgcttgaagctgaactcc

SEQ ID NO: 3833 - DNA, 9810 bp, Oryza sativa
ttcccaaaggatgagcgtttgaggatcagagctaaatgttcttggaatggctgcccttggatgatttatggagctcaaagaaccaagtgtgattggtttcaagtgtgtacctacattgatgtgcataaatgtccacaaaataaaaaaaataggcttgtgacatctagaaggattgctgacaagtatgagcacttgatcaaggccaatccagcatagaaaattgatagcataaaagaaacagtatttttggatatgtttgccgatgttagccattcaaaaattaaaagagctaaatctatagttatgaagagagtgtatgaagctgcaaaggaagaatatcctaggcttttttataaccaactagagatacttaggagtaatcccggtagcactgttgcagtatgcttgaatccagagtacaacacacctgtttttgaaagaatttatatgctttgatgcttgcaagaagggatttatagctgggtgtagaaaggtgatagatgaataatgtgaataagaagtgtgtactaattgtataacgcactattgtagctggtcatgccatgcacgtcgttaattgtaaattgtcgataaataacaattcttttgctttaggaatagtatgattaggtcgtgtccttttagttgtattttctccaacttcatgaaaaaacatcaatatttaccaacatacctcagcattaggagaatactcatcttcaccagaccaacaatctaagcttgactttgagcaaataatatcagaggttgtcattacaattcccttcttccttgtttcatcccaatcaaccagaaaccccgagcagtgtgctaatggttttcctcctacaaatatacatacatacatatatatataatatcagcaaacaaataaaattttctattatatcaaataagagatgtgaaaactatgtaccaatggatgaagaaagtcctaaaatgaattttgcagcaccaaggactgctttctttgcaggttcatagatgtccaacaactttgggtccgaaagacacaaagatttacttgagttaagtgtgggcaggctcagctgacgagctacaagaccatcaatgcataagtacatgtcaatttagagttagaggaataatttttttaatcttgcaaaacattttttattaaagagaaaacgcattaagaaagtaacactaaaaaaatcctccttttttctattagatggagggtggtactgttctcaacttttgacttacaccatcattaacaatgagttatgccaaatctgcattatatgtcaacagcataaagaagaaaatgaaagaaaggaacattggcatatacaatatacatagtgtacaggtcagtcaactaatttatagagattgctaggagctaaataaggtcactagctgtcgatacaggatatgcacgatctgtataatcaatcaaccataaaggtatatcccaacagaaaagaaggaaaactggactgaaaattacctctcttttcttcgaattcctcacgtctcttctggtaagcatcaacaatgtccatgtcaggtggctcaaggatctcttgaccatcagagtcatacccactgaatttgaaaggtaataagggcatgtggagtggagagctcggtgcagaagatacctcctcctcctcctccccttcattcatcttctctggcaccttttcctctccatcctcacaactatgatcggcctcgatcatttttctcctcctcttcatcctttgatctcgctcagatgatggtgaagcaggtgcagatcgggagcaatgcgatcgccccttgctgtcttgctcattaccacggccacgcacagtcctcaggagctcctgcaaccctggctgccgccttgttgcccttgaccgagtgttcctcaaccttggcacatcgtcctcttccgcagcaacaggtgccatactctggggttgctcaattttcctgcagctgcatatgtagaatttgcaaatttagaggaaaggcatatatgtcgtgcttttctgaaagcatgattgtactccctccaagttgaaaataattgttgttttgaacaagggtatggtctctaaaaaataactttgaccactatttagtttcatattataagactttctagccatgtccacattcatatatacgttaatgaaggaaaaaaattgaaaatatacatttttttaaatattttgcgtttatatatctgcatgaaaaatatttgcacaaatataccttcaccgcacggcggggacgcgggaccgagtggtgccgctcttccattctgcgggaccggcggtcgcgtagaacggccgtgcggcaccgtctcgctcccgcggcgcggaagtgcggcaccgcctccctctcgcgcccacgcgtcctgagacggtcccgcgtctccgttgtgcgggaccgtgccggtcgcgcgtcgccaatgcgcgggaccgcgccgatcgcgcttcacggttgcgcgggacggctcgttcccgtcctctgccacgcgcttattatatgacagcgaatttatactgcgtggcactatttaggactgtttttttgtactgtttgtcactgttttggcactgttcatgggcgatcccgcggttccaatgtgcggaagcgccccatgcacagtacgaaacagtgttgcacagtgcgaaaacagtgtccaaacacttcaacagtgttcaacagtacgcagagtataaaaatcgctagcacacacggtgccgcgtattggaaccgcgggaccgctacagtcccgcgttttggatgtgtgcatccgtataggacgtgcagagttcatagtgagggctgcggaactgtgggtgggccaatgagtctatgcgcgtatgtacctgcattcgtgatcatgcttatgaacgtgggtaatggtaaaacttcttataatatgacacgtacgaagtattacactattttccactgtatccatacctggtttgcttccccttagggatttaacctccaagaaccgaacaagccctgacggggctgagccgaagaggctattctatgaaatctatagaaggaggaggaggaggagggagaaaggtgatgtcagcggaggaggaggatgagcagcagcgtcggcgtcagcggcgagactactcatcaatcttgcccgccaccgccaccgccgccgcagcagcacagcgtccgccagaaatcctagccctagacatggaagaggaggggagaggggaaggggagaaactcaccggagagaaggtggccaccgtcttggtcgccgtcgcctccgacttgcgcggcaccgcgccggccgccgcagcgtcgccctcgcccacgagagggcttaaccgaacgcaaatctcgcataggccgggattctttccacaccgggttgttgggccgttacccgggccattcccagcccaaccgaacatggcccgaaaccaaagccaggccgcctcgacggaggctattctaggatagcgacccaatctggcctaagagatagatgggcctgaaatgcgccgatggtcaggcctgccacatcaccacttcacttggccctaatactccttttttagggcccatctcaggataccgagttgctaccccccgacccggcggccagatcgcgagctgggaagaggcggcggcggcgatgagcgcgggggtgggcgggctgcggcagctgctggcggcggcggtgacgacgggggtggcggaggcgcgggcggcgatcttcgggcacgcgctgaacccgacggggaagcgcgcggcgaccaagctgctgcggaagaagatggtcggcgagcagctcgcgcagtggtacccctacgacatcaagcgcgacgacccgctcgtcatggcgcgcgaggagaaggcgtaagtgctccccatccctccacttgagctgtactagcttgcacgctgcctggttgtgcccaccatgtgttcgttcatttgcttcacggggagggaggaggtctgggttacgcccaggacgtgtttgctgatatgcctaggtgacgaactataagagaagtatccaggatttctgctctgttggggggcagtttctgtgtcatgtgctcgccaactgtttgttgatatgcgtgagaggtggtgacttctgttggatcatgcctgataggtgcttgacgatatgcgtcaccaacgcgacttttgttgctcgattcgtcctgtgttactcatccgtgcagccatggtagatttaccggttgtctgttgtgttgagtaccatggaattttaccgatttccacttgctaggtgcataatcctttggtagggaattgctgattgtggtatgattaggtgaggttgtggatccgttgggtttgaaatgagtagtattatcactgcactcaccactgttcttggcgcactgcgaatattattggttggttttgataatttgatggctttgtagctttgttcgtcttgagggaacaagttcaagccttggtttctgtttacagtggattcattagtcaccaattgtagtgaattgaacttccacatccatgatatatataaccaccgaaggttgagttcatcttgcccaactttgaccccaaattctcttgaatattgtgttgttataatctgatagaaatgattgatataatctttaccactcgagttatgctgtacagtatgtatgtggattacatttagttgattatcattgtatttactgtttttaaatgtacggctaaagtacagaaggtgttcctgctattcttgtcaatttgattttatcgccatttccccctttatgccttctgctttttaactcgtatacaatgataacatggaattttgtaattaacatcacatctctcttttgtaggcgtttgtcaaagctggaaatgcttaagcgtcgcgggaagggtcctccaaagaagggccagggaaggcgtgcggtcaagagaagcaaatagttgccttaattctgcatacatcagttcctggcgttcatcctgtttgggcgctgaaatatttcgttgttgtcagcaatgtactctttctagtaggtcaaacaagatccattggcaatgaaatttgctttccttcatcataaaaccgatgtatttgtgctgccggcatgaatgcaagacaattttctattgattgttctgttgccataaatttagctttggctcaaaagattgcatttgagtgtacacttgttaaccttagctctgtcctctctttcttctcatatacagaattcgtattttggtattgaaatgctacaatatgtgcaatccttttcttgcatgcaaagctcaattttggcagtacaatgaaggctcaattttgccagtacaaaagaaagtatgaacatggctggttctctattcagctaaaaagaaaggaaaaaattatcataaatctgcaatctgatctgatctcatctgatcaacaaattgcatttcttacatttggactcactcacatcctaaaaactgatcctatcatcactacagtcattcacacgaggacacgcaacgccaaagctcctcaatcgccggcgaccttgtccggttcaggcgacacgtccgccgtcaccggcggcggcgccggcctgaccctcctccgcgtggcgagcacggtcatgccgccggcgaggcggaccgtgtaggtgcggtcgttgcggatggtgaccgtgccgccgcccacccacgcgccgttccggagcacctccaccgccgtccccggcggcagcagcggcggcagcggcgtctccttcttcttcttcttcgccttcttgctccccgccgccgccgccgcttctccgccgccgcgcggttgctgcgatcccttcgtcttccacggcggcgggctcttcttcctcgccaccatagctcgcgatcgatcgatcgcgagctctgatcagtgaaaaatcaatggaggagacgagggggctcgtggatttcgtggagtatttgtaggcggcttttgctcgctctcgcggggtgaatcggagtccgactcggattgtgttggacgacacgttacgtagcgctacgctacgtaggaacgaacgaacgacgcggacgcgcgctcggtagatcgatgctaccgactcttgacacgatgtacgtgacgggcaaagccaatgccattaagccagccgtgcactgcaactggttggtacatgtatgccacggacgccatggcgacgaactccgacatttctgcaagtccgagttgtcgctgctgtcgtgtacaaggcacgtaggtttttgcttcatattttactctttatatagctgtgttagttctatagctgttaggaagaagcacatcgagataaaaaatctgtcatttttcatgagcacgtttacctaactgcaaaaatagtatacaaattaatatatattttctaagtatgaaattattattactcaattaattgtatgctaatgatttatctcgttttacacatcattttaatcctctccaatccttttctctcaaacacacttaatcgcaatcaaaatatatattttagaagttgattttcatgtttttattatagtttactttttagcatagtcactaggaacaataagcgttacgaacttataattaggtttaggcaaaacggcttagaatcagaacgaagcatgaaaaaaaaaagaaggaaaaagtgagaagaggtctcaaacaaaagtaggcgcttctcctctccggctaaatctcgccgtgcacggcgtcgacgcaccggccgccgtcgaacaccgcggcgccgctcccgttgcgcgccagcgcggcggccgggaagctgagcacgcacgcgaagtcgctctcggcgccgttctgcacggtggcgacgtccaccttgatgacgtaccacccggccgccctgtcccgcgcgagcgccgccgccacggcgcgcgcgcggcggccgggcggcacgcgctgcgtccccgcccacgccgccgcacgggcgtcgccggcgccggcgccgcgcgccgtgatcccggggagcgccgcggcgtcgccgagccgctgcccggcgtacgacggcgccgcccggagcgccgtgcaccgccacgtgtagagcccgcccgggttgtcgaaccggagcgtcgccgagaggttgtacgccacggcgggcgccgcggcgtcgaaggcgaggaggcggagctcggcggaggcgacgacggggacgacgtggtgcggccggaggagcagccgcggcagcagcgacggcgcgaggacgagtaccgccaggagcacggccagcggcgcgaggcacgccgcggtggcggccgcggccgccgccacgcactgccgtcgccgtgcgctcgccggcggcgcgggtggctgatcggtggacatggcgtacacccaaggggagtggattgcaaatttgcaatttgcaatttgcaaagctgcaaatgtgctaatgagcaagcaatgcagaatagtggggctttgctttgctgtgctctcctcttctccttgaaagagtcgaactttttttttttcttctccttgaaagaatagaagcaccattgcaaaagcaaaaggagaggaaccaaccagtgcactgcacacatcttgttgcagcagaccatgtaatttgacaacgcagcatactgatgattccatgattaatccagcacttttgctttaacagaataataaattaacataccagaaaattaaaaaggagagattccaggagagagaatttagttttggttccgatcaaaacttttacatgaatgaatatatatgacaagtgcgcaaaaacaatgagactctaggaccagcgaacaaaaacaaaattggcactaggcctcgttccattattatgtttctgctaaatttctgatccggttgggctcccgtgattgctaaagtcatcgtcgagagatctcctcgtcgattcccacagctgagactcgattcccagcttcctcagctcagtaagtcctctctcaacttgtttacataattttgcaaacaagaaaagcatcagataaagtaagcaatttagccggtaaattttgtacaagacagtcaaaacgagaagtatatgatttcaaactttgaacgaatagtgcaaaggatggcagactttgagacaagagtttcatcattgttcagagaggagattaccttctatgatatcgatcgtagaaactggatgattgccttgttctatccaaaactgtagccgctcatcagctatatcttcttctatgtcatgacttttggcccgtctccagaagtaggttaaccatgactgccatatgtattcatgagttcttgtacataccagttctgaccgaaaacgaatttttgtgcaacatcacatcgattccaggagaaaacaaaatgccagagtggtttttcacctgcttgaagcgtacgtcgtcttgctcttcctcgcttaattctaggaccaatgacagcatatgtaattagaaagtgaaattgttattcccgagctatggatgtaaaaaggaatattagtaaagtagaactaacctaatgactctggagggttctggccttcagaagatggacctgcagtaattggaaacttaagtcatagtagtaaaactacacgtcacgcattgctgcaggccattgatgtgcgtaataaagttgcaatattcagactggaagttgtattcatctaatagaatcaggtcaacatagcgacatagtaatttttttgaagtctcagtgaattgtgcagggatgattctagaaagcagttctaatcacaataaactgcaattcttcagcacattaaatattatctaatattttgttgtgaagttatttcatatgcaacatctgaataaatgagctatcttgtaaatacggttttgttcatggtatcacaatcagtcagtgtatcacttctcatcaggaacgagggaattggtataaccagctctcaaaatcccaagctatgctatgtgttaaacatcaaattgtcggtaccctcacagtgaggctcgcatacattccccatgtactgaatattaagaaaaaaaaatattttatgagtttatcttgatagagagaaatatttcgagataagagacctgggaatctcataaaacaaaaatattataagaaaagaataagaaatgagtacattttggagaagccacctgagagaggtctgacgcgtcgatgttctgataaagcaagcatgactgcgtcctctaccttcaaaggggatattaaattattgagaccgaaacccaaataaaaataatagttctctaccattccgtgggaatatgtaaatgaaaattcgttgacacatatattgcatctaatatatacaacacaatgataaagctagtcaatctaatacttcctctgtttcataatgtaagactttctaacattgcccacattcatatagatattaatgaatctagacatatatgtgtgtctagattcactaacatttatatgaacatgggcaatactagaaagtcttacattatgaaacggagggagtagtagtaatagtctagtagcactcttaagtttcatacatcactttgcatttcactaattacacaaaaaagtgatgcatgaatagtgaattagcagtctttgtatcaactgatgagactgaaaccaaatcaaaatattttgaactaacttcatcaacactaaaactgactttaaaaaaaatgagagaattgacagagataactttcacattctaggaaaaattcattgcaaatttatgaacagaaagaaaatgaaagatgaacaaaatattcaag

SEQ ID NO: 3834 - DNA, 588 bp, Oryza sativa
aattcagttcaccccgtccaacccagttatcggattcagcacaaaacttaactgctacatagtccaggaaccagcattacaatcttacccacatactttagttatatccagtatatcaatgcattatatattgactacttgtgtgttgagtgtctcaagtactctttgggtttcaggtcaataacaaaagaggaaacacgctattgcaacaatgatgctatttgacagttcaactccaagagaaaagtcgcaccttagagcagattggtagtgggaaagtgcatcagaaagcatattcatagctgcaaaaacttgagccaacttgatgtgtagagaatcatctgtccactgtcttagatatctttcaagcagcaatactgcatccttatttcttccttcagcgacatgcagatcagccaaagccaatgcatgtccagaaatccaggttcaagacgaatggcggattcataaaacttcctagcctggaaaatgcgcaatgaatatatcaaagggtactattattgatgggaagtatgcaaactataattgtgaccaagtgacttactgaccattaccaaaatataattg

SEQ ID NO: 3835 - DNA, 734 bp, Oryza sativa
  unsure (1)..(734): unsure at all n locations
gctaaggtagaccatgatctgaagcaggtaatatccgagcttcaaagccttcctctcgttgcctcctatgtcgccggccgccgcagcatctctgacgaagctcgctccttcctcctcgccttccgctccaagtctttcaagaagagccatgagaacgatccacccgaggacaacaaggcctctaagcccaatgccgccaccgccgccgacggccagaagccgccggcgaagaagaagccggccgcgaggcccggcgacaccaccgccgcctccgccaaggttgccggcgtcaagcgcgccccgtctgatcgccaggaggagcttgccaccaagaagaaagccaagctcaacaagatcaacacggtcgccactgacaagaaggccgccggtctggagctcgccggcgcggcgcctgcggcggcgaggaagaatgatgcgatcgcttgccaggaagaaggagaaggagccggctctggctccggcgatcaaaacgccaatcgcgacggcgctgatgatngaagttccgccgaagaccacgctgccatcggtggcctccctcaaggcaaggttcgcgcggttcggcccgctcaacgtcgacggcatccgcgtctactggaagtccacatgtgccgcgtcatctacaggttcaagtccaacgccgacgtcgcgttaaagtacgcgcgcgccaacaccaccatgttcgggcagggcgcgcccaactactacctccgcgg

SEQ ID NO: 3836 - DNA, 929 bp, Oryza sativa
aacattcaacatttgtgaatgtcttcatgcagcgtggttcacagcagactacttccacgtagtccaatttcactgccagaacagcacaaattaatttaattctggggataccattagcatgattaattatataatgcatggattgagctgcagttttttagttctgaaatttacaaggcagcgcctgatctactataagtaactgaggagataccatgtgattcttcatgtttcttcatctttgaagcatacttgaaaaccttgttacagccctcctccttgcaaacaaactgccggttgcttttagtagcagtttcatcctcatggatttcctttacatgcctttgcatatttgcctttatactgaacttcctaccacaaccatccatagagcaggtaaacaacttcccttgatgcttaagcatatgacggttcaagtgatctttcctaatgtagctgaaagggcagtcttcaagtgggcaaatgaacgatctctacagtcaagaagggaacgagtcaaaactgaagctgctgtaagcttacacatttctttcatacttataaattatctaaaataaattatctagtaaactggttaacggaatatgcaacgaatacctaaatgttcagtgttttccattaagatgatagagataaaagggagtataatcaccatagcgagctgagaaccaatgatgaatagtcctagctttctgaggtgacattttgatgttggatcctctcacctcttctcaaagctcccaaaaggagatccaaagaaatagtaggatgaatgaaggatatttgctaaccttattctccaaaggatccataacctattctattcaatgcctactccctccgtttcaggttataagaagttttgactttagtcaaagtcagactacttcaagtttgaataattttat

SEQ ID NO: 3837 - DNA, 2015 bp, Oryza sativa
gtaggagaacttgccaccaactttgtcctcctctctaccaggaccaaatctacttgggtcatatacattagggtccttatagatgtagggcagtctgttgccgacagtcgtacaggtggccaatgtatgtcccttggggatttgatacctgtggccttgtcttgtttgtacgctgaagctcttgcttgcgtggcgtatcagcaggtttgctggagggtgcaaccgtagggcctctttgatgcagtgagtcagtgtggtcatctgtagcaagatgccccagtttatgcgatccccatgttgctggatgattcttttctgctcttggatggcggctgccaagtagcttcggtggccatggctgagcaggcaagctcctgtccatgtgctggtgctggagctcgtgtgctgcgcagcaaacatcatgcaaatgagtagcccggcgatctcattctcggtcatgcagcggccgttgatgtatttggagtctaggaatttctgtagcacatcatcctcagctacgcctgaattcctgcgtgatctcactgcctcgtggatcatctccccgagcatagcacgggctttgtcgcgccgacggtgctgtggggtagggagatatgggaagaagaggctgatcaagtggaaaccgttgtcgaagagctcatggaggagtgtggatacttgttccaacttactctccccgaactgttttccaagcaagcatcggtttgcaatcagcaggatcaggttccccatctcatactttatgtccactacgccatcttccccccactgtgcaaagtagccctacaaattgcagtggccaatcaatctagctaggatcaaaattgagacatatataatacgcatgggactagctctggcatctatactaagtcataacgcaaaataaaacatatgaaaactctctctctctctctctctctctctctctatatatatatatatatatatatatatatatatatatatatatatatatatatatattactaaccagcaaattgcaaaatcgcatataaatatataggaaaaatcaaaccaaaagtcaaaagtatgcatgataccacataatcaaagaggcagatctcctgccctgaattattcagtgagatcatcaaatggtaaaagttcacgctagcaaattaacctgctaacaaagaatgttgttcaatcaataatataattaatgttcatcatcatctcctgttggacatcactacaccaggcatgcctgctagcttgcttgcttatcacatatagccaagggcgaagatagcatcaaaacaagggggtgtgcactaccattgaaaatttataaaattttaatgcaatactatacattttagtgttttcaagtgagaaattatgaatttaggggggttcatgtgcaccctctagtttcaacatggcttcgcaactgcatctagctagcgcctatatatatagatacatgaagtagttcttctggaagccggatccgtcacactggcaaacattttgatatatgatctctatatatgaataacatgtacaccaattgagtggaaatattcaatccctttctaaatatttgatgccgttaacctttttaaatatatttgaccattcgtcttatttaaaaaatttaagtaattattaattcttttcctatcatttgattcattgttaaatatacttatatatatacgtatagttttacatattccacaaaattttttgaataagacgaacggtcaaacatgtggtaaaaagttaacggtgccaaatatttagaaacggagggagtaataagttaacatgcatgcatggaagaaactaaaagaccaaccagctggaggataacatatagtgtttgcatattgctcacctccacctcatgaaccatagaatcaacgtggcctctcaagttgattggcttgatcgagtcggtacagaagcttatctgcctgctcctggtagccaagtccacgtcgtacagaaccccacggccgaaa

SEQ ID NO: 3838 - DNA, 2326 bp, Oryza sativa
cagcttgtcccatccgctcctgttcccatcttcccacgtatcgtccaatatgagcagaaaccttttgcctctaatttcctcccaaagggtgttttgcagcacatcaaaactgattatatttttgtaaccttgtctatctttacacacgagctctaacatttcatgtgttaggttcttttcattgaaattatcggatacacaaacccacattctcaaatcaaaatggtctttaattcttgatcatggtatacaaatctggcaagtgtagttttcccaacaccaccaacaccaactaatggtagaacacctagatcacatgatttcacctttgttaacaactctattatgttgtccctctctgtgtcccgcccataaaccttgtgttcaattgcaagagaagtcgtctgacgaggctttctgggctcactctgactgtgctttggcattgcaatttggcgtaaaatctccagctgaagaactccttgcacaggcttgcacctagtgcgtaaacaattcactatttcattgatcctcttagaaatatcatgtttaatctcaagaggcagcatggtgctatgagtttgctcctcttcttcctctcttttccttttctttccatgcataggccaactaatatttgatttatgctgttgcttactcgttggaagtaagatggagtggatgaagacacataacttccctcagggttagtacaagaagcagcagtagaacctttccctggataagaaaaaaacttggtgttaagggacaagcaaaagaaagccacttgtgcaatccactgctaataattaaggtttcttaaaaatggtaaataatggaagttgaaatgatggtaacgtaatcacaattaactgataaaaactgatgtgcggtgactggtgcctatggattatggtatttagctgctcttagtagcacagtaagctcacaaatacacaaatgcaaaagaagcatgaagcaagaaacaaggaatggaaggttgatgagtgtgttaccaccttcgatgtgttgctggagccggtagtaatcaagctcgtccatcacgtcctcagcatcataaagcagctcttttagctcatcaagtgactcggacagtggcctgttgtcaatcttgctactctcggcagctgcaagcaccatctgcatgctcctcatctcagtctcaagctcctccacttcttcagaaaggccaacttcacgagtccacacttgcatctgtccagtgaagaaatttccgaggatgctctcaaccacccatcctattgcagcctcaattgcagtggcaaccaaccccattatccacactgcaactaaggcgacggaggctagaacaagccctgcacaagaagatggatttagaagaatggagcgcaacgatgcattatggaagcaacagggatggcataacacaaggcatgcagcatataaagagtcaaataaaaaagatgtgaggtttacactgcaggttcttcagtacacagctgcaataaagcattggtaaacagtttattagtgaactgtctacggctccatgcacctatgcagcacagttatctttgctaatgaataatagtgtatccatcgaccttgacaaaactagtagctcatgatgctacagaccagttatttagcttaaaaaaactgtcgagataagttcatgcgtggaacagcattactataatacaagtggtacaagcggcagcgaaaaacattacgaaggaacaaaacatttctaaatagtagtaacctgtaaggatagtacaaagcaatttcctggaagcacctacaaaccacgacaaaagtaaggtgttgattcagtaaccatctcatctagctaagaatgcaacttgtaaaatataaaataggattaccatacggtgttacctaatctaatgtatcgacgagcttggagctgagggtataacagtacaggaatggattaccgtccatacatgatatgagtcgcaaaggcagctgcgtgagggtattacaatataccgattatgccgttgaactccactcgaactggacagatcaacaaccaacatagagaaatttcaggtttcaacttggaattgcaaaaaatttaacactgcagagcagagctggacctgacgtatcatcaaccggccaagttgagagggggatttcgcctctcacgccgatggtgacggatgaatacttcaatagtgtgaatggaaggataggacgcggatgcaactggaacttgggcgggaggcggatgcagctccgtcctccgtggagggcccgcaccgtggggggagcggagaatgctccccccaca

SEQ ID NO: 3839 - DNA, 3166 bp, Oryza sativa
taatttgtaaccactagaaatagaaggaataattcttgaaatggcttgctcaaaatagcttccccgctgtgttcaattttgtgggtcttgcaaccggagcttgactgcataagtgtgaacattagactgcatcatagtgagtaaaccttgctacttggtagaaattttggccagttgtgtgtgataagaaatcatttcttgagcaaatttgccgatttttgaaaagtgacaagcagcccttgtaacaaaaccaaggcagtagtatcttcagaattcagcaattatgtttttccggagggctaaatatggcagcccatatactctctgattgatgtgagttgtgatcctgctcttttttctaatgacaagttccaaatttccaacagctagaagtatgaatatgcaatgaattactttgcacaaaatgaatacagagagggaattattgtggccataaaatactgggaaatgtcaaaagcactaaaataccaaaattccattccatggaatggaatatatgcatacgtgttgacctgtcagtgttatgacaggctgttcatcctgacttgtgtgtggccgccgcccattttgacgtcaaaagcaacctccatttctctcatgtctccggccaaccgaccaaacatccatccttccttccgtccagctccagccattgttgattgctggacacagcccttgcttatctttgatgagaaatttaacgatatcccttaaagtttttttggtccaaagaaactacacaagaacagggcagaatctttgtacggcctccaagaaatgcactaacagagaaagaatcatcacgatgcagtgtctcagttcagggctctctgaatcatctgcattcagaagtcgctcaaatataaaagtgtagagtccttcattttctttaaaaaaaataatcagtttccacgtagagttaagaaactggaactgtctagacatctctcgtatgattttttggtatgcaaatatgagaagaagaaaatgcagccttgaagaagctggcccaatccaaagctccagcccgatatagaatgaaaccatgagcgcagcataggacgaaaccactatccaaaacagtgacttgatttgctccggtcttgaagatggggatgcgttataccggttttgcggttgagggatatgattcaatcaatagaagagttgaaggaggtaaaatagacttatttcataaataaataaggctagagacggcccaatacactaacttcactaaatgaatttttttcgtttttagattttatttttaatatttacagaaataatctatcgaccaaaaaaattgcagaaatagcccctgccgccctaatggtgggcggcaagctgacgtggcagacggtgggtcaaccgcgccgtctgccgccgtcggccaaaattgcgattaggcccttgccgcccgtacagagggcggcaaggggctaattgcaattttggcgcccataaagagcttgcggccgtactttttcatctgggtcccttgccgggccaaaagatttttctatgttatgttaataataaataaagaagtatttattggtaaaacttgttaatattgttataaaaatgtattgaagttggttgttgcgtaatttcatatgttaagtgaggtattattttgtaccttattcgacgtattagtactcggataatttatataggcctatcacagtctgggtcgtagaaacattatatggacttaaacaaggagaattatataacatgaagaaatagtagtacaatttgaacatgatacaagtatttgcattgcggttacatagatgatattagattcgaactaggagggaggtagtgcaatagttgaacacaacgacgatgtagtaatgggacaaggaagcatgacagtagaaatttcaatatgccaagttgtccgataatagctaacccctacgtgaggatccctcttctttctcaaaccgcgcccctacgtgaggatccctcttctttctcaaaccgcgctttagtaacactgtattgctctggtagttcaagctgcataacacggctaggtggagttagaacccttctggtgtctatccattctctgtattgacatctccttggtggttcctgggagaaaagaatagatgtaaagcaagcaaagttagtaaatgttgtgagaaaataaggattcatgtaatcaaaatattcttaccatgaaatcgtcgtcaagaatatttggacaaacaaagaaccttcgacccaatgttgtaggatttatggaatgaagaacctgacaacgatcaccacacctgcatcttggacgggcttcccatggagggagtgccgtagttagcacccgccagtcgctctgtagttcacgacattgtcgttcataagccgcttttctctgtaagtattgctcagtactttcggatgcgaaataccagcgactttcttgtaaacaagtggttaggtcgagaatgggattttctgtatcgacccactcgatgtatgcgcaagccgtagtgcaggtctgccgaatagagtagtgttacgaagaataaagcgattgcccatacggaatgaataagcatatgcagataataaaatacctcacggtcatagttagggcacctaaaaaagcgccttcctcgaatatcaggattcctcgaagccattagttggcatcgatcaccgcataggcagagaggacgctggcaccaaggtggtagtaggtatacacaaggatcgcaacgccagtttggatcctcaacacctcggcgtctagccattgacgaaagccggtcgaatttgtaatgaagcaagtggggaagagagtactgaatgtgactgagttctgaaggagtcgtgaaccgtgagtagctccccgcacgtccatgcccggaacgtcccaagctgagccccctgcaccgcagtaaggtgagaccggtgtcggtgatctattgccgggtccaacaactgaggtgtatcctgacgtgccatctctgaaaaatatagtgtttcgtattagaacaattcaaaaaatagtactgtaaaacaaaagataacttgcaaaattatgaaatagtaataaaatcatgagattaattatgtacaacaagagtacaggctatttaaatatagcaaacgttactaatgg

SEQ ID NO: 3840 - DNA, 2829 bp, Oryza sativa
gcacgagcagcggattcgacgacggggtgtacccagagggccagatcctggaggcaccaaacctcaggacattcacattcattgagctcaggacagccaccaagaacttcaggccggatagtgttcttggggagggaggctttgggagggtgtacaaaggatgggtggatgagaagacgatgaacccggtgaagggcggcaccggcatggttgttgctgtcaagaagctcaactcagagagcatgcaaggttatgaggaatggcaggtaaaaatcaggttctttgtttagaaagaaagaaaagaaatacttgaattgcaggatgccaagttggttagcatgagcataggaatcttgcatgcttatggggtttgactttagttttgattactgctgtataataaacttaacaagttagaggatgggatcactttctggcattgcaccattaatggacagataaaaaatgcaccaaacttttgaagtttctcctcatggtcatctcatgcttatggttctttatgtttgtttagcttctgatgacttggctgtctgttttataagctgcaatgtcaattctttaataggcctatgtaatctgggtagtgccaaacggccaatagcccaatgctgaccagaaccatattaatgttataatactagactcttcataattcctgaccagaagcatcctataaaccacatgtttatcacaatgcagtgtttctctgggtcagttttggtattccaggcaaaatattacagctacctcccacatgcctttgcaaactttaacaagatatactactcaattaacttagtttactctaacagatgcgattttttgtcaacattaataacatctaatcatatttctcaatgtgtaccctgcagtcagagataaactttctgggtaggctctcgcatccaaacctagtcaagctcttgggctactgctttgaggacaaggaacttttgctcgtgtatgaattcatggccaaagggagcttggagaaccatcttttcaagagtgagttcttattggtttgttgctaatcatttccatcatcttatttatatcatgaatgaagttctcttaggcatttcactgaaaatttggggtgattaccttgctatgcacactgtatttctttccccctgcaatactttgtcttctggagtagaaaattctaaatctgcaaacatataagtgcatgatgtgagaatatctcggggcagttacttgacttgattgagaggtatactgatgatgaaactggccgcatctcttttcagaaggatgtcctccactatcatgggaactgaggctgaagatagccattggtgcagctcgaggacttgcgttcctgcatgcctcagaaaaacaagtcatctaccgtgactttaaggcttccaacattcttctagatgctgtaagctttctgctatttaatgtgcctgcaaccttctcattattgagttcaaatgctgatggtgttctttggcagaactataatgcaaagctctctgattttgggcttgctaagcttggaccaactggtagcaactcacatatcacaacaagggtcatgggcacatatggttatgcagcaccggagtatgtagccactggtatgtgtccttacgcctaccctgcagttaattatcaacacttaacactgcatgtgatagtcatagtacagctgaaatagcaatatgtgtggaatttgacctctcagtcttcatatgttcccaaatttagcgtttttgattgtcaatcatgtcacttacatttttggatgcatgctatatctcctccttctgtccaatgataaaattcggaattttagctaacagacaatataaatagtccatggatgttgaatagaagtcaagtgtgaaaatgaatattgcctaactagaaaggaagcaataccaagtcattgaatatatagaatagtgggtatgcactagctaagtccagagtctagacatgtatacgcatgtgactgtagggctccatcttggacagatatggatgagtaacatgagttagcacctactgccatccaagtggatgatccatcttaggaaaatgtgtgctaacaatcctttttatgtacggatattcgcctaatgtcactttccactcaaaaaaaagttgacacagtgcgcacccaactttcctcaactcgtaccattaatatttcagagttactagttagttttgcatcccacatgaaattcagaattcaagtttctataatacattgtcaaattattattagctctgaagtacagtttactatctgtagatactttcttagctgccggtggttattttcgctttctcactatctgctctactaaatcatgactaggtcatttatatgtcaagagtgatgtttacggtttcggagttgtgatgctggagatgatgtccggtcagcgagcactagaccccaaccgtcctaatgggcagctcagccttgtggactgggcgaagccctacttggcggaccggagaaagcttgcccgcctcatggacccccggtttgagggccagtataactccaaacaagctgttcaggcggcgcagttgacgttaaattgcctggcaggtgagcccaggagcaggccctcaatgaaggaagttcttgagacactcgaaaggatcgaatcaatgaagagccgagcaagggatgcaagaggaagcggttcatcaagggaccatagccatggtcgcaccacagcgcaccaacggtcatcgccgcgccctgatggtcgccgtggatcaaggaccaatggtcacgccacggggtgcaggaat

SEQ ID NO: 3841 - DNA, 2719 bp, Oryza sativa
tgtgcgtgccgaggacttggggatcgacagtgaaccggtaggcgccctcgccgtcgccggggcgggggcagtggacgcagaggtaggacaggcgcggcgggcgggcgaggcagaaggagacatggatgtttacgccggtggtggtggtgcagaaggcggtggtgagagttggagactgcatcgggggagtacgtaagctctgtcttcgaggtacacccagcttgggctcacgccgccggtggcgtcgtcgtcggccggcagcggcggcggaaacagcaagggtagtagcacaccctcatccatgacataggggacgggctcatcaccatcatccatggcgaatcaagcggcgatccgatcggagatcggcgacgagggggcttgtttggattggattgcgtcgttcgatcgatccgaattttttggaatccccgcctatgtcgctcgctaattgcgatgatgatgtcgcgcgaagccatgacgatgctatttccgcggatcgcgcgggcgcctcgccgacgccggcggatggcacctcccctccagcagcccgagctccgccgccgttactcgccggccggccgatggtccttctccagccgccggagctccaacacgagtactgcgtatgatgatgtgttccttccatggattgctctccctctctagctttttcggttttcaatatgaaagtctattgaatgggtcaattttccttacaatcatcacattgcaggttttgaaatatgaaaacactgcaaaattagtttgtttctggcgtacagctacaacttactgctaactccgtcctaaaataagtaccgttttacattgtttatatccaacgtttgaccgttagtcttatttaaattttatttatttattattattacatgataaaatataaataatactttatgtatgactaattttttatttataaattatttaaataagacggatgatcaaacattaaacacgaatacccatgactttttagaacgaaggtagtagaacacaaatcaacccatcaattttatgattggcctgtcaaaatggtgcacagaaactacatgcccgtcacaacagtcgaaatcaagccccgagggacagagagatagactagagtgtaattacgctggcggatttgctataaaatttctgtaagtactcttttcatgtatttttgataggcatatttttaaatctgaaaaatttacttgatagttatatttcaatccaaccatctattctcttaatgactttctcggatttaatgcgtgactctctatttttcaacataagattggctacatgggcatcgagaaatgtaaatattaatgaatcgcttgtttacgaggaataactagtagaattataccaagatgaaatatgactatcaaaagtaaatagattgagtattttttttaccccttttatatttgtgatcatcggatcgcctcaagatttgtttataaagagaaataatattataaagaaaatttcacacatgtcacgcgtaagatcctggtgctaacaaaccaaaccatagttgaatacaagttttatataagttatatcatagttacagtgcagttacaaagtgtaacatcccgattttcgcctccatttaaaacctattttaaatacaaaatttattttcaaaatttggtacttatttgaattttggtttgtaccgttagagatttctactccatcatccaaagttcacaaatataatcctaggattattagagtccaatgtcccatttatagtacagtccatttacaattttcgaaattcaaatttcaatccaattcaaatccccttcaaattccaaatcccaaattcccaggaaaatacaacgtgatcctattcgtttggggtgaaaattttctcctttcccctctctccgtcagcccagcaaccaggccggcccatctccctcccccaatccccgatggcccaaccagcccagctgccatcttctcctctaggcagccacttgtgcgcgccacctgctcgacgaaatgtcgagccaccccgcaccgctcgcacaacgccgtgcgccgccccgagtcgtgcacgcgccgctccgcgacgaatcccggacgcgctgcctcctttttcgccggcaaaacccgccggccatgtgggcccccgccgacgactttctccgcctccctgtacccgtacccggcacagcgccgtgctgtggcctcccgcggtcccacgccgacgccgtccagcccgtctctccgctcgacacatcagtacatcacccctgccttgccctctttttgctgacgtccgcgactcgccaacacccgctaccctcggtgcaccgcctcgcctactcgtgcttcatcgcctgcggtcgagagtccacgccgaaagccacactgccaccgtcctcgctcccctgtgccaccatcaccatgccccttacctttgcctctgcgccatcgcttcccgggtgctctcgccgccagcacctcccctgccgccaacccggggcgccgccgcgtgagcgccgcatccacgaccgcctgctgccggtctcccgccagtccgccgtttacgccatcccttccccctgccgtctccacctccgcctggccggaataaaatcaaatatttattgatattttataatggttaaagttgttttctaaagaatgtgtcattgtccaaaacgacacatattatcgacctaga

SEQ ID NO: 3842 - DNA, 2921 bp, Oryza sativa
gccgcatcccttcccatcgcgcatccacgtcggcatcccggcgagcttcgccgccgccgccggccgtcgtcgcgcgttgtcttcccaatccgagccgtggaatcggttcgccttgacctcctctagccaccggtgttcgtcgctcgcttcggctcgccgccgttcgccggattccaccgcgcaccgtgagccgtccgatgccattcccgcccccccccccccattttctctccccatccgacgtggctgcccacgtggcgttgaccgggcctgcccctgcccagtcagccggtcagccgtccccctccccctttctcccctggctcgtgggcttggcccattggccagccttcctcctcggcctaacaaaacaaaggaagtttacttttactccttcttccgagtccggtgcccacacaccgaagagctaaaagtccgcaattgctccctccaattgctcctctctctctcaccttcttattggccccactcgtcaatgagtcaaagataatcttgagaatgtcttttccaatattccacaaatatttctctcttctataaattcagtaaatcattttatcttatttcgtgagttaataaatcttttttcccttgatcccataaatcaattctctattccaaaatttcatgaatcatttccttataaatcatttcctttggtcccgcacgtcagagacggtcaataatattcttgagaatattatttctataaatttcatgaatcaatctccccttgttccacaaatatcttccttcgccagaaattccaattaaacttccaaaattcgtatctctcgatccaatcgtccgattgaccccgttccacttccagtatttccgtaaaatcgagatctatttaatggcactattatttagtctaaatagggtctttttcttggtctcttgtttaggtttttgtttgtttgcgcatagttgcggttaccggattttcgtcgatcgtggatttctcgaagattcgtgaagctcagtgaagaccttgagcaaggcaagccacctttgaacatattgagcctatatttgaacttaattatattgctcgcaaaatattatgcattgataggattgcacttaatctgtttgcaccgtctgcaaggcagaccggtgggcctacccaacttgttgcatctgatccttacattgttaattgttatatcatgttcccttgtaaccatctagctgcgcctcgatattcgtgcactctgtgcgagtatcgacggtcgccttcaaacttaaaatatgagtaacttcttgggtaaaacttggtttacaaaagcttcggaaaacccgacgcctgggtcggtgccttgtgaaagaaaatgagttttaaaaataaaactcgcgacacaaggccattcctaggcggaatacttgtgcggtcgcatctaaggaccgattcctttggaattacattcgagcatacaatagtgcgaccacacgggtggaatgggacgcccctagctgagtaaattgctaattgggggagccttgatgccgagagacatgtgaattcaacggggtggtgtcggggagaacccccgggcttcctagcacagtatggtctgggacctaacctgttgttggtctgggacccctctcgtcggcatatggcaaccctgtgtctgctctcgaaatgccttgtaatgaaagcccttaggtcaccagacgtggccgttctatacgggctgggtgattcgggttagtaatgtcgtgtgggtaaagtgtaccccctctgcagaggttaacaaactgttcgaacagccgtgcccacggtcatgggcggatgtgaggtgattccttagcgtagtttttgttttaccctgttttatgaaaagggtgttaaggtttgggaaacctaatgcttgggaagcaattagctgtccgggggacagcgggaccgggtgtccctggaagtaattggtcgtttggggaccactattatcgggaagtttggaaaattggtttggtttgggaaaaaccagatttgaagccaactctgggagttgtgcaaatcttgataaataaatttgttacttctcacctcccgaccgagctgagacttgtctcgctctggttgtggaaagcacacacttagattgttgaaaacttgaaaacaaaactgtttgcaaaataacagccttcccttgaagcctgcattaaccacctaagttcccctggcttgctgagtacgtaagtactcacccttgctctctatataaatatagttctgccagctccgaagatgaagttgaagtgaagtgaagattagggtttcgtcctagttccctgtcgttgcctgtggcgttgggtgttagtccgttggttggttccgctgccgctgctgttgttggtgtttgcctcgtctgtgtcgccggttgcattctggggctgtctaagctgcaacctaagttaaggtaaataagtcctctattaattataaggatttgtaatgattcatgtttgtcaccgtgggtaccagcgctatgtcctgggactggtactgagatcgcagtttcgtaggacgcggttcaagccgtttttctacgacacgctcctgtcaggtgccgttgtacggcggtaccagattggggtgtgacatctaccctgatgagatttgccttttttcccctccccgtacaaggtgaatttgaagttcagaattttcatggtagcaaagaacagcatatatatatataggccgtgtgaagttccaaaataattcttcaaactaccaacttttccatcacatcgaaactttcctacacacataaacttccaacttttccgtcacatcgttccaacttcaaccaaacttctaattttagtgaactaaacacaaccatagcatatgtttgaaaattgtattgaaggtttttttttca

SEQ ID NO: 3843 - DNA, 2375 bp, Oryza sativa
ttattgtgttcgtaacaattaaatctttacaacatgatctcacttgattatatttgttgatgaaaaattacaaattacttttttaatatatctaaataatttttagatttcatcaaattacttcttagacatataaaagtgaattcaataaagcttaaaagtaatttacatatattatagaagtaacttaaaataaaagaaagtaacttgtcatgacattaaaagtaaatctattgtgggggtaaaaacataagtctatctagaaattaaatttaatcaatatattatagaactaaccaataaataattgttcactgaatgtctaaaaactaatttaatcatatctaaaagtagtttatatatatatatatgataaaattaacttacatatataatttacaacctaattattttttatcataatataattatgtaagattgctagaaagatttaattgtaacgaacacaatggtgtaaatagatcatatgtgtaatcagatcatagatcagataaataatttaagagaaaattttatttaaaatttcaaattttccctagaaagtatgtggggtctgtaaagtaacagatgaaattgaaaaagtgagaggtctcgatttaagactaacacgctactgcactctacctagacgcgtcctggttgggcccactgcatattaatgttcattttaaaatttgtgcaagcacatatcccacattttaactactaattcacatatatttaacaacctacataatttctaccatatatacttgacactaatatggattatatttttcacaaaaattcgaatttgaaccgcaaaagtatcagactttaacccttgcattctgatctttcttttaactgatataatttttcacggtgcaaactgcaggaaatggctggtactttaacaataatattacctgagagtcatttgcttctgaaccactgttcgtaaagaacactttgcccatttccctggcagtaaacatgctaataagttctttcgcaagatcctgcaagtagcagcaaacctccaatcatcagtatttacaagttttttttttgtttgcagaatgactaagtcagtcactataacattttctcatgtagtattaatatctgaaaaaaaagaaacaatacaaataaaacaacgattgatgaattaaagatgcagaatacatatgtaccaaagaaggcctggttgtatggttccaaaaggagtggtagaagggtaacttgtttaattgctccgtagcagctttgactaaacgaggctcactaccacctgaaaatagcatgcatgagtggttaatgcatcagcgtttataatcagttattgatcacttcactgctccctctacccttgatcaataattagttcaatatcattttttaacaatggaattagttcaatatcaatacgtcgattacaagataaaatggtactacattggattcatatttaaaacttcggctggatttactacctggaacaattcaatttatccacttagcaagcctcctgacaaaacttcgtctgaatttactccactaaaacatttcaaccggtttaatctactgtaacgccccgcttttcgcgagacgttaaaagctaatttactgaaaatcctaattgcgaaaatttcgttctttgagtgttgaagtctaagttgtgccaaagatctcaatttacatccctcctttggtccatctttgtgctatcaaagatcgtctcctcaaagtttccatcccaatatagtcccgaagctcgattccttctattcggaatcccctcatggaaccccatccgtgaactttgtcaaatgcccgaaccctaactccgtccaaggattcaccttcgcgtcataaactctctccttggttccttcaaaccgattctcaaattcgaattcaacctctcaggttttgtttcatctatatttctctctgtattggttcgtcaatctacccttgttttctttctcgaacttctgacccaagtctgaatatgcaaatcgagatcacttccacccttgaactctaaaccccaagattcaatccctttcgccttgagttctccccaaaatgatttccgttccgaaataatctcgaagtccgaacccttctatttagacttccctccaaaatccttacccacatatctcgttgagtagtcaaactcaaactcccaagttacactctctttctctaaattatccatctcactttgactcgtctctgaatattgttcccttccttgactccttcctattctcccgagaccgagtatcaacctcgaaactcgaatccagaccccaaccctaaaacctcccaattaaatctctctatgaaagtctatttaacct

SEQ ID NO: 3844 - DNA, 1117 bp, Oryza sativa
aactattcctgctagtggtcccatgcaagtgatgaaagcttcacccaaggaacctcttagaattggaccagtttcaatgcctgaacaaaccaacaccaccctgattaaatctgagcaggatccagaaaggggtatccagagaacacctgggagaagtgattacaatggtgaaagggggaaatctttgccagcagaaagtggttcagcagacgctgagcaggcaaaaagagctgcctcatcaagtagcgtgcctactcccaacagagatgtttcaagaaaataccatgggccactatttgactttccatcctttaccaggaaacatgattccatggtgtctgcaaattacaacagtaatctagcactcggttatgacgtgaaggatttgttagctcaggaaggcatgatagttcttggcaagaaacgggaggataatttaaaaaagatcagtggcttgcttgcaattaatctagagaggaaaaggatccaaccagatcttgttttaaggctgcagattgaagaaaagaagctgaaactccttgaatttcaggctcgtatgagggatgaagttgaacaggagcaacaagaaataatggcaatgcctgatagggtgtacagaaagtttgtcagacaatgtgaacgccagcgtgttgagcttacaaggcaagttcagcagatgcagaaagcctcaagagaaaagcagctcaaatccattttccagtggcgcaagaagcttttggaggcacactgggccattcgtgatgcacggattactcgtaaccgaggggtagccaagtaccatgaaaggatgctgagggaattctcaaagaaaaaggatgatgatcgaaacaaaagaatggaggcactgaaaaacaatgacgtggaaagatatcgtcaaatattattggaacaacaaaccagtgttcctggcgatgcagctcaaagatacaatgttctatcttctttcttgacccagactgaggagtatctctataaacttggagggaaaataactgctgccaagaatcatcagcaagttgaagaggcggcaaatgctgctgctgctgctgcccgagcacaggtatgagtatgacattctttgctctggaaaatgata

SEQ ID NO: 3845 - DNA, 644 bp, Oryza sativa
tggtgccaaatgttctccagttctccccatacgttgaaattaacgcttcagagagagagagccttcagtttcaggcaaagaaagagaacatgccactcttcttttgtgccgggtaggccgaaaggttcggtcgaccaatttcattaagattaggagtaaaataaacgaaaattgtttgcttacaacgacagaaccctgtcgcagcggcagtgaggtagagcctccctactaacaagcgagaaaactcccgccatcttccagatcattagttcctcctttatgtcatgcactagctgttcaggtgctcttgatctgtgctcgaaaatcctcccgttacgctctttccagatgaaccagcatgtgagcatgaaaacagtgtcgaagagctccctgtagcccgtccgaaaatgctgtctagcttccaaactcgccctgtaaactgacatgagacaaataggtgctggcagtcctcctgttctcactgacagagagcacagctctcctcatgtggccatcccctcttcaccaaattatcagccattaggcataaacaggccacttttctgacgagctgaatgatcaaggaaattagtttcagaattcagacacactagctatctgttctaggacatcacagaaactag

SEQ ID NO: 3846 - DNA, 4641 bp, Oryza sativa
gaactttcagcccacactccactctgccatgttcttttttccttttctcttcttctctctcattttctcagcaacgcaatcctgttggtctctatcaaaccaaagagcttagtagcttgcgatggtatcgtcaacatgaatatatgatcgattattatgctgttcattcatgtttggctgaatctcaaagccagaggtaggtttattgatggtgctcaacacatttcttcagatttcagtacactacttcagttcagccctcttatctgtatccggcacttatcttttgtctcatctcaatcctcttggttaatgtagaaagaaaacagaacgtaaatttgtttttttttcttttggtttatcggtatacatttgggacgtaaagcatctgaaaaaagagattccatttcccagttctgataccaatctctgcaggtaaagcttctgaaaaaaggcatgaacaataaaagaaacacaatagcactcgcaccataaataaaacagtaagtatgtggcatgatgtacaagtacaacagactactacatcaactgaaaagactgaattggtgaattctctcttcttctcagaagctgctcataaggtatccacacattttgatttcatctgcattagttttgtcatttctcttctgcaaaatccttgtgctgatcaagtgactgacccagccttaacaccatctgcttctacagaagttatgagtgagaggaagaggactcaaatcgatggagggcaagggagcagctgcagcagtggctctctgctgcattctcatcctgctgtcaggtgatcagcttcatcaggtggctgccatgtccaagttctgcagatgctacttgcagtgctaccctgactgcaggaagagcctgcctcggttcatctgcgtgctcaaatgcatcgatgattgcagccccaacaagaagaggatggccgtcggcgactgcaacaaattttgcctgctcgccatctgcggcatggcgttgaatggtaagatcagatagctagaacaatctgcattttgtgtatgtcttttgtgcatcgtatttgggagattatcctgactgattcctcaccgaattctcactgctgtgtctgcttatatgccttgacagggcaagctgatgttgcatcttgcgtagatgactgcaccaagaacccagatctacacaccaagttcctttaagatcatgggattgattgattcgtactgttgtctgtcaagagcatatcaactctagcataatgcatactacagatctatagtccacttttgagtgttgaacgatgatcagtggtaataataataataatcagcttatgtttgccacttgtctggtttactggttccacaactttttttaagttctgtttgtttctttccaattctcatgtatcatccatgaccattccttcgtttcttctagtccatggaagtgtgcaagaactgagcttacgcaggtgaacaaggtagcagaagtacatcagcatgcactaacagctcacgaaagagaactttgcataagtgcaatacatactgttcatcaacatcagaattcagaagcatgaaaaggattggaaatagtatcagagagatcatttgtatactaatgatttgcctcaagttgttggtcaacatatctatgcaagttaagacatagtaagttccagaatgtgatgccatcatgccaatcaaatagtgcatgtctactgccaaacgaattacaggctccatgtacatagttaagatttcttctagttacaggtgacaaatttggcgacccgatgcattgcgcagcaaactgccccgctatctgttcattccatcacacaacacttgtgtagtttcaatgtaagttacaacacattgtgactactcatgcgtaaaatcatctcaactgccggctctgtacaaaaatgagcaccaatgttccctcaaaatagtttatccgtgtaggattcattcatcggggtacagtgttctgcttcatggtaccatgaattcagccactcctagaatatgggcagctatatgtctatctttcgttgatcatgcagaggtaaccacccccagcattccgctccagagggtacctggtggcacctctcatgtactccagatgcttcaaggcagcatggcggacaacagatctttttggtgtcttccctttctcgcgcttctttatcatggtgcaagagctcaaagggccctcgcttccagccccaggtctcctatagtgcattttgcaacgacgaagtttcaagttatacaacatgtggcataatgacatatctgattaatttagttaatttaagcaccagaaccaagcagatgaaaatcaatatctagtaactaagtatctaagtggggttgccatggagtgattgacgaatggaagcaagaaccatactaaataaaggtaggccacaaaacttacttcaacagtttctcagaagcaaccctagcagcttcaatggtgtccttggttggagcccactttactactctgccaggatcacctcgcataggtgagtggatttttacaagctgcacatgtttatatttaaaaacagtaagttatctcttcacactataacagtgtggctaagtaataatccttccatgtaggaatggtttgattagttcggattaggggaaatgagaaactcacaccaagacattccatcatttgataatatgctctcccatgtaatggagtgtgtccctttctggactccgaaaagtacctggtcctgaaagatcatcacatcaactgtaagcagatctgcacatcaacatacatcatatttagtgcgtaagatcgatcgcaccaaccattccttgtatcctgggtcaactgtaaatccatacatgtcgacactgtcacacatagacagagcgaattcaagagccttaagcccagttcctttagcagaggaaccaaacgatgtgcctagcatgaggtatactggattggttattggaatttcctacatagcaagaattccagcaggcaggtaagagaacacagaatatgtacccaagctaccgtatttttcttaaataggacagctaaattacccggatcatttggttcatgatatcatgtattgttgtcttaacgataagggcttccttttttgtttctgcaaccataaaaattagcatgccttagtatctcaccaaatgggaaaataggtggctgacagacctaccatctaactcaacaactttatctagagcctttgcagatcctctgttaagaagtcgaaatgtactctttgtcccaacatattctgtataattcttcaataaaaatagaagtcagtttatgttcgagtggaacgacacaagagcagcaaacataagtatcttaaagaaacctggatgggtgcaccgttctctctaataacgacatcataagaatcaatttcatccccaaatttggttttaagaagatccccagagtttccaactacagcacatctaccaaattgccgaggtacatatggtggtgtctcaggaagaactaatgaaagtttttccatgcaaagagtcctgttctggcacttgttcctgcaatttcaagactaaacatgctcaataatctgtttgtggagttaatcatgctgcaaatcttgatgaaactgcaagtatgtgtacccacagatggattcctttattgatcctgcgccatgcatactcctcccaaccatttggcaacgcatcgatgtactcctttgtaagtattgttgtgctattgcgaacctaggaaaaaagcaactgagtgaccataagtccataaaaatagctaatactgtgatctaacaaatatctggacacagtgtttacatactgaggattgccatgttttacattatatcatataatattaaacttcaatgcatctgcaaaaaaacacatacatatgtcagttgaatgaatgctaacctgctcccatgaagccacagcttcacagagattgaactcaaatgataaaccttcaggttctccagtttttggatctttctgcaaatatcagtgcataagaactaagaaaaacaaacacacgcatcactagggatgggaattttacccatgggtccaggtatccgtggatacccgacccgatgggtacgggcgtgggtgtgactttttacccatgggcacgcccgcccgagacccgaagacgttatgggtaataggtgggtttcattttttacccgtgggtaaaccatgcccaatccgatacatatgtattagctaattttgactcatttcttaattcttataccatttctctcggttcatttgtgatgctaattgatactaagttatgatgtaattcaaattattgttgataaccgataatttggtaaattattgattttatttctctttgttaaattacatatctttcaagttattattcatgtgagattcattgggtacccgccagatatacccgcgcccgccgggcacggagttttgcccgctacctctagtgggtagggtttgggctggcaatgtcgggcatcgggtcaggcatggttttgctctacccatgcccgacccgacccattgccatccctacgcatcacaaaaggtggcacgagtatgcaat

SEQ ID NO: 3847 - DNA, 2346 bp, Oryza sativa
ctcacagaggaacaggagagagccctccaacttctcacctccctccaacaacttgaattttccaaccaccattatcttgagtcacttcctgcaaatctacgaagcctcgactccctcgaggcgttgcatatcaatgggtgccggagcattcgaaggctaccagagatgggcctcccgcccttgctcacatgccttaatttaattggctgcagcaaggagctatgtttgcaaggaaaaatggcacaaacggagaagctcatggtctacactgcctgatcgcgtaacacttctgtcttaaggtacatttctgtcttaacaagtaatcgatgcacttacactttgcttgcttaaaagtagattatctttcagcagtttgagtcagtatggtgtatcactgccttgtctgacatcgcgtggctgctggccatcgtcatggacttagggtcgcttaccttgagttcaaggctgtcagagaaagctaaaaaggggacatcacgtttgctctggagacttcgaaattatcatgttaaatggtgaaaaaaaggtaaagatctacaccatctgattgtggtgggtttagatttaatggtggggattggtcgaaatagttttatacttgtattacataaatagaaggttgtatatccaaatatgaaatagaccatgagcttctccgttagtgccatttttccacataaatagaaggttgtatatcaatttcccacacaatttaaataaatttcctacacaatttttaaatatactttaatctagctcagtgcaaaattgtgtgggaaattcagttagtctagcattagcgaccaccattttgtattttccatttgttttcctcacttccctggagtaacagaaaataaggaatggcaggtatgatgtagtttggatgaaaaatataccattttgattttgcaaatgtgggtttgtgtatctgataatttcagtgaaatgagcatagcgcgagagatgttagagtaggtgtcaaatataaccagttttgaggcactgcaggagacccttttggaggaaaattagaaacgctagatttctgcttgtattggacgatgcatgagaagatagttccaggagcagtcgatcaggtgcaatgagctattaactatactgagaccattttcttaaaaaaaaagctatattgagacgtaatgaagcaaaaggctgcatgaagtggtttcagtttgttattgtccgcttataatcaatttcaaacttcactggagtatagaaaataagaaatatatcgagttatatagattgtgaatgaaaaattacaagatggttgaaaaatacattaacacaacttagcagtggtatggacttgtatgggcattaacagaaccagctgggagatagcattgagctgactttttatttaattgtttataattgtttgacagtggattattgcattaccctgaattcgttctgtttatgactgacatcaaaattaattaatttcatgatcttgtagtacttggttcaagttcttggcagagtcatctacacaagatgtaacttcatctggccctgctgcagctgatcacgagacgacagtatgagcatgcagcagagagcagctgcacctgctctcttgccttctctctctcagctcctctcactcaccgctgcataggcagaagatgttaagatcgggtcaatcacttgctctgcacaagcattgtgcaaattgagttgacaaatgcagatgaaaacgaaatgcatggacacctgtgagcagctcatgtgatagcctataatcatgccacgccgctgccagtgttagtttatatctctatgcgtctgctggtttttgttccagttcatattttcagaagcctaaaagaaattagcatgaaacttgagttttctttcttgaagatgaccctatgtagctccacttttgatatattgatgactggttctttggtcagggaagttatctcataatttcattgagggcttgtttggttcataaccttgccaaccttttggccttgacaagagttgtccgttgccaaaatttttggcaaaatttggctaggcattcatttactttgctaccaaagttatattggcattcaactaatccaaataatttagtggtgccaaattgtaagctacaaaccaaacatatcacaaactttttggcattaccaaaatattggcttgcttaattttttatccctattcttggagtgcaattcagttgtccatgattcatctcggtctggagtgccatgctgttgccagtgactgactcggtagtcggtaccaacgttttattttcttcttttggaagggagcaaagca

SEQ ID NO: 3848 - DNA, 2655 bp, Oryza sativa
tgctgcttgtactaaccctgaggaaagctctgcatcttcatccactccatcttacattcaacaaataagcaacaggatgaatcaaaatattagttgggttatggatggcaaaaaaaggaaaagagaggaagaggaggagccaactcatagcgtcatgctgcctcctgaggttaaacatggcatttctgagaggatcaatggaatagtgaatcatttacgcattaggggcaatcctgtacagggggttcttcagctagagattttacggcaaattgctttgccaaagcagagtcagaacggacccaggaaatcacgcctgacaatttctcttatgactgaacacaaggtttacgggagggatgcagagagggacaacataatagagttgttaacgaaggggaaatctagtgatctagatgttgtgccattagttggcgttggtggagttggaaaaacgacgcttgctagatttgtatacaacaataatagaattgaaaaccattttgatttgcgaatgtgggtttgtgtatctgacaatttcaatgaaaagagcctaacctgtgaaatgttagaccatgtgtgtaaagatagacaagagtacggaaatattagcaattttgatgcattgcagaagatccttttggagaaaattagacacaaaagatttctgctagtattggatgatatgtgggaagatagggacaggaaaggatgggaaaatctgttagctccattgaaatgtaatgaagcaaccggctgcatgattttagtgacaacccgaaggacatcagttgcaagaatgactggaacaatgagtaagatagacgtgaatggtttggatgaaacagagttttggtcactcttcaaggcatgggcgtttttaggtaatgagaaccaggagcgtgatccaactttgcgatccattgggcaacatattgctgaagcattaaagggcaacccactggctgctcggagtgttggtgcactgttaaactggaatgttagctttgagcactggaggaaaattcagtacaaatggagatctattctggaacaggatgatgatattctagccatattgaagctcagttatgaatttctgccagtccacttgcagtactgtttctcatactgctctctgtttccaaaggaccacaaattttgtgggaaaaaattagtccgtgcttggatatcacaaaattttgtgaagtgcgaatgccataccaagagattggaggaaatagggaagcaatatttggataagttagttgattggggcttcttagaagaggttgagtcccactatgttatgcatgacctaatgcatgacttggcagaaaaagtttcatccaatgagtatgctactgttgatgggttggaatccaagaaaatttcaccaggtgttcggcatttgtctatcataactacttcttatgataaagaagaacattgcaattttcctagcgaaaagtttgaaaaaattatacagaatatcagatctttgcaaaaattaaggaccttgatgttcttcggccaaaataacacaatgctattaaggttcttacatactttatgcaaggagtcaaaaaggttacgattgctaaggatttatttatgtgacaccttcagacatcagctctacacttaatttgttaacgccatatcatcttcgttatctggaattcattgttatctacgccaggtcaacatatggatatctagacattgtaaatacttctattcctcaagctttgacaaaattttatcaccttcaagtgttggatggtgatagtacaggcaatcttgtagtacctattggaatgaatgatctcattaatttacggcatcttattgatcatgaagaagtgcactcagcaattgctagtgtcggcagcctgacctctctccaggaactaacattcaacgttcaagccgctggtaattttagtatcggacaacttagttccatgaatgagcttgtgacacttcgaatctgccaacttgaaaatgtgaaatctgaagaagaggccaagagtgcaagatttatagataaagagcatcttgaagcgttatcattcacatggaatgatcttagcatgacctctgaacctactgcagagaaaacaacagatgatgtacttgagggtcttgagccacaccataacctcaaacacctacagttgactcgatacagtggtgctacatcaccaacctggcttgctagtacagttacatcactgcagggacttcatctatataactgcagagaatggcgagtcgttcgatctcttgaaaagcttccactacttcagaagctgaagttggtcaggatgtggaacttgatggaagtatcaattccttcttatttggaagaattggtcttagttgatatgccaaaattgaaaaaatgtgttgggacttacggtcaagatttgacttctggtctaagggaattgatggtgaaggattgtcctcaactaaaggagttcacgcttttccatagcaacctttttcactcccagcagaaatcatggtttccgtctctcaacaaactcactatcagtcattgtcaacatataatgtatttaccttatttcttgttaatcttgcttgttcaatatagtttcaaaattattctgcgcttactttgcaaaa

SEQ ID NO: 3849 - DNA, 4809 bp, Oryza sativa
cttcttaatacaatgtttggttggcaaagccggcccggcgaaaaaaaagtttttttttgaaaggagggcaaaagctttgcctcgtatattgatagagatggagaaaaaaatacagagcgacagaaatatgtacagggctagtctaaagaactaaacccgtaaaaagagagagttaagtgatatctcccaaaattccaaactcttgaagctttgaggctcctaaaaaaaagtagaagagttgaaaaaacattaacagaattataacagaaccagctggggaatttgtatgagctgttttttttagttgttgacaattgtttggcagtggattattgcattacaatggattatatttgttcatgactgattgatactaatttgttccatgatcttgtaggtacctggtatagacttcttggtggcttggcgcaatcgtctacacgagatgtaacgtcatctgactccggtgccatctgctggctgctgcagatgatcaccggacattaggagcatgcagcagagagcagctgcacctgctctcttgccatctattcagctcctctcactcactgctgcagaggtagaagatgttaagattcggtcaatcacttgctctgcacaagcattttatacaaagataattcacaaatggatgataccaaatgcatggacgcctatgagaagcattttagaacaagggataagtatccaattactctggtcagctcatgtagtagcctgtagatgttgccacgctgccgcccatggttatgtattgcacaagctttggttcggcttccgcctgtctcctcccaccaagaaatggcgagcgtgatgcagaatgtaggtggataatacaagagaattggaaataaattgctaagccaaataggtatactaatatgagctgatttacgaaatcttttcatttgtattattttgctgataatcatttaacagtggacaactgcacgcagaatgtatcggtattggttggtaggccgtaggcctataccattcacaacccatgtgacggtgtcccatggaatagcattcctgtgtcttcacaagtacatatctattagcagcgcacatatggtgtaccctgccttgcctgtcctcatatggcagccagcctgccagccatccatcgtcaaggtcagttccttgaattcaggtctgtctagtttagtataagtggttgtcgtttcgtattttctgcttatgctcagttgctcagtatatagtctgatggtttttatctcagcgcatttcgtattttctgcttatgctcagttgctcacttccctagagtaatggaaaaataaaaggcatgagtgtgatgttgatcgtggatgaaaagcagaagagttgaaaaggcattaaatactccctatgtttcatattataagtcgctttgacttttttcctagtcaaacatttttaagtttgaacaaatttatagagaaatatagcaacatttccaacacaaaacaaacatattcaatgttatatttaatgaaactaatttagtgttgtagatgttgctaattttttctataaatttactcaaatctaaagaagtttgattagaaaaaaaaagtcaaaacgacttaaaatatgaaacggagggagtaaaacttagcaattttatggacttgcagggacatcaacataaccaaatgagagataccatgggctgatttttttagtcactgattattatttaaagttgtgtgaaaaactcttcataataattgattgtgcattacactggattcgatctgtttatgatttacaccgtcattaattagttccatgatcctgaaggtactcgttgtagagttcttggcgctgtcatctacacaagatgtaaagtcatctggccctgctgcagctgatcattagacagcaggatgagcatgcagtggagagcaactgctcctgctctccgtgtgaagcttgggtcaatcacttgttctgagcaagcattatgcaaagagaactgacaaatgtagatggaaccaaatacatgtacacctatgagcagcttaaaagaaaaagaaagaagtacccagttaatctggtcagttgatatgtggtaccctgtacatcacgccacacagcagccaatggttatttatggcgcgatgtactctgttttttttttacttcagctgcatttttttttgtttcagaatattcacttgcatagattagtatgaaaactgaatttctttctcggtttcaatatgtgagttgcttcagacagttgtacgatctggagtcctgtggcttctgtggagctaacataacacatcgaatgctggagagaaagcaagaatcagagatgagatgtgccagtcagtccagccaagccatatgccctggaatttcaatcagtgcttggtaagaggatgaggtaaggacactaacctgccaagaaaatattgttcgtgcctgaagttttctcagaattgagcatgtcgggagaatctgaacaatggtggttgttgctttgtagtctggagctcaggtgggcattgggcaaccatggggaggaggagcataatgcaggtgctggccagatttttctgggcttctgatcgcttccatgctgagttgagtcgttgcaagcatgtctccaagctctcaagtttgcttcagatgcaggaatgcataagcagaatagtgaagaaacatactccctctttttatgacgttggtcagttcaaaaacattttgggatggaggtagtatgtttgtaatatcgatattggcctatatatatttgtggacgacaaccactgattcttttgtcagggaaactaagtttctgctatcttgtaatctcattggtattcctaatctctgagtgtaattcagtcgcccatgaatgaattagctcatcagtttattggagcttacatggatccggcaagtgtcttgttgtgactggactggatattgtgaacaatgtttcagctttttggtgttctttttttctttcaaaaagaacagattagtgtaagatatggccgatgaattagagattcgtatagtcgatgagatggtgagatcatccagttcgttggtgcaggcagccggacaaattcatcatcagttgttcggatttgctaatcttatacggcgggcgcccgcgacttgtgttgctaacgggcgcttctctgcactgcagctatttggtcaccgtgctcgctcaaagctgccgcgaatggccaccgaggaatgaaaccctagttcacgcccaccggggatgctgcgactgcgaatctgcgattcgtcgcgcggcgttctcgcgggatccaccggtggtgtggtggtggggattccgcgccggcgaaaatctccgccaaatggactggttcaaaggttagatccaccttttctgctatttcatccttcagtccaagtgaaagctgaaaaagaaatgaatctgaaaccggatattttgtgtaggattggtgttttacttcaacagttgcgactattggttggatcatggattgggaggtccgaatcggctgttcattgtaccctcggcccctgtgttggcaaggtcatgtgatacatacacaggtaggagtaacactcaaaacactgtgtgctgattaggtgatctacaagttgcctcctcgactactagaatctatagtgtgtgttcacttcactgaccgagttcaggcctagttcggtcattgttagcacttgctttcacgaaattggcacaaagccgtgccagtggcagagctcgagctcgacgggtattggtggaggccatgtccttgaagccttgtttggatcatggactggcagaatcggtttcattgtgcgctacgcatgccgctctcttggctacatatgttcaggacttcagatcagctccgagctcgttgatacataatggaggtaacacgtgatgtcgcaacaatctttttccctctgcttatgtttcttaggctcaaaagatgaactgctgaatcatactcagcgaccttatcatcttcttatcctcaacatttaggcaacagcatctagtagttggtatgtaacatcacatgcttagattttctgcatggtcgatgtcacagtttgctccactagctcgtaatcacagactcacagtactaccaaatattacaactgtggagccaaagaagacttgacttgcagtctcccatcggctgtgcagactacacatcattcttctttggctcttatctcatttgctccgtaccttctcagttgatcccatcttctttcattgcgccactttcgtctagatccatcctcttgtgcaagggttgttcttgctgctgctacaacctccttaggtgcattggggaacgatgggattggtttccacagcagctgaggctgcaataggatgggtggtgcaaagcatactcgggagtttcttcacaggacagatgcaagtgtggactcgtgaagttgggctcgacaaacaagtggaggagcttgagactgagatgagaaacatgcagatggtgctcgcagaggctgagggaaccaagattgataataggccactgtccgagtcactggatgagataaaggagctgatttacgatgctgaggacgtgatggacgagcttgattactaccggctccagtgacagatcgaaggtggtgccaaatctcatcaatctttcattccatgtttattgttttctaggagcatttcttttgtatttggctatgcaactaagagtagccgaataccatagacatcaccagtaggtttgtctcttggttaagtgcgaatgt

SEQ ID NO: 3850 - DNA, 1419 bp, Oryza sativa
agtgttttcgcgctaacatgttggctgctgtggaaagaatgcaatgcgcgtgtctttgaacagaaatttcgaagcatagaacagcttgtgcaagatatcaaggaagaggccattgtctggaagacgacaggagtgttcacaacgtgcaatagcgagatcacgtaatatgcattgtaatctgtagaagttttctagcttaccgggtcagggcttttgccccaatctgttttcgacagcatactgtcgttgtaagctctttaattgtattgtacccttcctttcttaatgaaattggtcgaccgaacctttcggctgacccggcaaaaaaaaaaggaaaacataataaagctgttaacaagtgggaaacctagtgatctaggtgttctgccattagttggtgtcggtggtgttgggaaaacaacgcttgctagatttgtataccatgatgaaagaatcaaagaacattttgatttgcgaatgtgggtttgtgtatctgattatttcagtgaagagagactaacacacgagatgttagaggtcctgtgtaaagatagatgaggttatgaaaatataaccagttttgatgcactgcaggagagccttttagataaaattagacacaaaagatttctgcttgtattggatgatatctgggaagataaggacaggagcagatgggataagctgttagctccactaagatttaatgaagcaaatggttgcatgattttagcaacaactcaaaggacatcggttgcaagaatgataggaacaatgcataaggttgaagtgaatggcctgagtgacacagagttttggttgctcttcaaagcatgggctttttttggtaacgagaaccaggagcatgatccaactatgcagtccattgggcaacacattgctaaagcactaaagggcaatccactggctgcacggagtgttggtgctcttctaaacaggaatgttagctatgagcactggaggaaagttcagtacaaatggagatatcttctagaacaggatgatgatattctaaccatcttgaagttcagttatgaatttctaccggtccacctgcagcagtgtttctcatactgctcactgtttccaaaggatcacaaacttagaggggaaaatttggtccgtgcttggatatcacaaaattttgtggagtgcgaatgccattccaagagattggaggaaacagggaagcaatatttggataatttagttgattggggcttcctcgaagaggttgagtcacactacattatgcatgacttaatgcatgacttggcagaaaaggtttcatcaaatgagtgtgctattatagatggattgggatctaagaatataccaccaaatgtccgtcatttgtcaatcataactactgcttatgatcagaaacggggtgcagga

SEQ ID NO: 3851 - DNA, 6056 bp, Oryza sativa
ctgcaccccgtccaagcctcggtcttcgtccttcacttggcgaagtgtcctgttcggaagagagttgctgaaaaaaggggttcgttggggtgttggtgaggggagttgtattaaaatccttacggacaattggatccctggcttcccgcttgttacctttgccaagtgaggttactgtggccttcttgatggacgatgtgtccaagacatgggatgtagacagagtgaatgcttttttttgaagaagaggttgccagcgctatttttcaggttcccatcagtcgacacggaggggaggactttgcttcttggccacatgacaagctaggtcagtacactgtcagaaaacctcgtcatctttcctagctgcacatagcagtaatggaagaggactcccatcagttctagatgaaactgtcaagaaagggaaggctctttggaagattaaggcaccaggaaagatgaagataaatctgtggcgtgcagctcatgactgtctgcccacgggtttccaactcagacgacgccatataccagcaatggagggatgcatcttttgtaacagggacgatccaattgaacatgtgctgcttttttgcccctttgccagtgctgtgtgggatgaggtcaggaagtcttttaatctccaactgggtcgggcagcactgagtaatatgaagcaatggatttttgactttataagccggggctctgagctacagaacaaggtaatggtggtcacaatctggcacatttggcaagccaggaatgaagcgaagaacaacaactcccctgtgaatccacgtagagtggcgcaatcagttgtggcatatgtgaacatgcttactcaattttgtttcaatctctgtcctgctcccaggtgtgagtccccctcttcagttgctagatgggttccaccgccggcaggaactttcctcatcaacacagatgctgctatcttcaaatctacttgccctctccattgcctgggaagatggtatccaacgggtaatcctggcttccgactgctcttctatcatcagaagaatacaagcctgggcaagggatcgttcttcggttggttgtgttgtctctgacttcaaggttttggcttccaggtttttatcatgctcgttcaagcatgtgaatcgtttatgtaatgctgcagctcatgttttagctcgtcgggccgagcttaatccttgtaattctcaccgtggtgtcatcccggattgcatccaggatgttctatgtaatgatgttacttaatcaatgaaatgctgcattcatgtcaaaaaaaaaagtttaacaagataaacgcctccttgagaaggaattctatagattatagctgcaaaatttgaattgattctcgtcaaaaaaaatgctaaaatttttgtaaaattcctgcctttcaaagcgccacagtgtaagataggagtatagtcaatgaattagagaccccgtacagtacagtattcgttggatgatgctggaaaaatctcttacacgtaaaatagaacggctcattatattagttctagctaactttttaaaaataaatagattaatatgatttcttttaaagaaatttccctatatatttatttttaaaaaatgagatagtatgtgagttaggaacgtcggctgcttgtctgtactgcgctgacataagtaaatttcatcatgggctattttctttttaccggcgtttcactttgggctagagctaaatcaagattttcactttacaccatgtttctttgccaagaattgcactttggggcagggtatgttcacaatctgggtatgtgcgacctcaccgtagatattctgctgttgtggctcttcgccatgcgacagctatgtatttcgttgtaatggtgatgttcgacctgactggcggcgtccggtccaaccggggaggatgcacgtacgagcatggcggcggggcatggcactcagttcaaacaacttcttgatacacggcgtggcacgaacgccttaatttgacgagcatcttgaggcggccctcaggaagtatgaactactccccagtgtaatttagcttagcttgattgctggtcaccgcagccagcgagagggactgtcatgatcaatcggatcatgttgccgcgttgcacgggacgatagtgagttgaagcaaaatgtccaccgcgctgcgctctcaccaggacatggcggcgtatggtcagctagttcacgctcgatctttaaggacgagccacgcgcggttgatacatacgccatcccgctgatgtacagccaccgtcgactgtctatcgtcggccaatattccagcgtgtggtgtggacgctacactacccatcgtagaagaagatgtgtgctatcgtttcatgtatgcagaacttcctttgcatatctaggtgttgccacattgcaatcatctctattgcaagcttgccgatgcccacaatccaatcatctccatcacaagcttgccggcgtcctccctgctctctcttttatctcctgatctactgacatgtgagagtagtacaaagtgaaagcttttggtaaaagaaactagcccaaagtgaaaactttgtctttagaatggtccatgttaaaacttgggtaaaaataactagaccaacgtgcaatttacttaaaaaaaaaggaaagaaaatcagtccttggcgcgcgccactccgtcgacctcgtctccctcagaatcggcggtcggcggcgtctgctccactgtcaggcaatgcaagcatctaccgcatcttcctctcccggattcgctaatccggcgggtgccccgcaacttctcttctaccggcctctcctctccctgcagcgagctattcgtttgcacagtgctctctcaaagctgccgctgatggccacgggtggtgggattccgcgccggcgaaaatcgccgctcccgtccaatccaaaatggaaatattgcagttcctattggtatgaataagcttattaatttacgtcatcttattgctcatgagaaagtgcactcagcaattgatagtgttggtaagttgacctgtcttcagaaattaattttcaaggttcaagatgctgatagttttgagataggacaacttcgagccatgaatgatcttgtaatacttggaatttctcaactcgaaaatgtgaaaactaaaaaagaggccagaagtgcaaggttgatggacaaagagcacctcaaagagttgtcattgtcatggaatgataacatgagctctggacctactgaagagaatacaagatatgatgtgcttgagggtcttgaacctcatggtaatctcaaacatctgcaattaactgggtacagtggtgctacatccccaacttggtttgccagtaaagttacctcgttgcaggtacttcatttagagaactgcacagaatggagaattgttcagtatcttgaaatgctcccactgcttaggaagctgaagttgatcaggatgtggaacttggtggaagtttcaattccttcctatttggaggagttggtcttagttaatatgcctaaattggagaactgtgttggcacgtacggtatagagttgacttcccgtataagggtattgatggtgaaggattgccctcaactaaacgagtttgtgcttttccacagggatcattttcatgctgagcaaaagtcatggtttccatctctcaacaaactcatgataggtcactgttaccgcataatgtaaactatctattcccatcaatcttgctttagtacaattgcgaattttgttgtgcacttactttgttaaatgatttttcagaatgtggaaaatccttcctctagaagaaatgcgagcgctcaaggagttggagttaatggatgtgcctattgtcgaagaattgccagttccttctctggaaaagttggtgttaattcaaatgcggagcctgcaaatttgcagtgggataacagcttcacctgtacaagtttcgacttcccaagtggatcaaaatgaatggatatctagtctccgtgaactcactatctatgattgctccagtttggtagtgtcccttcctattccgccctctcctcttatgtcttactcgtccatcaagagactttcagcatttccaacaatggagataaacaataggaagttcactattgaatctgacgagttgagtgaactggatggcaggatcttatcattccataatctgaagggtgttacatcgatctaccttcgaaggtgtccaaacttgactcgtatttcaactgaaggtttcaaccagctcatcactttagagtgtctggttatacaaaagtgtcctaatttgttccagctacagatctcagatcaggcaaataatacttcatctgctacaaacatccctgccctcccatctctcaaatctctcaccatttcatcatgtggcatagcaggtaggtggttaactcaaatgcttcatcatgttaactcccttgagaagttggacttatttgattgtccacagataaagtttctattaaccaatcaacctacagaaagggaagtaaccagcagtttggcttcagcagagataacctcagcaggggatgaacagcttctgcaaattccatgtagtctcctccattctctaatgtggctctccatttctgaatgtccagacctagagttttgtggtggcagtggtggctttgcaggattcacctctcttgtgcagctacagattaagaattgccccaagctggtctcagcattggtgagcgaaacaaatgataatggattactcccaatgtcacttcaagatcttagcctcagtcctctctcagtctcagaaaacttgcagtccttctcccctgaaggccttccctgcctaagaaggttaagcctatgtaggagccagcatttgaagtccatgcagcttcattcctgtacatccttggagtatctgaaaatctcgggatgccgatccctggttgtgttggagggcctcagctcccttcgaagattggacatccagatgaatcctgagctgtcagctgcatggcatctcaaactgcaagaacaagaacaaggtggcaatcaggctcaggtgtttcctccatcacttgttgaacttcacatctcaaatctcgaaggaagcatcagttcgcaatttctgtgtcttccttcagtaacaaaattagcagtgcgagatagtccagccttgaagtctattcagttgaaacactgcatgacactggaaaagctagagattatcaactgcaagttgcttgcttcaatcgaggatttccactcaattagaaaccttagatccttgaaggtacttggcacccgcagcttatctccatatctgcagcaagaggcctctgggatgtggttccgactggaaagtctaatgattgatgatgcagctgtgctctctgtgcacttatgcatacagctcacatctctaagaatcctacaattctggtctatgggcatggcgagcctgacggaggaacaagagagagcactccagcttctcacctccctccgacaacttggtttctcgcggtgccagaagcttgagtcacttcctgcaaatctacgaagccttgacttcctcgaggtgctacgtatcgatgagtgccggagcatccgaaggttgccggagatgggcctcccgccttctctcagttaccttgatttgtacggctgctgcgaggagctctgtatgcaaggcagaatggcagaaacggagaagcttaaagttgagattatttacaaacagtgaatcgatccctgtaagacactccagaggtacacctttgtttcccacgagtcacatatttagatcatctttcttaagatgtactgcagcaatgccagtcaccgtatgttgtaatgctgccttgactgacatttcagtgttgctgccagcatcggtgtggtcatcttgcctgtgttcaaggctgcctagtctagattatttctacttataatcaattgcaaacttcgctagagtaacagaaaataaggaaattgttagtgtattctttctgctggtgacttgac

SEQ ID NO: 3852 - DNA, 2025 bp, Oryza sativa
cgcttgctctcctcgaggagatggaggccaagggatgcgagccgaatgagcgaacatacaacactctgctcatggggctctgcaagaacaagaagctcgacaaggccgtcgatgtttacaaatccatggttggtgccgcgatgaagcttgaagctccagcttatgcgacattcgtcagggcgttgtgtcgtgcagggagaataccggatgcatacgaggtgttcgactacgggatcgagagcaagagctttgcggaggtgacgttgtatactgagctcgagaactcgctcaagtggctgcaccggatgaaatcataaagtaggctgcatggccagtatctttgtccctggtacttgcttcagccttagtttttttttccatgaaaagctagttgcctgccttaatttgttgtattacaatgaaatatgcaaattcagagaatctgtgatatgattgtttgatctaccaaaatgtacaattgaagctacaaaatcttgaatatgctcttagtccttgagaatcaaaaatggcaagagccctattctgatctgtaccaagcttttctagcttgattcgatgcttttgtgtaaacaaacacaattttttttcttcaaacgatttttttttcaggtgtgaccatgaaaaacatcaacactatgaatcagaatcactaaaatcaaatattgtatctgaataaattatctagtagtgaattgcatgagctaatcaagtacatggatcattagtgcagtgtttttatcatgtacaaaaagcatgctattggactgagattttagctgcttcggacatcttacctattggtatatccctatataaaatcaatgcaaattgacaatagttttctcacagcttcagcaaatgttccaataatttttgctatgctaagtttacatttgatatccacattgtattgttttctcctgactacggtagcactttagttattctctgtgttatattagtgagttcaattgtcttctgaaaggcatttggtcattctcatgatgaacttaatcagttttattgtattaacatcccattggtttgcacttgctagcaatactatgtttctagtgtttcttcaaatcctccaacaaccaccgctagggttagttgtttgcggcatgactctgctgacatccattaacatcttcctattgacagtggagcaccaccttgtgggttagttttggtatgtagtgccccctagcaagcatacaagattaaaaaaacacacagaaaaaccatgcagctgtcagataaccagagatgcacccttttttaaaggcatttctcagccttcattaaaagcataataggtttttcactgaaacacagtgagtttcaggacatcttgaagaatgtggtaaattactcaaatcttgtaattcactaggtactgcaatggttcatgctagcatgggagaaaactgagtcatcatgtcctgccttttccatgaccggcaagctcaacagaaaagatgtccgcagttgtatggttttctgctatctctatattttaaatacctagctagcacaattcatttgttccctttttgcagatccaatatttatgaaagcacagcttgattacttgaatggtctgcatcagatgtttatacccttttgttggtaccgactactgagcaacttcatactccctccgtcacaaaaaaaaaaagacagatacatagtcagggtttgccttttttgagacggagggaatactttggaatgctcattagtctttatgcagcagtggaatctcatgcaaaagaagggatattgtactagaggaatatattggtctttttctattggtgtccccccactttggtccctctgggatcagttttcctgtaaatgtctgaataaatcatccaaatctcaatttctgaaggtccatatggtccatctgtaggagacattaagcttttagtaaactgactgttgtctactggagtaaagcaaaagatttgtggaaataaaaaaaaatcctgcttg

SEQ ID NO: 3853 - DNA, 1946 bp, Oryza sativa
agcaaatgattatgtactgatattacagtaaccattgtttcagattacaccctcctgtaggaagcaaaaatgaccagagatgtaaaaatgaagccatagcactaatttttgtaatgaacctaactttagcatgttagagaaaaggattaactaatactactgtattgaataggagtatggaataggatgcttttcagtgtccagcaaggagaacaaaagctgacattttgatgtccactgtctgcagcccactggaagatgctctctaaactaaaaaatgactccacaagctaaagaaaagcttgggattcctcatgcccatgctatgtaactgtgagcgccataagcatatgcgataactgctaacccagttgaacgaatcaaagaaaaaactcgaaatgctactgtccctgtaggaaaaaagaagaagaaaaaaaaaacacaaaagcgacttgtgcggtggagaagaaaacattgtgaacaatcatcttaactagtgccagtgtttctctttgaagcaatcatcttggcgaaagccaggagcttgacaaggcacggatcaaaacactggtggaatggaagaaaagaaaaggaaaggaaagaaattcgagggggcgcggcgcttacgggaaccagagcgggaagaggttgacgaatcgtgaccagaagggctggaggatgtacttggcgacgagcgagtggtcgacgccgctgtacttgtacctccgcagcgtcgccaccccgtgctgccccacgtaccccatcctctccctctctccgcctccgccgcggccgctgcctcggaatccccaaatccgaatccccgatcggaacaagaaagaagaataagaagaagaagaagaagcggatgaatggggaaggaaggaaagagagcgggaagaatccttgggaatcggaggaggcgatgtgattggcgcgggggagggggaggatctggctggcggcgaggcgatggtggtggtggtggtggtggtggccgccggtggtgattggttgatatgctgcgagaccccaaggaggagggaacaaaaggaaagagaaagccgcggcgattttacggtttagtcccttcattttgggaatcatttgtcatctcaaataggagaatgaggatagtgcgagggcacatttcaaaattcaagtgaattaatacttgaaaattaggagtactactatacttcctctatcatagttttacactgtttatatttaacatttgatcgttcgttttatttgaattattttatgattaacatttttattgttattaaatgataaaacataaataatattttatgtgtgactaatttttttaaaaaaaattataaagatggatagtcaaatattggatatgaatatctacagttgtacttattttttcatgtgtgtgtgtggagtattaaatttgaaagtgcaatagattggataaataaatgtaatccagataaaatataaactaactttgaaacaaaggttgcctatgtttggtcacttttggtggtgtgcaagtggagtggtttataaaattatgtcatcgtgttgctcgcctctcgtcgtcttcccctcttcccacgcgcctctcccgtcccgtgtcccacctgcgtggggtcaaccggtcaacgcgccacacgctttgcaattttccactctcacccctcctccccccaaaaatattcaatctggcccaaccagtacaaggctgacatgacatacatgggcagggaccacggcccaataatgcaaagcccaacaaactccattggcccaaatacggcccactaaacgaaagcccaataatatatctcatgggccaaaagcctcctccttcccgtctccttctgtcaccattcgattcccaaactctcgccgccgccgccgccgccggggacgatggggaaggtgccgcacgccatgcgcgccgccaa

SEQ ID NO: 3854 - DNA, 4822 bp, Oryza sativa
cacagaattcctgaattgctgtagagtctggcgatttgttctgcgagaagaattcaaaggcgtcattcccaccagcactgatgaggaagatggattttgacagcaatgttgacgctttttcggcgctcaatatggtcgaaatctggtctctgagatctgagaagtactctatctgctttgtcatgctgattgtagtcccctggtgcaatgataatttgttaagtcagttgtcagttgtgtgcagtaaactgtactagtagttgcactttggaaaagtaagtaaccaaattttgaaccagggagcagaatttatagctttagttgaaggttggaagaaaattttcaactttaggtagcaaccatgctcctaccaaacttcctttttttctggtgatcataaatatataggacttgaaattcaattttgtgtccaacaaaattactagcattacatgacatcacaatccacaaacatatccatcataataacagaaataacatgcaggatcaaaatggttttggagaattttatgcgtactgtggaatcaagaacaccggagcctccggaagcaaagctggctcctttcatggcggatgcagctgccatcatcatgttgctcatcacctcaccactgctgttagcatccatggcgatgagagagaggtaaggtggtggactcctggtgaaccccatcgcagccgctacaaatttcattttcaaatattcttctccattcatcagaatttacatattgaatttgctgaaatttgttaactcaagtgacgacgagatgatcacttacacttactttttttccacctttgcatacaattgcaaaccgcaatgacttcaattattttcagtgatgaagctacttagactactactcacctatgaagtcgacgccgatgaggccattgctgaacctccccgtcggctcgccgccggggaagtcgacaccgttgtgagggaagtcggccctggcactgattccggccaggtaattgttgttcccggcgtcgaccgtcgagtcgccgaacacgaagatcgccggaaccttcgccgcgccgccaccggcagcgcccctcgccgtcacagcagccacggccatggccacgagaagcaaccggagctcggtagctcgtagcacagccatggctatgagaagcaagtgaccttgtgacaatacaagcagatcagctagttatatatacagagaagagagagagctagctcagtgcttaattagtacaggatttgggttggaatgtgattacattcacccttacagttacttgttactacaattaactgtactcagtaactaccacaaggctcaagagagaacaaaaaggaggaagccagcttgtctggaaagttcttgattcttgatgcccaggacaaaagcactaggggataagaaaaattggagcaagatccaattgattgtgcattttacaagctatgttttgataaagatgtagcagtgcttatattttggaacagaggtgcatcttcaaatgagaatagacaagttcactccaactctccaagtgtcatcatccattcagcaaattcaaatcatgctttcagagcccagtacatcagctcacccggagagaggaacaataatctattagaatataatagtatgtatatataagtttactctctctctcaaaaaaaagagcatgaataatatgtaaggcataatgagcatcatttttagcataaattgtacacctgcatctcaggtgatgctacaatgtaaaaattacaaatgtatcatctgccaatctgctcaacatgtacccccaaaaaaaaagttttgccgagcatcactgaattgaagttctaggtgatacaacaaacaaaatccaactcttccaaggacgtcgtttccttatcagcacaagttctgatgataatttcaatctcggataatagcaatcctgggaataacaaatgcaaatatgatctgaagagcagaatcttcatgaagaataattgaaaatatttgcctttttgcgcaaatataacatatgattgccaaccagagcaaggcaattgtggatggttcacaattatgcctttttcctagtgatcctgtcaccacacaaaaaacctcgtgtcaaacatttgatacaaaatggcagaaatgaagtgcatagcagtgactaacacaaacctgaagcaatgaatcccgagagcattggtgatttcatggataacagatgtagcaaaatgcatgtagagagccactgccaaaattgatcaaaatagtgagatcaaacatacgtggaacaaaagggcttgtacaaggtaagatatgctactactgtaaaaactattgaaaagaaatcggtaaaaactactacttcaagcgccatcggtagtaattaagttctggaataatgtagtaccggtaaataagcagtacattaggagaactagctgctcatcaacaagggggtttctgcaacaacaatcgatggccaaataaggttggtaaaaagagttatcatgtagaggataataaaaaggtagttaggcacaaacccatcatcaagccgtgcagtcagcgcatttgcaattgcaaatgggaaatatgctagggactgcaaagggaggcacaatgtttaatcataacaaaatatatgcgtatcatcatatattacttataaaaggtggtggaaaacaaaaccaaagaacaaaggtgattaggcaacaaccatgcacatccctgtcttcagacctttgggctcatcacataagtgagccagaatcattctgccctgtgcataatagaagtagatattaggtaatgctcataagagtgtcttttgcaacaaaagaagcatgtcagaccaaaatatactggcttacataaactatttttagcatgacagacctggaacgatacaatgctaaaactataaagtgatcatattataaactgttgcttagagttgcacacctactctgaacagaatctttaacacaaaatatcaaatcatgccagcatggtctattgagaaataataagatgagcaatattataaaccattccatgcattaggccaataaggcgattttcatagcagcaggcaggatgacagacagaaatatatttcacaatgacaggaagttaaaagagaaacatccacaaaacaagtatttgcaaggcaataaatgtatgagttatagcacaaggccttaccacaagaaagccaaatgcaaaaccagttccaataactagaagatgtggctggtttctcattatatctgaaggagataggtaggacctgaataaaaatgaaaaatccttcagtgacatgctggaggattttttaccttaactgctagcttctgttgtctagctcaaatttaataaattaatagaaagaacaagaaagatatatacaactaaactagaattaggtgaacaggtataccagacaagaactccggccaacagcaaaccaaaaggaaagagctggcacaacaaaatagaatatcatttgaaaaaaagagagacatgaatacatgataaaatcacaaaatgacatatttagatcttaccattgctagtgccagcagcatgcttccttttcttgcctcgaccactttgtacacattgtgaatgctgtaggtttagaataatgcaaattgatcataggttgaatgtttatcggctatcaaataaagaacgttatgatatttttatttaaattcaatagttgcctcgagagtgaattgataaataaaacacaactattttttcagttgattccaagagaagcttgctggattcatatgctccatagtccatagatgactaaactgacaggtaatataaaataattcataaagtagtacatgctgtgcagtaagaacttacttagatccaatcgtcggaattacagcaaaagctatcattagaaacagtgcaattccatatactgggacctctgcaaagaagcaaccagcaattaattatagtataggcaatgccagcatttgtagctgtccaaaaccctacgtctattgcacagtattaacgaaaaaattgcactgatatagatgaaatagtatgctaaaacaattgagtaccatatgattaccaaaacaataaatattacgaaacgattataagcttgctagtccccataccaggaacaagaggtacccagtttagtaggggtattgacttccggaaatcttgtgcccaccattcagctcctgtgaaaggaaagatgagctattagtattgctataaccacatggcttgaatgtgactggctgatatacatgcacagtaaattgtcagaataaaaccacaaagatttacaggctcagaatagatttgattagttaaaagttgataaaaatgggaataaaatagtacctgtgaagaaggtgaaaaaatggcacaaatagattagcataaggccttcagtcggtccgttgactataggaagaattagtgtgtttgtgaaaaagctgcagagatgacaattaagtgtgaatagaaaggtactactcaaaatctatgcagtgaaagtctcttaatatcaatgcaaatatagaaacaacaatgagcagagtatctagtttattagttcttgaacttgaaaaaaagtagtgcttctatcatctatgttcttgcagaaactaaattgaattgggccaatgctgataaacccttgattttcttaccggtgctttcgaattctttaagagcactaaagcattccacagaccatttcacaatagatgagtgagcataaaaaattggttcatagtgtagttgatgctcta

SEQ ID NO: 3855 - DNA, 1032 bp, Oryza sativa
cctgcaccccttgtattgtcatgagctgcttcattacggaccagtgacgtttgtatcccgacagcctgagcaaacctttttttttcccagaaaatcactcaagtttaacatcaatatgcgtgttttttcagtatgtttagaacacttgttaaaattcaagtctcgcaagaataagaatttgtgaaaagattacgacagaaaggcaatacgctctatacaaattgttggcaagtgtcaatgcaacgttgcaacatactttttgcacatcttctgaacgaagatttgttgcaattatattccattttccacactctcacgaaacagagatgagatgggagcatccacatctttgaaagactgcacatttcaaactgatttgagttagacacaggttacaggtgcttgatgagaagccaagcaatgaccgcaagaaacactatagcaacgacagatatcagcagggccatgcacgagcagccacctttgacgcgcttattcagaatagcaagcctcttttgcacgcgctgaatcaaagaaagatttatgtcaaaattcagttcgcataagcttgaaataactatataacagtgaaactttcctgatgattgtataaagaagtaccaaaaatatacctgaagacgtgagtttgtaacatcaacataatcatccaaatcatcctgcaaaaaccacaatagatcagttgttatcaagtgctaggaacataaattcatatggttttgtgagaataaactaacaatcaatcttgtatgcagggtaagttcttcattgactgctagagcaatatgttttgtgctcagtactgtctcttccagcttctcaagaccctcatcttgttctgcggattgttgcaacaggcaagataaatgaattagctacaatgcaataattgtttcccgtactaaaagctactgtttgtaaccatctagatatatacaagtaaatacaaaatgcaactctgcgaacagatcgggccacttagaatatatcaggggtgctttactggggtgcagg

SEQ ID NO: 3856 - DNA, 11682 bp, Oryza sativa
tccagcttactcggcaatcagctgggagcaataaacaacaagcctgtaaagtggaacaagggcatggcaacatccacaggctatcacattctggaaacaaacatgaaagatgcctgcactcctggagagatggagcctagacattgcatggtcatggtgaggcttcaaatccatttccacctgatgaatcgtccattgcatgccctccagttttggaggttaaaatgggttgtcaatgatgcataaaacatggtcctcattgataatgatgaagatgagtcaaattacctttacaatctcatggtattgccttgcaattacatcaaagggtggatctacaccttggtactcgcgcaaccgtgaaacctggtgcaagataaaacgacactctagaatgtaaaaacaaattatgggaaagtcgactccttttcaggtaaaagaggatactgaaagatggcatacattgtttatagaaattcagttgaaatagataactacagagctctagttactagatttccattacagagttaaggactagatattcagtaaatgagtaataaccattgctattaaggatttaatgaccaaatattttgaagattacaaggggaaagtaagatgggtgtatcataccgcttcagtataagaattggatgcttctttcgtggcctctactagatatttcctgcaagaaacggtaaataagtaaaaaatgcattttcctgaaaagaaaagcactcaacatattggatctgttttgagaagatgtaccacttaactcaagatatcatgtcagttttttttaaatcaattaaactggctttacctgatcctatgtagtgccggtactgtttccttggtataggtgtcacgcaagagatgatgctcaagatagctagaaccatgttaagaaagaaatagttaattaactctgttttgtcccatcgctgactagcaaataactcaattagaagactaactatgtttaacaaagtacaaattaagatccgttattaggtgatgtatgatggacgtagatgcaggtaccaaccttaatttagcattcattgtccggcaccttttaataagccaagtcttcttcagatcatcctattagcccacaaagacaaagtaggaggattaactatatgaaactgaaaacactccatgttttcaaagaagcagcatcataataggaatatgagaaagcttacatattgatgctgatgttccaatttcttgtctttaacgaactgtataagtacagcaagaatttgctccaggaccttttgaaatttcaggagccatcagtaagtggatataatccagaatttctactagaataaagtgagctaactggctatgtggagtttgagcaatcacttaatatctacacacgtacattatagtgttcggcaaattttctatccatcgaagcaagatcgtctagtagaagggcctcttccttttcaatctcttcaataattaacttcaccctgccaaaagggaaaatcatattgtgagtaatgcgtctcatgaattccctgttattaatattttaagtccaaacaagtaaaggttgacaattggacattgccatcaagaactgagaatgcactgtgagtgatcagagtaaattattacagaagcaaacaaggagattttttttcactcaaaatgttatgcttgacctaagagagttttggcatatcaagcatttccgtataagtaaaaccattgcaagacaggcaaagatatgaaatttcacctttctggaagtctggcacttgaaatctgactaatggatgatgaatctgcagcacatttgaaatgttaagctaaaacaataatattgaatacaagatgtgtactgttgtctaaaactaagttgcccaagttgcattgcataaaatggacaggaacgcagggagtgaaattggtagtcatagcaagattcaaaaactgacccctttcatccattgcaaacagatcagctaaagcatcacacttggcttctaagcgggcctcaatctctcttgccagagttcgttgatagtcaaccatgtcctgcaacgggaaatcagaggtacatgctgtaaacgtttaaacagcccggttttgaaaagaaacaatgtatgtcctgattgctcttcagtaaatggtaaacaaagataggaagcagtgaagcagtaattgtctgattccccaagaaacatacgataatatatccaaaactaaaatgaaacttgaacccaccaacaactggttcacacgataaatttggttgcaaaagattatacataccacggtcatggctggctgctcttgctgcacctggtagagataatccgatgtgattccaagaaaacgatcaggaacaccgccaacaccaggctcaactggctccgaaccaccagtaccaggggccgcagcaacagtggctgcacttgcggtgctgctgtagttattgtaactagtcgagattgaactcgagctaggtgcggcacttgtcatggtgctatcgaatgagctcctagacaaggtgctcagcttctctatctcctcctcatgtacatctccatcctgcgagagcagtggaagccttaacctctgcgcagcctctgcaaccgccaaatggtgctccaatgactcgtacacctacatcagtccatacaatgctccattttcagtcagataatttctcaatttagcagcaaaagtttcatctgcaatcaaccagttgaattcacatttgcagctttatgtccaccattcactgaaagacgcaaaaatttaaaaatgcgggagagaagtggaacctgcggggagcagttgagcttcttcccagcgttggcgacgccagtggagatggcgtgctgatactcctccaccatagcaatggcctccgcgtacacagcctaaccacattacccccagatctgatcagaaccccaacgggaaaccctaaaatcccagatcccacgagaagggacgggcgcactcaccagtgcctccaggtatcgcgcgcgctccgacgcgacctcctcccgcgcctgcggcgaaggaaagcacagagacagcagcgggtgagatcgcggaggtaggacatcgagttcgcggaggtgagatagcgtacctggaggaggtcggagtgggcgcagctggagaggagggaggcgtcgggggcgaggtggtggcgctggagctgatccaccaggtgcgccacctccggcggcggcggagggagcgacgcggcggcggcggccttggacatcgtcgtcgccggcgaataagaggttcgttggtggtggtttgaatcgtgtcggggaatgtggggtttcgtttgtgtagccggatttgggggggctaccagccgttggatcgtgggatgacggatgagattacggctgattcattcggctatcagagacacggaaacaaaaatgcctctataatcttctgaaattatggatgtccactataatctccttcatcaaattcgtcatctctccggtctttcatttcatacgctgtttgttatttttatttgccgaggccaaattttaaaatttttaagaaaattagaattgagagttgatttttaggggtttttcatcgtggttcattttaagttgacttaaaaaaaacctgtgaacattattatttttatgcttagttcttttttccatggcttatgagccgtaaatcaaacaatgtgtacttcgattttaaaatgagatggtaaatcctagtactatattttagaaacagatttaatggctaggtttcgttatgctcgagcataccctcaaatgtttgcataaaaatttaaaatagatgatatctctttgtgattggtgttggagaaggattatagaaaagaagaacgggtgtttgctcgtcctggaagaagaacataagcaacacaatgatatgattagaactgaaacggtataaattaaacaacttactccctccgtcacaaattacttgtctctttaagatttaaactttgtctcaaaatggttatcataataaaatactatttgttccatcaatcgtttctaattcaaatttatcttttttcttgcccctaaccaacctcctacatccaaccatacaatatttagttaagggtattatagttttttttcttaaatcttaatctatgctttaaaaaaaaggtaaaattgtggcacatcaacgtgcatgagcttaataatttgattagatcaaaataccagcccatatccccatacacatgtggtcaggtagatggacgaccttcaagtttgttgttttcatgttcaggcttgcatgatacgattacgatctgccatgatgtctttttctcgagattatggtgtcgtagtcgtcttcaactacagtaaccagacttttatgacagaaaatggtgcgccaaagcagccataccatatgaggaaaggaaaaaaaagatagaaaataaaacacaatattgaataacttgcaaatattgtattgtataacaagatttgtccttggggaccttttattatgcgtataattagcgtgttttttttcgaaagtatttttatcccgaaaagagaagcactagaaaccaaatttcaaaggaatgcgacaagatttatgatgatagccttactggagaggagcatcatgaaatcatcgtgaatgcgacttgaattgaattattatgctcatcgctttcgcataacctctgtaggagtacaattctttactgtactaaccacttttgattaggagtaggagtactgattttatttcaggataaatcaaagcaaaaggaaatatatgcaccttgtcgggtcatcgtggctgctttgatgatgcactcatcaccttcacacgtcggatctaagagaaaaacggccactaaaatgcattatacaattctaataggaattctcccagtcgaatttaagagagaatttggtctcgaactctcaacgaatgaaaaaaaaactctgtttgaaacgacttcagttttatctttgaaccaagtagttgtctaaaatagcgacggataaaatgtttgtgcaacaaatgtattattactatctcttttctacacgataaagatttcgcatgaaaattgaatgtttttctagtattctcccgtttcatattataagacctttgctttttttttctaatctggctttgttaagtttgactaaatttataaaagaattaataatatctaaaataaaaaattagttttattgaatccaacattgaaatattttaataatgtgtctgttttattgaaaatattactatatcttttacaaatttaacttataatatttttaactaaaatgaaataatatgaaacatagtgagagaggtgagagagggagtagtaggtttggagtggataggtgagcctgaacatgaatgagtcagcgacgagtggaacaaacatgtggtgtgctgctgccttgtcgtcatagaacaaccttctcttcccttccctcacctttcgcgttcacctcagctcagctcgtctctctgactctgatctcgccgtcccgagttcgccggacacgcacgcacgcggccacgacggcggcgatggagggcgccctgctctgcgccgccaaccacgcgccgctcacgcccatcaccttcctcgaccgcgccgccctcgtctaccccgaccgccccgccatcgtcgcctcctcctccgggctcacccgcacctggcgggagacgcgtgaccgctgcctccgcctcaccgccgccctcgccgccctcggcgtccaccgccaccacgtggtaagattcacctccgctcgccaccgcaatttctacagtaacttgattctcaccattgattgattgggttttctccccaatctccccctctttttcaactgtttgttcatgctaaaacccccaaatcgcttcgaatttacttgtaatttgattcggaattagcggtcgagtgattcgcatttttctgtgtaggttgcggtattcgcgcagaatattccggcgatgtgcgagctccacttcggcatcccgatggccggcgccgtcatctgcacgctcaactcccgcctcgacgccgccatggcctccgtcctgctccgccactcggaggccaagctcatcttcgtcgactgcgcgctgctcgacgtcgcccacgacgccatccgccgcatctcccaatcgggcgccacgcctcccgtcctcgtcctcatcagcgagctcctcgacgacccatccgatgccaagctcccgtccggtcgtgtcgactacgagtacgagcacctcgtcggcaatgccgggtcgtcgccggagttcgcggtgcggtggcccgccgacgagaacgagccgatcgcgctcaactacacgtcgggcacgacgtcgaggcccaagggcgtgatctacagccaccgcggcgcgtacctgaacagcctcgccgccgtgctcctcaacgacatggcgtccacgccggtgtacctgtggacggtgcccatgttccactgcaacgggtggtgcatggcgtggggcgtcgcggcgcagggcggcaccaacgtgtgcgtccgcagggtcaccgcggccaccatcttcgacgccgtggcgcgccacggcgtcacccacatgggcggcgcgcccacggtgctgagcatgatcgtgaacgccacggcggaggagcagcggccggtggcgaggagggtgacggtgatgaccggcggcgcgccgccgccgccgaaggtgctgcaccggatggaggagcaggggttcctggtgatccactcgtacgggctgacggagacgtacggcccggcgacggtgtgcacgtggaggccggagtgggacgcgctgccggcggaggagcgggcgcggatcaagtcgcggcagggggtgcaccaccacggcctggaggtggacgtcaaggaccccgccacgatgcggagcgtgccgcgcgacgggaagacgatgggggaggtgatgctgcgggggaacacggtgatgagcggctactacaaggacggcgcggcgacggcggaggcgctcgccggtgggtggttccggtccggcgacctggcggtgcggcacgaggacgggtacgtgaaggtgctcgaccggtccaaggacatcataatctcgggcggggagaacatcagcacaatcgaggtggaggcggcgctgttcagccacccggcggtggaggaggcggcggtggtggggcggccggacgactactggggcgagacgccgtgcgcgttcgtgaagctgaggcccggcgcggcggcggcggcgaaggcgggggtggtggaggaggagctgatggcgtactgcagggcgaggctgccgaggtacatggcgccgcggacggtggtggtggtggaggaggggctgccgaagacggcgacggggaaggtgcagaagttcgagctgcgggcgcgcgccaaggccatgggcaccgtcccggcggcggcggcggcgaagtcgaagaggagcaagctctgaatgaatttgtttgcgtcagctgctgacgactgcaatgcaacttcgatgcagcatgcgtgtgtgtgcctgtggaatctcgagacaacaaccaaagaaaaaaaataaaaaaatcatgatttgttgtgatgattcgtgcgagaacaggttggtgtcctttggctgtcagtgtgccgtgcggttttgacagtatactgtcatcgtgtgggcttgccatatgatgtggtaacctcacacggtgatacattttcggtttttgtcggtaactatacaattagggccttcactgtgcgaatacgtggcgagttacttcgatacgccagctcggagattcgtagccacgtctatatcagtcggcccccttgtgaagagcggcggatctcaatgaagttctgtgttcctggtgctgtcaagattataatcgtgggccctgtgctgccaaagtctaattcaaggtcatactacctccgtccaaaaaaacaaaaaacgaatatggcatagtattttagcacagtgaatctggacagatgtatgtctagatttatattactagttttaggatatgtcacccagtactagttggttttttatgggacggagggagtactgcactatgactaatatgttgatcggttcttagattgaaaaggtggttcgacgcacgatgctttgactatggatggccttatcatgtattcgtattgaccgtgatagtgtttggtagtggttgtctgtactcaaccaaacttatcctatcaaccatttcattttgatttagacatggcatcagaacaacctgaatttcgcttatgtacatacgttgcttttaccactaaaaggccggtttgaacttaaacagagtagcttgtttatttgaaacatactctcttcttcctaaaacaatcaattttttatataattcgttcacgtataaagttgtctcttactcaaattcacgtataaaagttgaattttttttctgtaatagaggaagtatgattttatattagggttcttgtacagtttaagcaccgacaaccgctatctgtaactgcaaagggaggaaaatgagctagcttttatacatgcccagctcattgtttggcttatttaaaaaataaacccaacggtatatttgtaaacgaaaactaatttatgaataaaacttttatatacatgttcttaacaatctaaaagtaaagaccgaaaaataaactacgataaaaaaatctcaaaatcaactttaaatttaagattaagaatttaaaaaaaaattaaaatttgagttataagcataagcattagctaaggctgtcaatgtggctatgagagcgagacagtggttgagtgacccattgagctgggcaaacgatggtgcaccgcgaacgaaccaaacgcctagtacagccatagcccattttggtgttgtgtcgccaccaaaggcgattttttcctccttttttttttggtaaatctggagagcgactgacaaaggggggacgcggccccgactcggcgactccgaccgacgagatcgccgtcgctccatcccccatggctgcctcctccgccccacctccccctccccgccgcctcctcgctctcaccatggcgctcgccgccgccgtcgtatccgccgcctccgccgcgagggccccggcctccgtcaccccgatctcccgcaccctctaccactccaggtgcgcctccctcccacgaacgaacccctccctgccgtctactcttctcgggggggtttcgattcggaatttgggggtgatttcataccatttcgaacctaggtcgatgccctgcttcagtatactatacctcgtggttgacgaatcgagagagtgtccctgtttgcttaggtatcatttgctgctgcgcgtgatttcactgcgatttgttctcgttttccccctcattaagtgtagtctcagattggtgtggtggccattgctttgtataaacggcatcatacatcggtcctggcaccactaatgtggtggtttctaggaaaaaaaaagaatacgattctttttattttttttcagcaagtggtatactggcaccacaagcctgtatcttaatgcaaacgtttgcaggcctagttgtgagcatgtgagctgatctgaattttgtacgagtgtgttcaaccttgcattgcttgcttgcttgagccggtctgatgaggagcatatagatacaatgtatcggctttttgattctgtctcctgtgtgcagagcatcatgttaactgttccttttgtttttcctcttcagtgattcccttctgagtgatatcaaggccttggttgcccggcatccagacaagttgagtgtgagtggtttaactgccctatttcagtcattgttggccagtttgttttgttgcatactagtgtttcttatgaaattttgattgaatcgttgcagatggataccataacagcaagtaacaaagggtattccacagacctctttatcgttacttttaatcatgccaaggagagcacgtccaattcttcaaagatccatgtccttctggttagtttccaacagaaattaactcacgctggatcattctgtgcacactaagttatttcttaccactaatatttatccattgtcccaaagcaaatggtatttgtttcactgaaactgttgtcatttccaacctcaattaagagaaatcccaaagcaaagcaaaacaaaaccaactttttgataatttttacacattggcttgtaaattaaattattgatgtcttgcggttttgacagaaaggttcattgtcttccagagctttgggcagcatggcagagagcttatcacttctgaagttgcattaaacctcctctatattttgaccgagaagcggaaaattgctggtgtcgatctatcatcctttgagaagatactggagaatcttgtaatcaaagtacgtccttttgtaacttgttttgacattttcacctcctgacccacataatcattaggagatatatcaatacacatgctcttttctggtatgctctgcatggaattactagagcttaagggcagtctcatttattaggaataaagtataagatagaccaaagttagttatttcctttaagccttgtctgattccatctttgttctattttgacatattttttttactctctttgtttaaatatttagtgcagtgaacacgacaaaattatggtttaaacgtcattactaaatgtttcacctggcatatggtgtttttctcctaaattactctatgcgtatgtcattattctaatatatacaagcttggtttggcttgctaagtaaaatatttcatgacatgaagttcttagggttgttaacctgatccatgctctttagtcttcttaacttgttgcttcctcttcccctcttttcatttttgttattttttatatttctatattaacgaagaatcagatttcttaataatcagttatgattttttttaatgtggctttgatctttaggtggtgcccatggaaaatttaaatggtcgaaaacgtgttgaagaaggggagctttgtgataggagaaatggtgatcaatcttatcttgtaaattcatcacttgatgcagttctatgccaacttcctatattcatgtttttttcatttttcaggaagaggagttgatcttaatagaaattggagtgttgattggggaaagaaggaaaaggttgttttctcagcagtttattttatgcacagggaaaactgtttccttttgacttactgtagtgtgcatgttgattttactgaattgcgtcttaagctaattacctaaattcatatggacaagaccgtagcattccctaaacttgctcgcttgctaccattgattgacatccttactatcttagaactatttttaatttagatctatagagaatttagaaaatagacctctgcatatgctatggttcattaccatgtatcttagtttgtcatccttggctgttactacgcctgtatatggtatggttcagtggttcactatcatttatcatatgcgttaattgctgattgttggattacttaacctcagttatgcaaatgtagtgtacatcatatcaatattttgagctatatatgcattttacctgtattataggactacgacccatatgagga

SEQ ID NO: 3857 - DNA, 1475 bp, Oryza sativa
ctgcacccccgccttcttctctgatttcgttcttatccatcaagggcctttcatcatttccaacaatggtgataaatcggagagtgctcacaatcgaatctaatgagttgagtgagctcgatggcaggatctcaccattccataatctgaagggcataacatgggtaaacctacggcgttgtccaaacttgacccgcatttcgatagacggtttcagccaaccacatgtcatgtcaaagcctgttcatgataacagtatacctattacgagttaccctgtcctcccatctgtcaattctctcagcattcagtcgtgtggcatagctggtggatggctaactctaatgcttcctcatttgcagtctcttgagaacttggagttacgagactgcccacagataaaacttttatcaacaagtcaatgtacaaaaatagaagcaccgaacagtttggcttcagcagagacaacctctgccagggacaaataccttttgcaaattccatataatctcctccgttctctaaagtggttaattatttgggcatgccgagacctggaattttctggagtcaatgaaggatttggaggattcacctctcttgtggagctacaaattagggattgccccaggctggtcccatcattggtgagtgaaaccaaggataattggttactcccaacatcatttcaatatctcactatcagtcctctcccggcaaacatgcagctcttcgcccctgagggcctaacttgcctcagagtgttaagcgtattttgcagccaatatttgaagtctgtgcagctgagatcctgtacagcattggagtgtctgcagttattggagtgtcaacagctgagtgttttggagggcctccaacaccttagctcccttgtaagtttggacatcgagatgaatcatgaactgtcaatggcatgggatcacaaactgcaggagcaagaacaaggcagcaatcaggttggactatttcccctgtcacttgtacatcttggtatcacaaatcttgaaggcagtgtccattctcgctttctggcctcccttctattacgaaattagacttgtggaatagtccagatttgaagtctctacagttaggatactgcacagcgctggtagatttggcaattgacagctgcaagtcgcttgcatcaatcgagggtttccagtccattagaaaccttaggtccttgagagtaggtgactcccccagcgtatacccatgtctgcagcttatgtcgcagcagcaaggggcatctgacatcttttctcaactggaaactctaacggttgatgatgcctctgtcctttccgtgcccctttgcaaacatctcacgtctctacgagtcttaggattacaccgggatggatatagtggcaagtctatggttagtctgacagaggaacaagagcgagccctccagcttctcacctcactacgacaacttaatttttaca

SEQ ID NO: 3858 - DNA, 542 bp, Oryza sativa
cgacctttggcagccaaccataggaagaagcgtactcgggatggagctttgatgtgccaaataagttcgctgaaagggcagatctctcttgccatgaagaaaagttataggctgaagatacagtgaaaagtccgtcggaggaaagcttccagcggatggtgtcttcctctagatttagctcgacagtgtgtacttcatcccagagctggaagaattgtgccatggcttcattggagagtgcaccttgcagatctctgacccatctgttgttggttaaagcttgtgccactgtcagctgtgagcggccaacataagtggacagtaccggccatcgccaagcaatgcttccaccatttagccaattggctgtccaaaactttgtgtctttgccgtttccaacacagaattcagcagctgagttaaagattttctccacgtcttctccaagtttatatcctgacttggcccacggtcgatttttctgctcaagacttttggctaaccattttagtcttagcgcttgaccaaaggcgtcgagattt

SEQ ID NO: 3859 - DNA, 1129 bp, Oryza sativa
tctttgaagaggttgagtcacactatgttatgcatgacctaatgcatgacttggcagaagaagtttcatcagatgagtgtgatactgtagatggattgggaaatccaagaaaatttcaccaggtcttcagcatttatcaataataactactgcttatgatagagaagaaccttgcaattttcctagggagaagtttgagaacatactacagagtatcgggtctttgccaaagttgagaacattaatgttcttcggtgaaaatagtataatgttattaaggtccttaaatactatatgcaaggagtcaaaaaggttacggttactaaagatttatgtgacagctgctgacatcagctctacacacaatttgttcaagccaaatcatcttcgctatcttgaatttattgttgttcccaccaataatatgtttggaagtcgaggcattgtaaatacctctattcctcaagctttgacaaaattttatcacctccaagtgttggatgttagcagtaaagtaaatcttgtagtaccaactgatatgaataatctcgttaatttacgtcatcttattgctcacgagaaagtgcactcaacgattgctggtgttgcaacttgacctctcttcaggaactgatattcaaagttcaagatgctagtaatttcaatataggacaacttcgatctatgaatgagctcgtaatacttggaatttctcaacttgaaaatgtgaaaactaaagaagaagccaagagcgcaagattgattgataaagagcatcttcaagagttgtcgttgtcatgggatgataaaaacatgaactctggacctactgcagagaaaacaagagacggtgtgtttgagggtcttgagccacaccacaacctcaaacacctacagttgactcgatacagtggtgctacatcgccaacctggcttgccagtaacgttaagtcactgcaggtacttcatctagagaactgtagagaatggcaaattattaactctcttgaaatgcttccagtacttaggaagttgaagttaatcaggatgtggaatttgatgtcagtctcaattccttcttatttggaagagttgatcttagttaatacaccaaaactggaaaaatgtg

SEQ ID NO: 3860 - DNA, 3305 bp, Oryza sativa
tcctgcaccccatcctgattgtttttagcacgagtacacattaatgatctttatataccgaacatcaagtcaccacaaacaagaatacactacaaatttccttcgtgaatgtatattaggatactatcgatacaacaaagtacataccaggacagtctactgaattactatgcctttgagtaaacaattaccacgataaatcaagaatttacgaagcaataactaatcaccacgccgattctccatgagtgtggaaatctaatggccccaaatctcacaatgtagcatctaattgcacacaattacaaggcaactgaatcccaattgcccgtacagtgaacaggatcaattaacagcggagacagatcaggaaaccgtaccacacacttgctgaagccgctctgcagcgcgcccagcgccgccaagtccgcatcggaaaccctagcgccgccatctgcacgcacgcacaaacgcatccatcccacctcagaatcgacacacgcaaagccaaaagcagaagaaaaaaggcgcgcgcattacatgaggagaggccggagaggtagacgaggatggcggtgacgccggagaagatggcggcggcgagcgcgagggggagcacccgcatggccggagcagccgaagccctagccgcgctctgccggctttggcccccgtgctctcgccggagtcgagtgtgagagagaggaagcgagcggcggggatcagttcgccatttgcgaagagttcgagggggcttttcgcatattgtgcatttagtgagactttttttcggttttagatttttttaaaaaaatatttacagaaataatctatcggcaaaaaaaaactacaaaaatagaccctgccgcccacctctggggtggcaagctgacgtggcaaacggggggaggaacgggcggtgacggagggagggttttttttgcatgaaaacccttgccgccctctggtggggcggcaaggggcccgaatgcaaaaaagccagtcggggccggctattttgcaggcggccccttgccgccctctggccgggcggcaggcctcgctgcctataaaaggcctgctgcccagccccagccctcattcttctctcctcaattccagtgaaaaaaaaaagaagagaggggaggagaagataagaaggggcgaagccctgccggattcagacgccgatttcaggtaatattcatagatcctatatgtgactattgagttaaatagtgtgtattctttaaaaatttgtttgaataaatgcattatatttttagggttttagttgtactaatctagaagtgcgtattgtagatatcggtaactacgtagatctgctagtttggaattaatacattaccgttgcattggcttacacaagaagatattacgttgtagatgtttattgcatgaaagagtaatatgatctagttatttcgttgacagatatgtcgaacaaacaaatattccaagtttaccatggaccaggaaacgtccgttacgggccaactggggtagatctgtcagattttattgtatcagaaaggggaattgatagaccggctgagaggagtgtaccttctataaaaggatggttaatgaggggcttgagagttgatttacagacaagtgacataacaatcaatgttatagtaagtcgggcaactgagggtttttattgggaactaatgccagttcaaaactctcgagtgtggagatggtatttggaaaatgcattgcaacgcgggtggcctctagctttggttccgtttgttcacccgaaggatccaggtgtgcagacgaacatggatgatggcgagggactaagtgctgaagtaaacgagacttctgtggaggaggtcaacgcacgagaggacgggggcgtagtagctccagtgggcattcaaccaggtggagtggccgacgagggggagactgtcggtgccattgtggatgaaatggagagggaggattctgacaacgagcgtgtagaggaaggtgattcgtcagatgatgagacggatattaatccagcagaatgggctagtgaggatttttctgggctgatcgtctctgaagaggatagtgtgagatgggagtacaaagaaaatgaggttattcagggagcgatttatagtagagcagaagatatgaaggaggcggtaaaacattttgcagtgtcacttcatagagagttttgggttgccaagtcgaaccggtcgcaatatgaagttcggtgtgttaaggaaaaagatggttgtccctggagagtgcacgcgtataaggggaaatggaaggattattggacagtgtcagttgttaccaagcatatatatttctacctggtgttcagaaataccacaggaacattacatgtgcatttgttgcatctgagatgtatgcgcatgtcatcgataatctcacatatgaaccaaggtcaataatccgacacattgaagagacatacaagtatactattagctatgccaaggcctggagggccaaacagaaaataatagagatgagatttggaacttacgaagcctcgtatgacaatttgccacgcctgcttggtgttatcgaggaaagaaaccctgggagctcttacgaagtgaagaaattcccctcaattgaacatcctggcaagagtgtgctgcaaagggcgttcttagctctacatgcatgcaagatggcattcgtgaactgtcgtcctgttctctgcattgatgggacattcttgacaggaaagtatcggggccagatactaacagcaataggggtagatgggaacaatcaggtattgcccttggcatttgcttttgttgagagtgagaataccgacagctggtactggttcctgaaattggttaaaacaaaagttgttggtatgaggccaaatgtatgcctgatacatgataggcacgctggcattctgcgagcgataggagagttgcagtttgggagtatggaacgaggataccccggtgtttgggaagatgtacagagtaggtggtgcatgcgtcatatgggagctaatttcttcaagcaattcaagaacaaggagctcatgaacatgttcaagaggctgtgcaatcagaaccaggagaaaaaattcaatgagctttggaagagattagatgagttgacagccaaatgcagtgatcagcgtgcagcggctccatcgaccgccgttgctgaccctcctcaagctcttggacctctcccaacggatagtccaacattggttagaagaactggattggagattcggaaattttctcagtggattctgcatg

SEQ ID NO: 3861 - DNA, 1463 bp, Oryza sativa
ccgtaggtgacaacatgagctgattctttctattatcagtgatcatcgttcaacagtgcaagcatgcattatgctagatttcatttgatatgttgttgacagacatcagcgtgaatcaatcaatcccatgatcttaaaggaacttggtgtataggtttcggttcttggtgcaaccatctacacacgatgcaacatcagctgcccctgcaacggcaaatgcagacaccgcaatcagaattcagagaggaaacagaatctccctaatactatgcacaaagacaagctcaaattcagctaggaccctgatgattggagacttcctgatatcggatctcaccgttcgacgccgtgccgcagattgcgagctggcaaaaggtggcgcagtcgcaggcgacaaccttgttcttgttggggctgcagtcatccatgcacgcagatgaaccgaggtaggttcttcctgcactctgggtagagctccctgtagcatctgcagaacttcgacatggcaccaacttgatgcagttcatcacctgacagcaggctgatcatgcagcagagggccactgctgctgctctgttgccctccatcgatttgagtcctcttcctctctcagtcactctgataacttttgcagaagcagatgatgttaagttcagatcggtcacttgatcagcacaaggattttgcagaagagagatgataaaactaatgcagatggaatcaaatgtgtggacacctatgagcagcgcctaagaacacgagaggattatcaattgatgccatatccctactgttttatatatggtgtgagtgcttgactgcttgtgtttcttttattttggtgcatttttttgtacaagctttatgaattatatgagagcgatcagtatgcgacctgttttttttttgttcatttccatatgaaattgcttttctgtcccaattgtaccccggtcatataaaaaccccgaatcaaattagcattctgttttctttctacattaacccagaggatcgagatgagacatgcttaccagctagaggccttgtctacgaaaagaaagatgaagtgtactgcagcaatatgttgatctcaattagggtagcataaatgtataaatcgatcataccattgcaagtttttttggttttgtaaaccccaacagaatgttcaaagaacaatagaaaagaaaaggaagaggactgcaatgctgaggggcagacgggcagtgcgggcgatggaacaaaagaatttttttgaatgggccgtatataggccactcatcttcacgtattagtattgggctataaatgggccgacagacaagatgctcataaaatcctccaaaaagagctcagctcttaaataaaaattaaaagagtaaatatcataaaataacatatattatggtacaataagttgcacaaaatcatatagattttgtatagtgacatataacca

SEQ ID NO: 3862 - DNA, 728 bp, Oryza sativa
ttagagttggttgcacttgtgtgcctggggttgagacttcattacgagataaattagaagcgttgctgtccaggattcctccaaagttcatgtgttgcttccttccttccttcataacactgctactacttaatttctgtttgcgtactaatatgggttgttcatatgttggtgatggaatcacagttagcttgtacaaatcttatggaatctgtcggtcccctgattaacttacgccgcgatcgaattcatttagaattgttacccttacacgttgacctgtccacttttcacccttgtgattcaccttctggatcgaacactaaattagagttggttactcttgtgtgcctgggttgagacttcattaaagtagatgctgttcgatatttctccctatatctgagggattatcggcaattcgggattatgattctagtgaaaaaaaaagattgctactggtattcatgctgttctctcattatgcagcacggacaaggagttgcataagcgacaagacatgctttcaaatctgaaatctagagcaaagcagatggctacaagtttcaacatgtcaaactttgcaaacaggtctgttcttgttctcagatatcaacctggtagcctgatacagttatttgccttgttctctcgaaataaagataactggttgatgctttgacatgttgcaatttgttcagaagcatattaatggaaatctttgtttg

SEQ ID NO: 3863 - DNA, 11451 bp, Oryza sativa
ctgctgtcgttggttgcctggggcttaacctgaccagtggaggaggaaggaccaaggacaataacacattacacgtaggacagcgaggtggttgcttgaggaggagaaagctgcattgatggcttgttgctgctggtgttggtgttgcggggacctgcttgtctctgttggcagataagaagccagctccttttatccgtccttgtgtcctccctgttggtcgttacagatgagatattaactccatcttggaatgtttggtgttttttgaccagaaaaacaaagaaatacactctgaatgaaaatgccagaatgtatccatcagtggaaatatgttaacaagaaggaaacatcaaaggttaatgaaatggatggatgatatcactggagttcatatatgcatcattggacaggtcacgaacatatcccctccatcctagaaaaaagaagaacttctagctatgaacaaatgtgagcatatgatttggacaaaggaaaatgacaagcacagaagcacttgggagagaaattcctgatcaaatgtgccagtattttggcatctgaacatccgtcgccgtccaaactatgccacaagagggaacttaacatgtcttgcaagaaagcaaaagaagcctctcctgcctagtgtataccaaccctgcattcgacggcgacaggtataattctatacaaagccaaatccatccatcagaactcacattaaccaaacataagagctgtcactatcttaaaggacacaccatctcaatctcatcggtcccaagtgaggaaagtttggtcagctaactgaaaagaatccatagcacaagcatgaatcttgatcggattactgaagtaacaagagtgaaatttaccctagctaacgtatatgtcacaccatttaaacaaggaatagttagtttagtaggagattgagatacaaggaaccagagatcgatcgatcgagatattgcgatgataaccatctgatggggtaacaaacaagtggtcataaaattgggcaacctagagctaacactagaagaaacagcaagcaagaatgatgggtagatcgatgtgatgcctcgtcttatggtgatttgcccaccaaataatagatttacacacacacacaaacaccaatcatacactgaccaacaatggcacgaacttgcaagaaagggctagaggtggtccagatggatacagctttacaccaaccatcagattagattagtagtcagcttgcaagaatgcatgagacatgctgcctgcagctatcgagcgtactattagattaggtttatgttttagtatcatttgtaagtacaagaaacgaacaactgatcatgcaattaatgaattttgacgctatatacactgtgtgtgtattcagtattcttcatcagtgatctctagctaaatctctatgaaatttgtacaaaaatatgtatcagttaccactatccaacttgtattctcttctttctttctattccttttctgcctttggtttggtgttcctgagggaaaaaaatggtcaaatcaattttggttgggcttggcagtgacagtggcattggcagaagcggagcgagtggcgaggcggaggcggccggcgcggcagatctcggcgggggcgggcgcgtcccaccgctcggcgcgcgtcatgagcgccgccacctccgccacgcaatcgtccgcgcccatggtcgccaccctccgccgcaccgccgccgcctcctcgccggcgacctcgtcaaacagcgcctcccacccttgctcccacggcacgctcgcgtcgcacatctccagcgtcccgttccgccactccgtccagctccacccgcgcaccagccgcgccgccgacgcgcactcgccgccgcggcacgccggccggcacggccggcacttggcgccgctcagcgggccggggctccccagcgacgccacgggcacgccgtacggcgccggcgggaacgagtacctccggtcgctcagcacgcagaacggcagccgccgctccctcgccttgacgccggccaccttcagctgcgcctggaacgccgcctccgagttgagctcctggtagcccgcgacgtcgaggcgagggatcagcgagagcctggacagcgcgacgcgggacgcgtggcggccgccggcgccgaggcggtcgttgaggcccccgaaccgggaccccttggggacgacgtaggcgccgccggccgggaacgcgtcggcggcggcgagcgggccggtccagaagccgtcgacccgcgtacggaccacccaatcgtacgtgaagttgcctcgagattcgcgctcgcggatcaggtccaagcacccttccaccaaccgaaaatattgcagcaatccctgctcaatatagatacatacaaaaatgagaactctaattgcagattaacagcaacttcgtcccataaaaaccaactctcactttaaatttaaatttagacatttggtgtttttataggacagggaatatactctaatatatagttagacacataagtagatacagtaataagtattctaatagattgatttaatctacggattaggtagattagtcactgtcaataactttttttacgacaagatggagaacacatgacaagtttaaatctactttgtttttttctcttttccgagcattgacgtttgcggcatcggttgtttacatggggatgaggtatctatctacttgtagcttgtcaccttttctccaattctcccagagaaagcataatgccatcataatccgaagctttggaggtgaatacagaggatgcaaaagacgagcataaagcaaggcaaagaacaatatctatcaaacttttgtgatgtagatgacaatggcttttcaagagactttctcaaaagcgtcactacgtacccacattacctgccgtttttaatactacgtggaacatggattgtcatacacctttgcacgttattatattcgagcaaaacaaattatgttagaccaagatgatgtatccgtacattgatggtataagaacatcacgtttctacagtaatttcagaagatattttttttactgttccaaatggtcggtaccaaattttgtcttgtagaacctaaataaactctaatgatgaactgtcatcctctgttttggagggcacaaatttcattggaaaaaaagtccaaatgaaaccagcagtttatttgcagaaacgaggatatgtgccagcctagcctgatatgctttgtttacactagcaatcgcaaccttctggttactctactgtatgtatagaagcactcatgtggagccagccatgtgctcatctactaattgacatgccggtaatttgcctttaatttgcccccctcagtctctctccaaccaaccatggatcaacactgacacacacagcatctcatggataattcaggctgatcaataatactcaattactctccatttcacaatataagactttctagtattatccacatatatatatacttcctccgtttcacaatgtaagtcattctagcatttttcacattcatattgataataaatctaaatagatatatatgtctagattcattaacatcaatataaatgtgggaaatgatagaatggcttgtattgtgaaacggagggaatagatgttaataaatctaaacacatacacatgtctagattcattaacatttaaatgaatgtgtacaatgctaaaaagtcttgcattgtaacggagaaattactagactaattaatcgtggtagttaagcacacagacagttagaaactaccatcggattgggatcagtcatggtagtcgtggcacgtgctgacgtgcatgccttatacctacgtgtactggtagtcctatgggtgcacccgcgtaagatttgtcacagtactagccaagtacattgtgacaaatgtctcacagtgaaaatcaaatgtgcacacggcaatgtcctattcagttcgtagcttccgccgaacattcacaaggacacagtgcaaaaaacgaaaacacgacacaatttttttgttggtacacagtgcagagcgagtcagagacgggtcattgattgacacgtaccgaactgtctacgaaaggaacaatgactttgtgatcaatcatccgatcgacgacttggccaaccttgcttaccttgcttggaccaaagactgactcggatatttatttactgttaagcacatgatttctcttctgaattctgaatttgctttcttgtgctgattctactgtagtgttcgtccttatgaacaattgagagttatggtcccaacgcgttgatgccttttgagaaccaaccaactcggtgattgtgattgatatttttgctagctgtgggcaacgagctctcatttaaaaaaaataactagcagtagcgaatttggccgctgtctagctgacactttgactagatccgtgaatttggaatgacatgcatgcatggcccgatggctggccaatgggccattaacaaattgatgatggctctatacaattcccatgcgacttccgcggtagataataagatgcaaattgattaaactggtaccaattcaatcttgcttggtttcttttcctccatttgaagacgttatcaatcttaattatcttttggacctaattaagggcttaataaattaaaaggatatagagaaatgaaaccgcccctagattaaagagaagaacccaacaacctgcccctaccatgccattgccaccatcacctaccttcggtttaacttcaggtggttttactactttattaggtagttttttacttaaatgttttttttaatataagaagaaaggttgaaacaaattatctccaaattaagcaacgtggacagattagcagaggcgacaaacaagtcaagacgaacaaacagaacacccaacaaaaaatcgataaacaattagcaatgtgtagggaaaaaaattgcaatgaggagtatgcagcggcagcaagcaagtctaaggatgaagaaaacgacgcaacgtgcggggaagctatcgttcgatcggagtcggggaggtagctagcatgcgtgcgtgcgtggtttgatgcggaagcaaggaacaaaccaaaccaaatccaaccatggagtagtgggggtgatcggagattgaaacggcggcgggcgcgtacctggatgccgttgggcgagttgctggcggtgagcacgcgggcgcgctcgggcgtctcggcgatgcgctccggccggaacacccgcacggcggcgagcctggatcccggcggagcggcgcgggcgaggagggagagcttgtaggcgtcggcgtcgagcgggctgtggaggaacacgtcgacgacgggcgcgccgccttcgccttccttcttctcctgctgatgcgcgacgagcggggcgaggacgtggcgcgcgatggagggccccgtgagctcgaaccgccgcgcgccacccaccaaacacacggccacccgcggcggcggcggcggcgggggcggagacggagcgtgcctccgtcccagcgcgacgagcgacgggatgcggccgatggaggaggggaaggagagcgcggccgcgaggaagaggagcagcggcgcgatcacggcggcgatgcggccgcccctgcgcgcggcggggagtaccgacgacgccgcgcccccgggcttcatgctgcggtgaggaggcgagggcgagggcgagggcgagggcgtgggcggttgctagctcatggcggcggcggcggcggcaaatagtagtgggcgcgcgatgtgaggggggcgaggtggtgaagagggggaggttgtgccgcggcgcggtgcgttgcggaggagggaggatgggacgacccggcgacaactttgatgcggcctttaatgacccacgtctttactatttactgttcctactactatttacccttagagcaagttcaatagtatagccaactactagctccaattcatctatagccaatctaatagctcattcatacaatagttacatactacactattaatatctagtcccacctgtcatagacacactgcgttttagagtctgtgctacaactggctacaaatctatagcccgttgctcttctctctcctgatttatctctttaaaatatgtttgcagctggtttatagcctgctattgtacctgctcttatattacttatttagagcaggaaaagctataagccagctataatcacaacatatcgagaagaaaagagaagagagaaaagaaagcggctacagatttatagccagctggaacacagactctaaaatgttatgtgtgtatgagaggtgatattaatggtgtagaatatttctatggttaactattgtatgaataagctattggattagctatagatgatttggagccagtaattggctatcctattaaacttgctcttattgtgtaaattaagatatcaatttaaatcataccatttttttgaagttcctaaattgcatgcttttagttttttataaactttggtaagtacatgaagaatcgtgccaaaacttgataatattaccatcttacaaaatttggtaaggtttattttgactgccatctaaataaccccttaattaattactgctagttttaagttttaaccatatgaacctacaatcaaccatctctaaactcggcttcgcagtagaagtagctgctagtgtagtcatctgtaatagtagtggtttattgttttagatcaacaaagggaaatggcatgctgttcctagcatatgtcctgcaggcatgcatgtcctttggctgataaaccagtcgtgctatagtttgaataattttgatgagactaatggtggtggtgactggtgcttttttttttccgtcgagatcgcgtttgagtcgtcgtcgtttgactggcaaagcttggatggggatggaactgttatttagaggcaattaaagtttgaataatttgttactcccttcttttcaaaaataacttaaaaatctaggatatgatatgatttattctagtagtcctaggattgtccaagtgtaaatgtaaaatctctcatagtttaggacataaatagtattacatactccctctgtctaaaaaaaacttaacctcatactacgacgtgacacattaggatgaatctggacatactgtagagaatatccaaattcacatcttagtacaatgttgcctttttttggtgatagagggagtagattgtaatacaggacataaatagtattatggcagtgtatttatcttccttatttttattacacggtaaatgtgtacgcatatatatcactgcagacacaacatcacactgatagaatgtttccctcagagaaggtacaataggaaaaatttatcttgtgatagtgtgtttatggtggcaaaaatggtgaggtggcacagaaatgggaaccttcgtaggaaagtagtatgataagcggccatctatggtaagaaataattcttgaaagcaagttaattcaatttccagtatagtaatcaatcgtcgaatggtaaccttgtctatagcaaatggaacaactagtaaagtaagtacgcacagtttgtgtagacgggcattgcacatgcatgtttatcgcatcaagtgtttggactttagtcctgtcatatcagatgaatttagagtattaaacatagattatttataaaactaattatataaatatgagctaattcatgtgataaattttttaggcctaattaatctataattagctgataacaatctggtccaggtggggttggctaaggcccaataacttaagattgcccggaccccaacagtttataggccaataacttaaagttacccggaccccaacaatttagtttatagcccaataacttaaggttgcccggaccccaacagttcataggcacacccactggaggaaaggcccaatctccctaaaagactagtccaataggagaagggtagctctcccttttaaggtggcttccttctcccaagctaaataaagtaggattattcagaggctcacacggtcgccggcttcctcctaccaagctaagtaaggtgggattattcagaggctcacacggtcgccgtccgacttttgcgtctttgccagcgggtaatagtggaggatgtcctcatcattagcgcatgtttactgtagcatcacataggctaatcatggattaattaggctcaatagattcgtctcgcgaattagttcagggttatagaatgggtttttttaataatctacgtttaatatttataattaatgtccaaacatctaatatgatagagacttttttagtctcatttaaacagagttctctctggggctcaccccgccctgcagctgcttggcctaaataactgtacgaaagctgaagtggattcagaaaccgtggccgccacaatgtttgtggattttaattagaaaaggagcacggtggcacatgcacatgctgcggccccctctccctatcgtgatctcatcatcattcagatgaccactcctccatattattcttaacaacaatatcgtctctaaaataatattgaacttatgtttttttattataatacataataaatatattttaattttttattttagtattttataatataaatttatgtattctagcactattactttaaatacttttagagttattatggtcgaaaggcctttcactttgttattattttcaaccttatcaaattttagtaaaattgctaaaaaaaatggctacatttagtttgctgtcaaattttggtaactatataagaaatccattgccaaaatttggtaagtttttttttcatcaaagtgaacaggcccgaaattagaaaagtttgatcttaatcttattcaaaacgagactgaaaaaattattgatcgtacattgcaaatttagaccttcctaccagaccaacctacatatgggctatcatacggtttaattttatatatccaacatgtaagcaactaagcacacacatgcatgaatgtcagtttgcttgattttcatgtgcgagcggtcgatacaagttgaatatttttgaccatgctgctgagctgcacatttgtacactccaagtctccaatctggtgagtcatgggccaacaactgggttgatttataattgtttttgcatataatatcaacaagtatcgaaggttcggaaacacgcaataattagttcaatatttgttttctttttgtccttacaaaatcgaacgatcttattttttctgatgatactacaaaatcgaacgatcggttggtggttggtacgcgtatggttgtatgcatgataattagtacgactagaaggtcaatgcaagaaaatgtcaacacgttgatgagttgtagctaaaattcgaatttcatgacttaattttcgggttgttttttttagaatttttatttatcgtactctgttttttattcactggcttttaaacagctaataagatgcatatagaagtcttggtcacacattattatttgttactaatatgttcattttgaatggactatcaacgtatctcaggcgatcaagcccgccgccatgatgcgtgtatatatggatgcacgaacgaattagaaacatcatgcattgtgtcggcgtatgcagagttggtggtggtcaaaataggcagtagttagctggtctctgtttcttgcgtacatactgttacttgctatagcatgttgctaaatactttattcctcgagcataagactttatactttattcctcgagcataagactttatagcattacccatataacattcacattatatgcctaaattcattagcatctatatgtatgtgggcaatgctagaaagttttataaccttaaaaggatgcagtattatattattatacatggtttttgataagatttaggtggtgttcttttcttctgaagatgaagatgaagattaagttttttttacgtaaaatgatgtggtattaacgtataattgattgagttttaattattataaacttaaaaaatagattaatatgatattttagagcaactttcatatacaaagttttcgcacgaaacacaccgttcagcagtttaaaaagcgtgccacgaaaatcttaattttcgtccaactcttgttggagaaaagaacgggaccttactagtgttacatactccctcctaacacaccctccatcctaaaataaaataatctcggactaagatgtgatatatggactaactcatattcacaaagccctagattttttggccgagctggatttgaaccagcgtagacatatcgtcaacgaatttatagtctgtccccattaaccgctcgtgcatcgacgctggaaggatttattctagggtttttgataacctacaattaacatactttcataatactcctaccctcaaggaagttgaatcccagctgctccttgaaagagagatgtcctgaaccactatatgataggggtatccatgtatcacattttagtacgagattaatttattttgggattgctctatgtataaatttgttgtactaggatatgtacgatgttggtttattttgagatgaaagatgtacttctaaacatttctgtgatttcaagtgtacaactctgcattccatagtttccatctcttcataaaacaatgtacattcgacggcccatatttgagtcacaacaaaaggctagtttgggcccggcccacctatacaactcctacgtaattggcccacgtgtccgcacatgaatcaccgtaccaaccgcacacgtcatctcgctcttgaatccatctcagccatgaaaaatcccttttctcctctgccgaataaataaataaataaacaaacaaacaaacaaatcaaaaaagtattatttaatattattatcttcatcctgggtcccacacgcataggcagagagcaatcataacttgggtcaaagcgattaaccagccgaagcaaacaccaacaccaaaaaggggaaagcaagcaaatcgcaagcaatcgcgcggcgtcgccgactcgccggcggcgaatccaccgacgagcaatccagccccccaatcccgccgccgcaccaccgcgcatacgatccgccaggttctccgatccatcccccctccctctcccccgttcaattcgcgctctccgcctcccgatcggtaaccatttagggatagatatctattgggaatcgatgattctcgtgggtttggggggttgaattgaatcctcgatgaattttgtgaggtggtgacctgatggttttgagttgattgggtgggcaggaaggaaggaatggcgtcgtcttcggatccatgggtgagggagtacagcgaggcgtccaggctcgcggatgacgtcacc

SEQ ID NO: 3864 - DNA, 9946 bp, Oryza sativa
ttgccgtttcacggagtgcctgaagcttcatgtttccttttttaccctctttctttttcccaatgtatcaactgaatgcataattctgaaaataacgttggaaccgcgatgtaactaaagttccactcatgtacactgcaaatgaaaaatcaaatacatggaggggaaatgtttcaaaggcctgtctgctgttaatcatcccatgcatgcaattttcttatattaaaagagaataatgtgacattttctgggacttacacgcacaaatagctgttcaatccgcacgcttcttgactagcgtcacatgcacaaaaagcaaatcactttttccccccaaaaaaaaagtgctgatcaatgttgagatgcataattttcatcatcagaaattaaaaggagtggtccttagatttgccctgccgtttgcaaacacggtgtccttctcctactcgcaagttcagatatattttaaagggatatgttacagatcttcaggaactacagatcacattcaccagccaacaacaagcaatgcaagactaacctaattgagtcatcacatgaatgaaaagattgggtttttttttcctgaagcttttgaggtgtcacagcatgttttccctgcataaaggtgtccctaagtgtgtaatttagggatgtgaggagttgtgtgtttgaccacaaggttaaataaatgcatatcctgcatctccagctaggtagttacagatgcaagacagaaaaggttgccaaatgttatgccaagagagacaaaatatgaaagctagatcaattgttgcgtatgtacctatactgtagtttaaactttcctagatctatgaagctaagggtgcaagcaaccagcttggtacaactgaaacatgaatccaattaattacaccaagaaagcacacataatttgattgacataaaggtatatgtagctaaagtgacctacatggcataaccaccttgacaggctaaccatttcagacagaacatagaatgaccagattagcatcagcatgacagatgagatggtggctgtcagggtcatgcattgcaatggcagggcacaagaaacatcagtgtgaaggcaaaggcagcagacagacatgctatgcgtgtataacagtatatgtaaccaccaaggattgagatactttactggtcagaattcagtaatggatggtgagtgaggaagctgtttatgcagtggattgctgtcctgtctccatggaagcctgcagggtgtccccatggaccatggtgcacatgtggaatgagcacaaaatgttgaaggatagtactcaatctgggttactactgatattctgtgtttgcatatgtttgtgcttgatctctgatttgtttgtttgtttcagtttccataatatgcagagcatgtcattgcatttaaatatagaaacatagattgagtaaatttatatttaccttcaaatgcaattttacaatggatttacctcaagctagtactatatacaagatggcagaggtaattaggaggataatcctgcaaaaatccatgtaggtgcaggtcttaaaaaagagagatgctgtacctgtgatgtctgtccttgaggaagatgagttgacaccatgtttgatgctctgtactccttggcagtgttctcttctcactgtgtttgtccccatggttcattcaaccactcttatgatgaacaggggcaactaaagctcaccttgatcagtacccttaaaagcatcctgtttggtgagatttcagtcatgattcatgaacatggactctacttgaacctgaaagatcggagtatcagtttctgtatgtggagatggcacaaaattgcaggcagtttactgagctgagatgacttagcctagcttagcagattcagagagttcagtctcttagctctattctgataaagcgtaaaaatatgaacgaagcaacggaaaaataatttatggataaaacttttatatccggattatttatgattttaaaagccaatgttaaaagtagaccactaaaaaggacccccaaaattaactatacaattattaagtttcgaaattcaagaggtttttcagacttttgagctgtggtagacggtagacagcaaagctgggtcaggtacagtattgtactgtactgatgatcaggttgtgatctccaactccagcagctagagagacaagaagacgacagaaaagtacacgagctcaactccatttgcagcagcagcagcagcagaagcacagctcaccacctgtctttttccgatccaatcgccgctataaattcagcagccaatgctgcccgccatgtgcagcagaactcactcacagtctcagtctcagtctcactgcttcagctcagctctcctctcgtagctcgacgagctagctagcccagctacgacaatcatgggggacgcggcggcgggcgggaggaaggcggcggcgtccggcggcggcgcgcggctgcacgtggcgatgctggcgctgcagctcgggtacgccgggttccacgtggtgtcgcggctggcgctggacatgggcgtcagcaagctcgtcttccccgtctaccgcaacctcatcgccctcttcctcctcgcccccttcgcctacttcctcgagaagtaattaatcgatgcctaatgccgctaatcctgaattcctgatacgaatgatgaactagttaatcaatcaatcaatcatggatgcttgcaggaaggagaggccggccatgacggcgagcttggcggtgcagttcttcttcctggcgctgtgcgggatcaccgccaaccagggcttctacctgctggggctcgagaacacctcgccgacgttcgcctccgccatccagaactccgtcccggccatcaccttcgccatggccgccgcgctccgcatcgagcgcgtccgcctctcctcccgcgacggcctcgccaaggtcgccggcacgctgctctgcgtcgccggcgcctccgtcatcacgctcttcaagggccccgccatcttcaacacccaccacaaccaccagccgcaaccgcaacagctcgccgtcgccgtcgccgccggcaacaagagctggacgctggggtgcgtgttcctgctggggcactgcgtgtcgtggtcggggtggctggtgctgcaggcgccggtgctgaagcgctacccggcgaggctgtcggtgacgtcatacacctgcttcttcggcctcatccagttcctcgccatcgccgcgttcctggagcgcgacgccgccgcctgggccgtccgctccggctccgagctcttcaccatcctctacgccggattcgtcgcctcgggcgtcgccttcgccgtgcagacgtggtgcatccaccgcggcggccccgtgttcgtggccgtctaccagcccgtgcaaaccctcctcgtcgccgtcatggcttccctcctcctcggcgagcaattccacctcggagggtataccgattaatctctcttgattaagattttttttatttttttagactttttatttttttaattttattaatagacctttctaaaaaaattccaaatctaaacttttcgactacgccgcccaaataaatttgtcacgccaagtacagctagcgtggcagcgttgtcctgccatgtcagtttggcgtggcaaaataacgctgccacgcctggttaagaggtttagttttcggaatttttttaaaaaagatctattaatagaatttaaaaaaattaaaaagtctaaaaaataaataaaaaaatccaggatccaagaactagtaaatgattagtgctaattggatggttaatctgttcatgcaggatcattggggcggtgctgatagtggcagggctgtacctggtgctgtgggggaagagccaggagagagccattgctgctgcaaaagaagcttctgctgctgccgccattgctgaccaccagcagcaaccagcttctgctgctgctgctgattcttgcctgaagcaaccactcctgccggcgtcgacggtggcctcagagaatgtgtgaccgaccaaccatttttttttttttgttgatgcagatgcatgctggcactacatgtggttaggctaattatgtatgattcattaatcaattaaatcaacttaatttccctgttcaagtacttgcaagttgcaacaacctgcagtatgttaaaagaatcaaagtcgttgtgctattactgtgctatacaacagtttgtccagaggatttttacagtccaacgggtaaaccttgcggtatcgaatcttgactgttggatccggacaaatctccaatggccacatggccacagagattggtatcgcggggtaccagttttgtccctgatgtggtaccgtgtgatgattgtaggtggaagggcagtaatgtaattttgcgtgccaatgcaagactgaacataaaccctagaatgagctttgcctctcccaccgccgctgtcctctaccgcggcgccgctggaattgttcctctcccgcgtcactgtcgttcccttgttcctctcccacgccgccagacgcggtggagaagtaggccaggggcggtaaggcatcggctccgacgatgtgcggtgaggcggacgagggagctgtgtatgagcacgaaagggaattgcgtgccctcccgcgcctcggcacacaagctctacacattctttttccctatactaccccttcggaaatggacggctagatctgttttggtacctacaggtacaacttgttggactataacaacgttatctcccccttcgaatacaaaagaactccccctttaaactttctatttccagttgtgaaagatgcattctaagttcgactactaaatctctcaccttctgcttggattgaatgaagagttggaaatatttggcttttctatcttaattacaacacattgatggctagcttcttatagccatcctaacttttttgtacggtacccttaacataggcatcattgggacttaagaatttttggaaaacttttatgcatgggaatttaactaatttctatgaaaataacataagatatatacgttccaaaagagcccagcttagagcaatattgatgcaacagagcaccgactgacagatgtagctcaactgttcctccaaatcgaatgtccaagcatatctcttccactctttttttttaattaccatatatccggaaagttctctgtggagtgtgtatgtataatatatcttggaacttgcaactaggcaattcttgacacacttactttcaaaattaattcagatacacctgaactacaggaagagaaatagtactaacacatatagcaaccatgtctgacgaaactgaataatacataatcaggttggagcaacaaaagataaaccccatgcatccacacaaatcagagaatatatatatttttgaagtgtatcagagaatatattaaacaaaagcagaaaaggcacaaggtacttatattcatatatctttttttttcaaaaaaggagaagcactagctaaccaatggtgttccactaaaaataaagcacgatcgagagagaggagcaggagagcatggggggaaaagcaaatcatttttctgatgttaataaaaaaaggagtcgagtggagtgaactgtgaagcatttgtggtgaggatatccatggaagatgccagtggcagctatagctgctgcctcgccaccgtttcattcctcgagtttatccccctgggtcgagccgcctcgccacaatcctttctttctctataaattcatcatgccatggctgctaatgctgcagaatggagctgagaagtaaattcagatcagattcagagagagcatgcagctgattgcaatgtagcttcttccatcagggggtgtgtactgctgattcctcatgcgtcgtcggagatcgagaggtgatgcatgctgcgaacggcgagcggcggcggcggcgacaggaggtcggcggcgagctccggcgtgctggctggcatccggcgatcgacgacggcgaccgagggagggaggaagctatagctaggatggtcatcatgtgattaattcagtgatgtgtcctaattaagtagcttcttgcttgctagcagggcaatttcaatcctttggcatctgtaacctttttctttctttctgaagtaaaccttaataacccagctatgttctcttatgatgttctgagcaaatacaacaaattaggcatacagattcagatacaatagcacttgagtttgtatctagtcgtttgtcaagagccaagacacatttcttgagctatttgttctccagctatcatgcaataaaaaggtactatgatcctatcattttcaaacttatgcttacacttataagtaaaaatttgtattttaaaattaatttcggggtttggttttatgttttttttctcatagttcattttatactagtatttgcttttaaattgctaaggacacgtatgtaaaaaaatacctacaaattactttttaattactaataagacgtacgaataagcataaccataaacaaaacgctgagtccagtagtatttcaaacatgacacaactgagaaatttggaggttttgtttgaggtggtttttcagattaagtccatcaaatcagatcgagttttcagtcaggtttgaagtagccgatcccaaagttcgttctttttcatccggtcacagaaaaacatcaagggaacgaacttgtttctgcactgactttcaggcaatatgtcattaatcacaaaaaaggaatactgacaaaataggagtactccagtaactgcatttctgatcccgaggatgaagagacagctactacagctgacaaaaataactgcacgcattcatcactctgctgcttgctgttgttttctgtggcagctaaacgctactgtagatttccgtgattctctccttgcagaaaatacaagtgcgaaattaggaatcggattataccggtcattgggggtcaagatactccatttcagaatttcagacagagacaagtgtgacaggtacttaacctccaacttccaaatgcgacaatttccgttaatcaccggatcaaagttccaaatgcgacaaacactggatcaagttccagctacatccaaatttttttgaaacgaccgagtgatctagagtagagatagagagatcagtttcagtatgggcatgtttgtgctccttaattgcttgctctatgtgagtcttcgccagtatcagtcctggtagttgtagcatcatcaacagcaatgagaaattgatgctagtatgacatatccacagttaaccatgtgtgtgacaaattgccatattccttgccaatctacagtctgttcttctattttctaaatttgtttcatgaccacgtcctatttttgctaatcaaatacggttgatattactcaattgttctagaatttttttcttcaaagcccatggttagatattccaatatatcacgatgcagaggtcggaagtgtgcttttgttatctagagaaaatgttccgatctgttcaatatgttcttgcttcctaccaaaccatatcttcgatcgaaagttaataatggaaaatggttaaattccagcttgaaatggagatttgggaatcacaattttacagccttgatttaattttaaccaaacaggatatattccaatttggggattacaattctatagccttgatttaattttaaccaaacatggatatattcctttcctgttgatacacaaacccgagttagtacactcatatcatgcaaatatcattaatataaggggcctaaacgaaaaaaatatccctacccgtttttagcttaaaagcccacctcctctttcaaatttaccattcttcctcacactccaacctcctcctgtctccttctctctctcttaaaaaaaaacgcgacgaatccgacggaaaaatcggagaggaaaatccgcgccgcgaaaccaaccgaggtggtggtggttagggtttgacactctcaccgcccccgcctcaaccgcgagcgtctccggcggcgatcccacgggccgccgcgcgtcggtggggggcacccgatcgacctagatctcgcatgagggagccccgaatcggccagatctagggagctcttcgcggacatgcagcccggcgaggcacccccctcctccgggggctcgccggcgacgtcgccgcggccgccgccggcggtggcgcaggggcagcagcagctagggtttaggaatcaggtgagtctgggctctctctggtctgccccaccatggcgttgggattcgaattttttttgtgtggtttgggggtttgaggttttctctactgcggcctgcgcgcgacgtgattggtggggaaccgtgggttgtggccgttgggatttgggaaaaaatcctgacgcgtgtggcgaaaaggcggcgcttttttacgcgcccttccctaaacagtaaaccgcgagcttcgtcctctcccactcactggactgcgaggtggtggctttgccttgcctcatgtgatttttgcctgccctgtttctgatgcttgtccggatggttctaatttccgtgtaattttgggtttggaaccgtctgtgtgtctgatttgggttgaggttttggggggcattttggtttcgttctgtctctctgtttgtatgggtttggtttggtgtgttgatggaatgctccaattgcgtggttggtctaaacgggttggcttgtgttgttgcaggcaatgatgcatcaccatgatcagcagcagcagcagcagcaagggtacccatcgggcgcgccgcatggtatgatgggaggtggtggcagcagtagtttccctccgtcctcaggcccaatgcccccgttccagggccagaggaacatgccgctacccggtggaccgcagggtctggctggaggccagcagcataacccgacggcgatgcagcaagcatacctgcagtacatgatgcagcagcagcagcagaaggcccatgggatgctcctccagcagcaacagcaggccaagatgaatatggcagggccatctacaagggaccaggatgtggctgccaacactgcaaaaatgcaggagcttatgtcccttcaggctcaggcccaggcccagatgttcaagagacaacaatctgagcatcttcaacaggcagagaagcaggcggagcaagggcagccgagcaatagcgagcaaaggagtggtgatatgaggccaccttcgatgccaccacaaggggtccctgggcagcagttgtcatcggcgggtatggtgaggccgatgcagccaatgcaagggcaagctggcatgagcaatgctggagctaacccgatggcaatggcccaacttcaagctatccaggcctgggccaaagagcacaatgttgacctgtccaatcctgcaaatgtgactctcatttctcaaatcctaccaatgttgcagtcaaacagaatggctgccatgcagaagcagaatgaggtaggcatggcgtcacagcagcagtctgtaccctcacagatgaacaatgatgcaccaggacatagtaattttcctagtcagggtgccccatcgaagccccgacagcctcttccaccaagcacctctgtttctggtggggcagagcctaagatgatgaatatgagcaacatgcagatgcaacaacagttagcagctcataacagagatagctcgaatgacagggctgcgaggccagccatgtcaatgggcaatggtggacaaatgatgcatatgccccaaagttctggacatgcaaacaagattcctgagcagcccaatccaaaaaatgcaaattccgaagcaatgcagatgcaatatgcaagacagttgcagcaggctaaccgagctactgccccttcagcaaattctggtg

SEQ ID NO: 3865 - DNA, 707 bp, Oryza sativa
tattattttattctcttctcttgtttcttgtactagcatatgctactattgttagggccccattgatttataggaaaaatataggaattttggaggattttaaccctatgaaaaaaaaaatcctatgaaggcctttgaaacaaaggattaaatcatatccaatcctttaaagttcctatgaaatggggtaatcctatgcacattttagagaaaagttagcaagaggtctaacctcttggaacatttcctctgagtctatctctctcatctgattcctgcgtttttcctgtggtccaatcaaacggtcattcctgtgttttgcaatcctctgttttacaattgtatttttgtcagaatcctgtgtttttcctattcctattattttttcattcctacgattcaaaggagcccttaatttgttactgtaaaatttgtgctctacttactcttcttatttcatcagagggcatttacacaccggtaattgataattcagcattccaatttcgctatatttatcttcaaggaaaaaaatattcctgcgcttcaaacaagttcttacaagttacaagaaacagctaatgatcactgaagaatgagcactgctcaagatagaatcatgtaaggaacaaaccatgcacgcaatagaaggagagatattttttggtgctgctgattgatgatcttatctcacatcatgcgctggg

SEQ ID NO: 3866 - DNA, 725 bp, Oryza sativa
aagttggataaagcaaatatcttgagtgatgcagctcgtctgttggcagaactcagaggcgaggcagaaaagcttaaagaatctaatgagaagctacgagaaacaatcaaggaccttaaggtattttgttctcacaattttttaccttctacccctggattagaatgcctgatgccctccacagtcatgtcctgtgtcctaaaatgatatatcgcatgcactgttcccaggaacagagttcaagcagacacaacaaagaaaacttttctaaagtgcgccgagtttgatttctgtgcaattgttggttggttcaccagataataattactaggttcactaccttcactaatggcaagtccggaattcattggtcagacctcccatgcatctacgagaagtcttgatctgaccaaacatgtatgttttatggctctattatttttcaggtggagaagaatgaactccgtgatgagaaagttactctgaaggcagagaaggagaggctggaacagcaagttaaagcattgagtgttgctcctacaggatttgttcctcatctccctcatccagctgcattccatcccgctgcattccctccatttataccaccttatcaagctctgggcaacaaaaatgctcctacgcccgcagcattccaagggatggcaatgtggcagtggtcgcctccaactgctgtggacacaactcaagatccaaagctttgg

SEQ ID NO: 3867 - DNA, 665 bp, Oryza sativa
tctaccaactagtggatcccccttagtatagctatagttgcacgcatggtctgaccaggcagccctggcttttgctgcttctcaatctctagccaaagcaagatcacttaagttctggtttaacctttatgcctggagactgggaagctgcttcaatttgaatgactagtcagaacttttgagttttggtggcactgaaagggagatgctgcatttttgctgtttcttcaggagatatttcaatgccataactcttaattaaagagtttatgttttttgtttttaatttacagacactacaagattgtgaagaaagttgtcaacagcaccaaagcaaggctggagatccattacctgttaatactacaaattgtatccagaagctccatgatgaatttgagacttcaatgtctgatgatcttcacacttcagtagcactggctgctatttctgagccattaaaagttatgaatgacttgctgcatactcgtaaggtaaatcgaatgaaaaccttgtggagatacagttagtgactttcagggatctatgatttgatctgctcgcacgccacaagtaaaatactaaaatcatacctaatgtttcaatctttctctgatatttgagcagggaaagaagcaggaaaaaccggctggaatcactttctg

SEQ ID NO: 3868 - DNA, 1331 bp, Oryza sativa
catattgaggagagggggagcagctgcttctcctattcttggtagatgcggcgtggagtggcgggggccatggatgacgtcggcaatgacggtggcggtcggtttggcatggagcgggggcaaggcggcagcgcgtggcgtcagcggcgcaagggctgatggcggcggcgaccgggtggcgagcgcgcgcgcgggaagggcgaccggcgaattcaaacggcggcggcgggaatcggcgccggggagaggagttcgacgagagagagagagagagaggaaggagacaagagaggcgctgcttctctcgctcggcgcgtgcagcgcacgtgcggggaggaggaggagcggccgagaggagaagatgggctggaaaagggaaaaacggcccaacgaccaagagggaggtgaaacggctgagggagggaggtgggctaagggggaaaacggcccacaatacccgagggaggtaaaatagacttttgtagagaagactgatttggagtggattcgaattggggttttggatttgaattcaaatttgacattcgaactcgatggtttagggaggaatcaagggagactcgaggagaagtcaagaaagagattcaaaacggaaacttggatatttttttttgtagtcggagcgaatgttcggcaaggattcaaaggaagggattgactttcggaatttgatttcggagacttgaattttggataggaaatcttgaggtggaggatttttgatttcgatgagagggaacaacgggattgaattgagatccatggcacgacttaaactcgcacacaaagaacaaaattttcgcaattaggattttaccgaattagtttttaacgtctcacgagaagcggagcgttacacgaggtggggtggcggtcactccttccccaaagactagtcggagaaggctgccccccgatgccacgtggccctcccccgaggggagtcaggcccgaggtggggtggcggaaactccttccccaaagactagtcggaggaggctgtcctcccgatgccacgtggccctcccccgaggggggtcgggcccgaggtggggcggcggccactccttcccagagactggatggaggaggctgccccccgataccacgtggccctcccccgaggggggtcgggctcaaggtagggcggcggccactccttcccaaagactagtcggaggaggctgccccccgatgccacgtggccctcccccgaggggagtcaggcccgagttaggacggcggccactccttcccaaagactagtcggaggaggctgcccccgatgccacgtgggcctccctcaaggg

SEQ ID NO: 3869 - DNA, 8650 bp, Oryza sativa
tgatttgagtaaattatttttgtgttcagggccctggcaggtcatgcttaagcaagccgatggttcttatgcatgtgttgcagagagtgcagctcggttcactttgggacaggtcatacaaaattttgcttgcatgaattagttatgtcattttggagttgtggtgtatgatgttccgtgtttttcattcaggctaaggaagaactgttaagagttcttggtttgcaagaagaacaaggaagctcactagaatttctcagaagaggatacaaggtttgcatctttgtctcactttaattgtaaaatgcaaaaatgattagcataatcagcttcatatcatcatgctgatttcaaatgattcgttcgatgtacttctatccctgccacctcatgtgcaaactccaaattcaatatgaaagtttaaacttcattatcgtagcaggctagcagcctgtctcaaaataaaactttaagctctattatggttgcacctccaaagtaccttttgcaaatctgcatttcgtcaagagctagcattgttttaccatctaaagagttaacctgtaataatgcagaatgctacttggtgggaagagaatgttgatcaggagaaatcgtcagcatggcgaacttgaggttgaggccctgctgctgccttgtctgggtgctgatctgattggcggcgagtgcagacaggaacagaagaaaaaaatggttgtctgaaattgcagagcccaggcgacaaggatgcaaattgcctgtgctgcaattgtacattttgtgattgtaacatgttactgtgtgagtaacaggcattagagttttgagaggattttcctttctttttcgatgattatatatgtgttggactctgcttctttgaagcatgaagcaacttcacattttaaatggaaattcgtgttcatccaattgtactttctccccctccctaaaaagcaatatgaatggaaattatccttacaaaaaattgtttcggccactctggagattattctttttcatgctaaaatatgattatgattatttttattttttatcaagacaacattttttttcctttgtgatgttctcaaacacgataagccgtaggaaaataaacaaagcaataagaatagttcattaataaaagtgaatgctggaaaatagaactatcataaaaaaatcccctaaaattaccttgaaaataaagttttaaaattcgaattttgactttaactggtaagctaatatggtaaatatggtaaggttatgctcgttaagtattttagctttaaaaacttgaaaaattgattaatatgatctttttacaacgaaaaattcgcaaaaatgcactatttaatattttgggaaatttatgcgtcaaaaatgaggaattagaagttcgaatctagtaataagtattggcaataactctcagaactccagaagcttctattagtagggacctgtataaagatgcgtgagagctcaaggtcccatctgcaaaaacaccaccgcgacgaacgagcgaagaagtgggaacaagacttcaagagagagaggagagagatcgcggccggggacggagacgatggagacgcgacgagcaacctacagatccgccgcgctcctactcctcgccgccatcctcgcctccgccgcctccgcctcctccatcggcgacaagtgcgccgcctgcaaggccgttgccgtcagttcccgtattcttttctttctttttttttttgcccctctcgtcagttcatacgcgcacaattcactcatcctttggagcaccttgaagcaatttagttcgtattaaaatcgttttataccaggatgggaagaaattagcattccatattttccactccttgtgaaggagatcgaggcgtactgtcctagatctccaaacatttcctcggacattgtagaatttccaaagcgcatcgtttcactgatatggagtgcgcattgtagagatctgatgtatctgttgatcttgtttgcaggcagagctagagattggaatttcaagtgtgagtgaactctttttctgtctgcttttatttaactattctgtcataatttaaaatgctgatttggagtttatgtgtattggaaaatagctctgcaagtttcaaaatgattcaatatatttctttctgtaaaacagcagttcccataaacataatagcataggttcttctactgtccttgttattgtcactattggcaaattattaacttccaagagttctctaatgcaggagaaaccaagaaatcacttggacttgcgcaaccgcttaaattcaaaaggtcagcgtgaagggaaggtcattgattacaggtatgctaaccagcatgatcccttctctgctcaatcatcaggggcaacattcctatgtgttacaacattgttatcatttcatgtttcaacctatttgaatcctaattgtttggaaaccctttgccgcatcctttgttctatttacttgagggagagcgacgtcgtgtctgtcgtcccctatctctcattcgcacgagatttttctcaagggtgagcgtcacgagcgcatgtgagcgccaggagcacgtgtgagagggaggaaaacgggaaaatctggtgttagtttaacagaagtgcccacttttagttttgggatattttaggctttctcttggagagatcaattttttcgctacctattttcacttcaataagccaaaaaagaaatctttgggggaagattatacataatctcctagtgatgttcttagggactctttgaaatacagggttccaataatctaggtgattttagtgccacattttccggaatttgggttatcccaggatcggatcctatatcccttattaacactcccgataatctgggtgattttagtgccacattttccggaatttgggttatcccaggatccgatcctatatccctaattaacactcccggcgattctacccaactaggattaaaaaaacgcgaatattagggaaggacctaatatcaaataattagaaggggtgaggcttcgaacccaggtcgtctattccaccaccttgtggagctagtcggaagactacttgagtgtttctcaaaagagggatgcaacaaaggactttctaggaggtcacctatcctagtactctaggattacttatgattcttgaaaatccaactaattaacattctttgaactaaatacaccctataagtgtacatatataaataaaaaacaaatctataaattaaatgttgtgtcgtttaaattccaattatatcttgaaccacatgaaaaactcacgttacctcttgggtcacttgatgacatgcaaaaagaacaaattttaagacaataaggcctggtttagttcctaactttttctttaaatttttaacttttccatcacatcaaagctttcctacacatacaaatttccaatttttccgtttcatcgttccaatttcaatcaaactttcaattttgtcgtgaactaaacacatcctaattggaaataaatgatgtgaaacccaatgcgtatttcttagtatttattgggaaaagaaaatacttcctccgtcctctaatataagggattttgatattttgtttttaccattcatcttattaaaaatttgttcaaatataaaaaaatgaaaagttgtacttaaaatactttggttaataaagtaagtcacaaataaaataattaatatttttttaaaaaaattattaagacgaatagttaaaccgtacgaatagttaagaggacagagcctacttttgtcaacgagttggagttcgacgtggagcagcaatgaatagccacaaagtacggtagcttttcccatccacgtcacacttcacgctgtcacgtcgcgatctgctctctcttcccactgcagtgctgccgcgtgagcgtgaccgcgtcgtcgtccacggcgagctcgacaccatggccgccgccacggagcagccgcagcagatcaccgagatcgagcacgcccacctccccgtgcgtgggctcagacatctgcttctatttttcaattgcagtatgggcataagctcatgataatctgccatatttacatatgcatacatgttttttggggagaaatttgtattgatcattgttacttaacactaaatgtagagtctctttgtcattttaagtttcatttggtttcacacatacttgcttaatagatgtacaaaacttaccatatattttgtattggtatgtctttaactctgtttatgtggtgcagagtaagtgagcttcgagttgttgagcttctggatggcctatgtgataagatgcaagattataccctgcagaaggtagaaattccatccaattgttttagcattttttttactgcatactatgtccgcatttttgaattttgagactgaccttttcagttcactttttatattaagttgtaatataggtatctgaacttgttgatctggtgctattgtatatgatgcctgcatctgtccaagcattttagccatctaacaaattttgctgtatgcagttggaatcaggagaaaaaggatgggtgaaagtagcagattggaacagttttaaaactggtaatcttggacatttttatcactcgtaaccgcaaaataaatctggagccctgatctgtacattcttgtactcaatatgttaattcgcttatcctgtttaatagcactcttacacgaccatctcaggcaatggtgcaagcacttgatttagactgtacatccggagactatagcctgctttgttattttgagcattgttaatatgctcaccatgataatacaatatacaaacaagttttgcatacattattgagacggtattcatcccatacgtggaaatgaactcaatggaatatatttatgctaaatgagaagcaaacaacaggtgctgtggtttttgcaatgaacttatcacaatagaatcactgaaatagtatccaaaattgctagctacctgtgtttctgtattgcatttgtctcagtgaaagtaataaaacagtatttccaaatactaactgtggactactcacttcattgttcttttgtagaaaagaaggccgcagcacgagcacactccaaaaatttatcctcattctgtggaaggtatgacaaacaatatctatttcctccctaacccttcttgattttttatttgttttttggatttaaaagttgttttattgcatatctgacctcttattacaattttttaatagcacttcttgttgcaaacactttggaacggtgtagtttctggcaggtgtcattttccatagataaaagggcctctattctcacaaataaatttcattatgttgaacttaaattagattatttatttttaggtgcatcgtacacaaacataatttcataaaaaaaatgagtacatatctgtccacataggccttttctggttactaatattttttttccttactggctaatgttttttttattgttgacctgatttatccaggatgaataaactcttaataatctatatgctttgaaagtgagaagttattgcttgtctaaaaataaccttttacacctttacttcttttggtttctaatttagactgttgtgtactgaggggatgaactgacaaagttcactcatggtgcaggttactggaggaaactgaggatgaggtaggctgcttctcttggatgacatttatacattactttttttatactagcaaatatcgtctgaattttcccgtttcttgacagctgtgttttgttatgaactatacagatctatcataatttagttaaaaatagggcctcatctagagctttttttggttgcagctttctgagtggataaaaacgagctccgcagaatcaggaaatgtcagcagagcactttgtgaagatattagcaaacactgtcagtctacaaggtatgtgctatgaatatgaatcgaacattttgtcatcatgaaataagagattgctgtactcgcagaattttctttgcagacctctagttcactaacaatcctttccctctgtttccagtgctaccatcgagatcgacgacgaactataacaccaaagcattctggtgccatctttatctcacaaagcaaagcaggcgaagacctggaaagcgtagaggaacaaactcaaatagtttctgatttcatatgttgtatcactgcaattcatgtccttaaaatgggagaattgcaattcgttccatatagtgtctgtctatctggactaatctgttgagaacattcgaacatgagacaaattttgcatactaaaattacggttgaaagcaacacagttaactgattcagggggacttttgcaaaacgcctatttctgatgcaatcatggtttgcaataacgattggttttttgcgaaaatcacttggttttcgtgaagttgctggggataggtttgtaaaaactgagttttttttagccaattattttattatgggcttgaccgaaagtcattggtttttatcgggtttcattcggtttgcggcacaccgacagaagtataactagatcttgttctgttttcagatatagtttacacgaaggtttcccagtgtttaagaaatcattcaagttctgcactgaagaatttccacattccaaatgggctccatgaaccaaaattgtttttcattggaggtgtagtgtataactacgacgcattcctttcgcatgtacccatgcatactatcttgtgaaatgctcgttgaatcaccaaattatcctccattaattaaaaacccaaacgatctcgtagtaattcctattaaattcatgtaatattccaacagagcccatagtaattttgagtgcaaatgcagcaatactttgttatgtactaccaataaaaattccaacttgcaaaaaaggaaaaaaaaacagagaaaagttacaactttgaaatccgagaccaagagcacgcggaagttgactttgaaattcatcaatttgagtcctccgatttttccgaggggcaatatgcaaatcgcacaaaaaaaatgaaatttatcaactcgatttcccctcatttattgactgctactagtagtaccactatagaaaaagatcaggtcagaattattattacagtaaataaaaaagaaaataaatgcaaagatagaagagaatagtagtagtatagtgagtctcgtcgcagtgagagagagagaggagtcgagtagatagatagatagatcggcgtgggagaagacgacatcgccggcgacgagaccagatcgatcgccgaggtatcgcctccctccccgaccgagcagggtcgccgccgttcgttcctcttgctgcttccgccgcatccatcctggtgagcacatcctcccgccaccgccgccgatccccatccatcgcgcgagcgagtcagggtcgccgtcgttcgcccttctgcttccgccgcatccgttttgcgttagcccacgcacttttttttcctcagatttgcgttaaccctagctctagctgctcctgttctagaaatttgccttggccataatactaatagcagtttgtttgttcccaaaaaggcccatgtcccatgttagatccgccgccactgtgctactgatcttctccgaattgtataatttaacgcatatgctcttttgtatctcagcggggactaaaccttgaagcatctgggctgttgtttcaccattgtagtggattccacttcggaactgaacttttctagttgtttccgtgacaatgaaaactcacgagagagctgctaatttggcccttgcaggtatacatttgtattcggctgagtcatcacagcattggttctgtttattaccattttctagtcctttgaacaaactgggtatttgctgagctgcagttctatgtattctaacattgtacgcaggtttgagcttggcaccccttgtggttaaagtagagccaaatgtgaacgtcatattgacagcatgtcttgctgtctatgtgggctgttaccgttctgtcaagccgactccaccctctgtaagcaatatgcttcagtttgttttgttatctaccgagccatctgctgggtgctaatgtgataggttgttcacaaaattttctgcatatggctagaataacttgattcctgcatttgttcttatgtaggagacaatgtccaaggagcatgctatgcggtttcctttggtgggaagtgctatgcttctctctctgttccttctattcaagtttctctcgaaagacttggtcaatgctgttctcactgcctactttttcatccttggcattgccgctctctggtaagtccaaactctccttggaagagctttttcattcatgtaactacttaatactgtatctgtgcaattaagattgttcatgtgcttattttttttctgatgcagtgcaacattgctgccttccataaaacgattccttccaaaagaatggaatgataatgccatcgtttggtgtgctccatttttccactgtatgtctgtaggacccaaacctcttcttttttttttttttgctcaactcattggttcaattgtgtatcatatgccagattgttgcatct

SEQ ID NO: 3870 - DNA, 19466 bp, Oryza sativa
gtaaaaagaagatagatcagcaccttcctccttcagaaaaaagcttcaagatgttttctccacttgaggcctgtctactacatacacacactagacagatggatgctgctccacttaaggcctggcattcattcatttcattcatgcatggcattcagattcagtcattcagggccatcagaagcaacagcaagtgctgcaatttcttttctacctctcctttatgccccttccacaaagcaatggatggattccatttccattccattccattcctttttatcaccaccaacaacaaaaatagtgcatgggtttgcaaacacctggaaatgtgccatcctctagtttattgttttttgccatttgtatatatttgtgtgctagctagctagctgatccaccactacggcctcattgcatctctgatcactaccagaaggaaaaaaggtattgaaattggacattatagtgtggttcaatattatgtgtcaaactaggagtgctctgtgggaagcttaggcttcaagtgtggctatcagtaggtgctagacactctagtcacttattgggggtaaaatgatgattcttggaaggtgattaattgacatttgtgcgaactagctagctgtcatgtctgtcaatggattttatgcatcctatcttttctgaaaataagagactgtcaacttcaaggctaacaaagtggcatgtttgctcatctagtagattaacaaactggatattgctgaagacataattcgcattatctttcttgtgataggcagagaattcgttggtcctcaagtttttgtattattacatactagttacatgcccgtactttgcaacgggattgggtgatagaaatatgattaaatttccttctatgccgggttttcacgatgcattatgttttgaggtctttttggagtgtttttttaagggaaaggaatggttttttagaggaaggaagttttttttttggaggggaggaaggaggacgacgaagtagttaagagatatgggtatacattatatgtgtaaaatcctagagttacatttgtgtacaaatgtaagttcttttttttcgccgggaataagttctttttttttgtaaaatgtatcaactagaagtaaaaaatatatataggtgtggaaaggagactatatatgaagtggcaaagaagatttccaacaccctttgatatctctgcctctcaacatgtggattccaccatcctccacaccaacatattttatacctgaacaaaatagttgacatgctgtgagccgttccttccgatccaatgctcatcatgagattaaagaaagttaattccagatgcaaagcaaaaggcagcaccataacatctcctaatatgcccaaaaaggaagaattagagatatattagcacactaaaaaaacatccatttgatttgcctcagctctaccctggcaatagtagtgttgtctctctgaccataaaaatcatgctgttagtttatcatatcctcaaggaacatctttcggtgtcttgcactctggcatttgtcatttgatgatgctgactttgcaaatgcacatctattactagaatactagaaaggtgagtggaaaaattgtgttagtggaaaagaaagctggtgttgatgtgtgtaattgaaaatacagtgcttaattaaagattgcaactatatgcaaccatcttgtgaccaaatggtaagtaacaggccactttgcatctgatcaggtggtcagctgcaaagtatgccttttcttcagagtagtcatgaagcatgccttttggtcttgtgatccaagagaacactgaaatcagagtttttctttaaattgacttatactagcagctggtaaagaaagccattggagtatacccgaaggctgttcatttgatttagcattttttgcttttatataattagcaaagttgatcttgaaattttacattttggaacaatccgtcgcagattcgtcgcaaaaaggggcctgcccaatggtcaccaagtattgtatgagcctgaaaaacctacatgagttagtatggtttacattgtaatgttgcaatttactgttgatcatggataaatagctcattcaggtaatcatatatcacaagtaatgcgtgtcaatccagccaagttaagacgttgaaatccttttttattttaatgttggaatgattgcagtaatccaacaactgttctttttgttatcaacaaccttatttttttatcatgaatgcactcggttgcttcctcctgaaattctctttaagcagagtcagaagcattacgtaatctgtgactgattatattttaatcaagtaaatgatagtaataataattattttcatgggtgaaggtacttgtggtgaaactgttctaagggctcaatcactatgtgaacattacatcatttattctttcatatagggacatgattaaccaataatccaggatatatagtccacagcaaaatgcaacaaataaattacccccattagtttgctaatttttttaagcagacaagataactacctagtatattaattaacaaacaaggggatttatttatagtacataaactgaaccccattaaattcattgtagtacatttgtacctatatatatgtttccttgctgttcagaggtcaaccatatcctaaactaatctcgggttgttacctgaaccagaagtgcttggcttaaatctcacataagtactcgtaggtttggatgacaaatcaaggtactagtagaccaaagagacttctgactttgcagatagatgcgtgtatgaacagacaaaggaagctgataatcctatgtaggagtaatctttaagccatcagtgtcggctgttttctgcaaaagacagagaaaactgatttcttaggaatgcacaggacgtagacttgaattatttgccagtagatttttgctgttttttatgctacttgtcttttcttttttccttcacttgaacagagtgttatgacagggagagcactgttataatgctctgtttacttttgacagtgaaagagtttgataactccgagctaggttcgatcactgatcaatatgtgttaacttctttattttgttgaaaaatagagtttgtcaccggttacccttacccatggcatgatccactcccattccttcgaccattattaagacaaattttacagtagtgcctactagtattagaattaatcgctgtgtatctgcctgtctagaagttagtaatgaattgaaatccaacctcatctgttgtatctgcacttctcagttattacttattacgtattaccgtctctgaaatgtgtaactctcgtctctgtttaaatcaagcagagacaaatattcctttttagcaaggcgaactgatttttttttgttatttcacttaatctgttgcaacacactgtattttgctagcactaagaaatgtacagagtaactccactgacggattaagcgataaaaaattcagtaattctacatgtattcctgttttatctagaacatttgactagactgattctaaaacagctgaataaaggaagaaattgccacgaagaacaagttacaaacaacttgccactagtatgttttgctactaattaacaactttattgatttcttcttgacaccggaacgtacgggagattgggcgacttactaccatctgatcatcttatgttgacctgtgctaatccctccagtgcaatcgccaaatggaggccatccatttcacagattaattatagctgttaattaatctctgctactgacactagtgtcatccactcacatccgctgacttattccctaaatcaccgcctgctaaaaggtctcctctcctccatctctattgcccactaaactaagctccatcatgatgtactataacattagcaggaaaatgacatgaaacaaaatgtatatccttgttgtgcttcctaatggatccaagaaaataagccaaacttactaacaaaataacttaatccctggtttcataattcttgatattttgaataagattaagatcaagacaataagaactttgactatcaacaaattttaaattatttaatttaaaaacactaaaacacgatgtatagattattctcgaaaagaaatttaacaaaatcaaacatttttacttattttttatgtgttataatagaaaatcatagttaaagatatattttagaaaccatgtagatatccaaaacctgaagaactatggaaatggagagagtactctgatacagagactacgtctgaacgcaacaatttcacatgaaacaaagagttagatttactccatcatcttaaaatataaaaagaaatagtttggtccctcttcctagttcatttggtctatagagttacatgacctagaaaatgaaaagacacgtcagtaagcaaacaggctttgaaaacaattaacctggagaaataggagtttaggacagctcatgaagctagtatcaaacttaaccaaagagtcaaaccccagacatgctagtagtcagttagttaaccaaccttctccctcctctcttccacttcgtgcaagcatgaagcttagcaagctcaagctggatcggatcatctgatgtgaattctctctcacaccaattcaccatggatggatgcccatgaccatccttagctccaggaagaagaagaagaagtgaacagtagctatagccatgggaagcagaggaggagctttacctgttgctgtactggtgctgttgctactgctggtgctcaagaacggcgccgcccagtcgcggtgcagctccggcgacctcgccgcgctgcgtggcttctcggccggtctcgacggcggcgtcgacgggtggccggcgggggtcggcaacgcgtcgtcgtcgtcgacatcggacggtggcgactgctgcgcgtggcgcggcgtggcgtgcgacgaggcgggggaggtcgtcggcgtggtcctgcccaacgcgacgctccggggagtggtggccgagtcgctcgccggcctcgccgcgctccgggtgttgaacctgtcgagtaacgcgctccgtggcgcgctcccggcggggctcctccggctgcgggcgctccaggtgctcgacgtcagcgtcaacgcgctggagggggcggtggcggcggcggccgtcgtcgacctcccggcgatgcgcgagttcaatgtctcgtacaacgcgttcaacggcagccaccccgtgctcgccggcgccggcaggctcacgtcgtacgacgtctccgggaacagcttcgccggccacgtcgacgccgccgccctgtgcggcgcgtcgccggggttgcggacactacggctctcgatgaacggcttctccggcgatttccccgtggggttcgggcaatgccggtcgctcgtggagctctcgctcgacggcaacgccatcgccggggctctccccgacgacgtgttcggcctgacgtcgctgcaggtcctcagcctccacaccaactcgctctccggccacctgccgcccagcctgcgcaacctcagcagcctcgtccgcctcgacgtctccttcaacaacttcaccggcgacctccccgatgtgttcgacgcggtccccggtctccaggagctctcggcgccgtccaacctgctcaccggcgtactccccgccacgctgtcgcgatgctcccgcctccgcatcctcaacctgcggaacaactcgctcgccggagacatcggcctcgacttccgcgccctccagagcctcgtgtacctcgacctcggcgtcaaccgcttcacggggccaatcccggcgagcctcccggagtgcagggccatgacggcgctaaacctcggccggaacaacctcaccggcgagataccggcgacgttcgccgcgttcacgtcgctgtccttcctctccctcaccgggaacagcttctccaacgtctcgtcggcgctgcggactctgcagggtttacccaacctgacgagcctggtgctcactaagaacttccacggcggcgaggcgatgccgaccgacatcgccgggttcgccggcatcgaggtgctcgtcatcgccaacggcgagctgcatggcgccataccggcgtggctcgcaggcctcagcaagctcaaggtgctcgacctgtcgtggaaccacctcgccggcccgatcccgccatggctcggcgagctcgaccgcctcttctacctcgacgtatcgaacaactccctccacggcgagatacctctcaagctggcgtggatgccggcgctcatggccggcggcgatggcagcgacgaggcgcacgtgcagaacttccccttcttcatacgccccaactcgtcggcgagggggaggcagtacaaccaggtgagccggttcccgccgtcgctggtgctggcgcggaacaacctcaccggcggcgtcccggcggcgctcggggcgttgaccagggtgcacgtcgttgacctgagctggaacgcgctgtcggggccgatcccgccggagctgtcgggcatgtcgagcgtcgagtcgctcgacgtgtcgcacaacgcgctctccggcgccatcccgccgtcgctggcgcggctcagcttcctctcccacttcgacgtcgcgtacaacaacctctccggcgaggtccccgtcggcgggcagttctccacgttctcccgcgccgacttcgacggcaaccccttgctctgcggcatccacgcggcgcggtgcgcgccgcaggccgtggacggcggcggcggcggcgggcgcaaggaccggagcgccaatgccggcgtcgtggcggcgataatcgtcggcacggtgctgctgctcgcggtggccgcggtcgcgacgtggcgggcgtggtcgaggtggcaggaggacaacgccagggtggcggccgacgacgagagcggcagcctcgagtcggcggcgaggtcaacgctggtgctcctcttcgccaacgacgacgacaatggcaatggcgacgacggcgagaggacgatgacgctggacgacgtgctgaaggcgacgggcaacttcgacgagacccgcatcgtggggtgcggcgggttcgggatggtgtaccgcgcgactctcgccgacgggcgggaggtggcggtgaagcggctctccggcgacttctggcagatggagcgcgagttccgcgccgaggtggagaccctctcccgcgtccgccaccgcaacctcgtcacgctgcagggctactgccgcgtcggcaaggaccgcctcctcatctacccctacatggagaacggcagcctcgaccactggctgcacgagcgcgccgatgtcgagggcggcggcgcgctgccatggccggcgcggctgagcatcgcgcgcggcgcggcgcgcgggctggcgcacctgcacgcgacgtcggagccgcgcgtcctccaccgcgacatcaagtcgagcaacatcctcctcgacgcccgcctggagccgcgcctcgccgacttcggcctcgcgcggctggtgcgcgcgcacgacgacacgcacgtcaccaccgacctcgtcggcacgctgggctacatcccgccggagtacggccactcgtcggtggccacctaccgcggcgacgtctacagcctcggcgtcgtgctgctcgagctggtgaccgggcggcggcccgtcgacatggcgaggcccgccggcggcggccgcgacgtgacgtcgtgggcgctccgcatgcggcgggaggcgcggggcgacgaggtggtcgacgccagcgtcggcgagaggcggcaccgcgacgaggcctgcagggtgctcgacgtcgcgtgcgcctgcgtcagcgacaaccccaagtcacggccgacggcgcagcagctggtggagtggctggacgccatcgccgccgccgccgccgactgacacgaagcagcacggcgttagtatatgaacaaaaaaaaaagaaaaaaaaaagacgagctgatgattccagtgttctgcattgctgaaagttttgcagtaaacagagtagattattgtgcagtcgcaaaggcacggtacagtaaacacatggtaattactactagtaattgacagtgtaacagtatacatgtatagtgagtggtgtgttgttagtttacacttgtgacttgtgtgtgtgtgtgaataatagcatctgcagttctgcactgcaagctcaaagttgggctgtgcagcgttcgagtgaatcagaactgctaatttttaaccatgtacttcttcttcatttcgaggatctgatctgggattactgctgatttggcagtaacaacatgaaacaagaatgcacgtatcatgtcaccatctgttgctgactaggagtaattttctctgttttgtttcgggttggtgatatggtcagttagctaccttgtctgtactgaatttgcaagtagatataccgtgctgatgttctatctagagcactattggttggcccaataagccaaagtaaaaaaaaatcaatatttgaattttggagttgatcttaatatattttcaatgtaattctttttagcattagtttttaagttgatatgaacaaatatataaaagttttacgtataaaatattttttattctccaataaactgttttgacttattagaaaatatggacatgacgaatgagattctcagtttttagtgaactttgactggcttgtttgggaaagagggacttattccaaatccctgtcacatcgaatgtttggacactaatttagagtattaaacatacacaaattacaaaatccatttcataaccttagactaattcgcaagacaaaacttttgagtctaattacgccatgatttgacaatgtgatgctacaataaacttttcataattataaattaattaggcttaaaaaattcgtctagcagattagctctcatttataaaattagtttttttattagtctatatttaatactttaaattagcttacatccattggatgtgtactaaaaagattctcgacggcacattggcatggcgctgaatcttcatggcagtggatgccatgcagctgaatccatgttattactgcggttaagtttctgtcctggatggctgcattgcagatatggattaacacgtgcgagattagcagtaaactaacatcggaatcgacaggagtattcctattcctatcttgttaatctgctagattttagtactatactctgatgctttaatttcactacgtagtatagtactcccttcatccttgaatgtttgacaccattaacttttttaaatatatttaattattcgtcttgttaaaaaaatataagtaattattaattcttttcctatcatttgattcattgttaaatatacttttatgtatatatatatagttttagggcctgttcactatgatgccaaaaaaaaccttagcaaattttgacattgttaaaattttggcaacttgccaaaactttggaaggatttcttatatagttatcaaaatttggcatcaaactaaacgtggctacttttttagcaactttaccaaaatttggtaaggttgaaaatgacatcaaagtgaacaggcccttacatatttcataaaatttttagaataagtcaaacggccaaacatgtttagaaaagtcagggtgtgaaacatttagagaactagggagtagtgcactagtactccactatcaggttttgtctgaacatcatcaattcctcatccattgccatggcggcatggcgccgctgccgctgcccccaggctttgatgatccatggtccacatgagcaagaacaaaacaacactcattctgctcttaattaatgtgcaaacagtttgctctgctctaattaatcacagaatcccgagccgacgtgcactccccaacagtaattaccatttacccatgctcatgccggacccgagcaccgggcccacctgtcatcgacgccatgccctttctgagcccaccccactcacatgctggggggctcgggagtcgggaggaggaggaagaaggacacggcatgattgggacgtgggccccacctgcagcgactgttagtccaacgtggcactattcatacgcacccctcggatcgcggcaggggaggtgggacccaccggtacaacctggcatggaggtctacccacaccccaccgacatgtgggccctgagtgaggggggccggggtgtacagtggcgtggggtagaactgagatgggtgagaatgtgatttttaacatacgtgactcggcgcaaggaccaatggggtactcgagggtgagaaaaaaaagagagagagaaagtgccgttgccggtgaggtaatcccacatcatcctcccgcggatttaccattttgtccagttttccgatgggtggacctacatgtcggtgacacagatatcagtggcatagaacgtaattgtttgtaaatggagggggtaaaggggtaatttggtgtccgtcaaagtgcagtcaaagcgcacacactcccgagcttagcttagcttttaactgctcgtctcatcactctccacctctctccctctctctctcttcctcgcgctcccacgccacgcagcagccgcagatctccacccgcctccggcgagcccgccgccgccgccgccgccatggagtacgagcgcatcgagaagccgttccccacccaggtacgtgagtggccaccctccgccggcgccgccgctgcccccatttttgcctctccgggcggggcgtgttgccactgctcggtacctgtttggagtaatgcgtggtcggctgctgtgctgttcttttggatttagggcggtgggttctcgccgaagcggctgcgcgcgatgttgctgggggtggagaagcggcggaaggggcaggaggaggaggaggagggggacgccggggaggtggacgacgagtacggcgcggtgcccaagtcctctgtcagatccgacgccgactccgatgcgcgcagtgagtactcttgcccccccgctgcccaaccattctgacttttgcattttggggttctggtggcttcgttggtaatgcttcaatcttgggagggtttggtcgcctgcattgcacgatttggaccagctgctctaatatggagatgaccaatcctcttctgttcaagtgggttaatgacatgagaaaaagggagatatatctgtatttggcttgctggcaatggttggtgaattgtggttctatagacattgaaatgttttcctttttgtcttttgtcatcatgggggaatttgaagggcaccgaagtccaacctccttctaagtcttgtaccttcgcattgaataatttcaggtagaaagtgcgatggtattgtttttagtgggcagctgaactgaaagtgacagaccatgattgctttgaatcttcagatgatttcagtgtcctcaaactgtgactgatttattttctttgatgtaggaggaggtagcatgtgcgaagaatacaaggatgtagatgtggtgagcaccatctcagaatcttcatcctcgttggagacagggagtgggcaccgatcgcgtgacacccactccatgggttcacgagtaagggtgcctgaggaggactcctgtgactctgagagtgtggcttcaaactttgagttccataaggagcgaggggcctctgctcggtctgtgacggcggcaatcgttcctccattctcaaagcctgcaccatcaaagtgggacgatgcccagaaatggatcgccagcccgacaacaaaccgtcctggtagggctggtggagtgccacagaggaagatggaaaaaactagctttggtggcgggaggctgccggctacgaaggttgtgttggaggccacagaggagatagatactaagagggttgatccaagccaagagaaaagggaaattgggtggcaaaaagcggtgaattgggccccacctgatccatatccagaagttgagacttgtgcaaagtctgcacttgctgaagaaattacagtagctgattcagctggtaaggagtgctgcagtctttatgtcatcatgcctcaggttcttcggtttttctactttccataaagtagtttgtggtacaatatatagtgttattaatccttccactaagagtctgattgatcttctgttgccattagttgagtggagcattatgccatggagggctccgcacattatgaatcactaactcaccatcaccgctgtctcattcacaatggcaatactctgcatttgacaatgtgcagagctttatttccctttcaacagtttagttacaacagttgcatagatgaatttatacagtttgcatgtttgttcctttagatagctgatagtcaacaggagaaccactaatgcaggcaagatttccttttccaaaactttatgtaacacggtttcatcagttttccatgatccactctgttaatacgtcctgcgtgtaaagtatttatccttatttttaaaagtgaacagtaatatttgcatcattttctaatgttccttcaaagaaatggcacaaattttgccttttctaattagaaaatgaacaaaatcatatatggctaaaattttgaatttgtggctttgggcagttacttttagtcgccatgattcatctgccacgcttcagagcgcgacaacatgcatacctcccccaccaacagtccgatcagtgtcaatgagagacatgggtacagaaatgacccctattgcgagccaggagccatcccgaacaggaacaccggtgagagcaacgagtccagattgttctcgcccaactactccacgaaaaacaataggccccaatgcaatcggtgctgttattggccatggtgaatgtagcaacgtggaattaagtgaacaagaattgcaaatgaagactaggagggagataatgctcctcggcactcagcttggtaaaaccaacattgctgcatgggcaagcaacaaggaagaggaaaaagatgcatcactttcgcttaaaggagtgcccatggaccaatctacacagaaggtaacagaaattcgtgcagcagcgtgggaggaggcagagaaggctaaatatttagcaaggttcttcactaaactctatttctcttgttgcaaaaaaaaaggattgtctttgtatgtttttgctaaattgtcccattgatcggtgagtcactctattgcattccagatttaaacgagaagagattaagatccaagcatgggaagatcatcagagagcaaaaatcgaagctgaaatgagaaaaattgaggtaagctttctgtcatccaatagaagcattgtaataatgcattgtagtatcatcttaactgagatgtttttgattctattttgactttatttccatgtttacatgcacattaaataatatgggatttgttcttctgattatgggcttatggctgttggctgatgatcttgtggacttttggtactgttaagaatgcacatcatgccattgacataggaagctaaatatattactgctgttgggagtttagtagctgatcaccttttacagtgttatctgaattcactgtccttccctcttacaattatgtttcaatctgcttatcacagatttgttccacacacagccaataagtatcatatggttacggttgtgaggctgtactgtttattaagatattatattgccttaagagaagagtagtagaacaatgccttcgtctcagactaaaacatagcttgggattatacctagcatcacttgatcaatttttcctgtcacatcggcatgatgcttggtgttttaccataaacttccatcaatttggatattgcatagcaatttaagtatcaattcttctttttttttttgaaacaacctgcaccagtgggacgtttcaagtatcaattcttccattcagatgcatcatactttgttaagagtgaacaatccgatttgctttacttgtccatctctgtacaagtacaattgttcttgtacgatcaatttgggaaactacactgcccgtggctaatggatgtttccatggcttctgtttctccaggtcgacgtggaaaggatgcgagcccgtgcgcaggacaagctgatgagccagctcgcatcggcgagacacactgccgacgagaagcgggccgcggcggagctgaaacggagccgtgcggctgcaaagacggcggagcaggcagaccacatcaggagaaccggcaggatgccgtcctccattggctgctggaactggtgctcgtagtagcgtagctaagctcaagcaactgaagcaagcaaaaagctctcctcactatgtctcgcaagacttgaagcgccatcatctgtttttaccgtgatcttgtagaatattgtcttttgattggtttcagtagatataagtcagaagaagacgagtcacttgtaagtaactatggagcagtatataagatgcaagcttcttgcctttttctgtgctgtgtgcttgttatcttgtacttggatgtcaatctgtcacagtgagctacaagcagctccaccatgctgaggaggtgttgaggctcaattcggattcccggatcaccagtgcagtacagagtatatgtgtgccgatgttcatcactgatgtgagatagaagaacaaagtttttacggaaattcttacccctttagtcctttttactcgtagcgattacagtggaatcatgtttggtcttcacatgtcaataaaactacacaaaaattagtacaccattcaattgttgcaaatacgtggtaaggtaacctctttttaaaccaaacagaacaaagaaaatctggctgggttgtttcctggacaattttttcttcatcctgtgcaacggtttcaatcaataacatactggtaaaatcctttttttaaaatcacacatgaataactgatagtaaaatggaaacatcactcccagagatcatacataacagaaagacaaacataagataaaaggagtgattatatgaatcagtactccaattcacctcctttttcttttcaaaagtcactagatagatattgacttaatctcggttttcatgatctcactacattcctcctgaaggtgatacactgatacacagcagaactttggatcgatttgatatcgaacaaacctcaacgagcattcaaatcaaatgagccctaattatgattcaccttctctcaagaagataacacagatattaattagacagttcaccagcaaatctgataagctacagtcctactactcgaacttcttgataagggagaggtcgttgagcatcttgtcgatcttctcgctgccggggtcgccgacgaacctgccgccggagcggagggaggggacgagggcggaggcctcgtcgctggtgtcggggcagaggttgccgagggtgcagagctcgaactcggcgaggccgtagcggctcagcgtctccctcacctgcctcaccgcgtccgggttcttgtaccggctgaaccgcttcacgtactgcagcgatttctcgaacacctgcgacacctgcgacgacgggtccccgtccgacatgtgctggatctgctcgtacttgtgctccaggattatcgccacctcgcagttcatcaggcacttggccttcaagaactctgcaacccatcaaaccctaggtatcaaatcaaatcaaaccgatacctctactcgattccgattcggacggactcaccttccccgatcttgagctccgccgcgttctcctcctcctcgccggacatctcggcgcgctctctctcccctctcggtggctcacctcaacctcggcggctatggcgttggcgatgcggctgcgggcggagtctggactcgggaggggaaaagaaaccaaggcggcgagaggcgcctcttaacgggctggactcacgatccgattcgctaacaggctaggcccattaacgcattgggccggctcgatctgcacgagcgtgttcctttcggggtgatctggaccgtccatccgtttactactcgacggcggcggcgagtggtcggcgacaaggacggcgggcgtgtcgtcttccccggcgacggcggggatatgaaggggctcgattcccgaggagatcagcatcgggggtgtagctcatatggtagagcgctcgcttcgcatgcgagaggcacggggttcgattccccgcacctccacctcacttctctcttttttttaatttatttttggtggatttatccggtgcggtggtgcgggctccacgtggcagtgaggcaggtggtggcctcgaggcgcccgcgtggattgcagtggcgctgctcgtcacttcgtctcctcctctccaccactcgtcgtcgtcggcggcgtggccatggcgacacccgcgccgctctccggcctccgcccgcgcgctcccgctcccgctcccgcggcgcgcagtcgcctgtgcggccagtcgccgccggtcgtggccccgcggctcggggcgttcccgcggcggcgtggtggggcggcacggtgctcgccgcgcgccgaggccggggacgtggaggcgcttagggcgggggtgtcggtgtacaagccgcggtcctacgacgtgctcgtctccgacgccgcccgctccctcgcctgcgccatggacgagggcaagacccgcctcgagatcgagttcccgtacgcccgcgacctattcattccctttcctccatagattcgcgccaccatctcgcctaatcttttacttagttggttattaataatgcttgcattatctcatcctccttgtctcatttttttttttggtggtggtgcttgtgaaaaggcctctgccgagcaacatctcttcttacaaggtatactttgcatttctatctcaagctcgtctcataactcacactcattgttctagtttcttgctttgttatgagtgaattctgtaacaatgcaaagactaatcttgatgtatattatatagactgctctagtttcagtttgaatgctgctgctacctctgtataatgttgtttcaaagcagaatctctctttttccttggcttcaagttaaaaagggtttagcttttgttgccacatacgtgtgatgaacgcttgtttctaaccatcctaccctgctttgcttcgttttcaagggttcctcggacgagttcatcgacgccaacatccagcttgctcttgctgttgccagaaaacttaaggaactcaaggggactagatcttgtattgtaagttcaagtttcatgccttgtcctgctccagaatcattctggcatttgtgggcatatgcaaatcttttctcataaattatcttctagttgattccaggtgtttcctgacctaccagaaaagcgcagggcatcccagttgttcgggactgctctagactcggtaaataatgcctcatgaaacaaaatatcttaagaggatgcaaaaaattgttttttcccctcatgacggtaggagcttatttggttacatttctctgttttctttttccacctcttgtagattgagactgcaactatcagttccctggatgaggtatctaccggacctgttaataccttcttcagatcaatgagagataccctggattttgactttgctgacgatgttgaaggtgaattgaccaatagctttgtctagtatggtaggagtactacattaaactattaagaaaacagaatttatatttatatgactccaagaggctgtcacgtccaagctagatgaatcctttatcgctagcattttatcagaattttcttatgtctgacctcacttcaatgttcaagccttctctatagaggagataccttggagaaccattagcctgtgatacatgataaataaaattgatttggtaaaaacatctttgtaaatttcctaaaaatgtacaagtatctcttttcgtacaaatggcaaagtctttaagttgctacttggcacagttcaaaattttaaaatagagtggaaggacatggttgatcagtgggtaattattcatatataagcattatggataattattcggtggtatattattgtgtcagattttcagcagatatttcaagtaacaaccatcagtaaaagttgaacattatcaatatgagacagatttcttataagcatccttggaaaagaaaatcataactacctggctactgtgggtacagatcgatggaaatctgatgaaccaccatcgctatatatcttcatcaattgcagcacacgtgacctttcaactatagagaagtatgtggtatgtctaaaatgatgctttgtttcttgccaacatgtatgcaaatgtactttttggaatgcttggtttgcattgttgtgttttggccatcatttggccagttaggtatttattattctactgttaataaacgatcatgttctgagcttgatggatatcactatgaatagaaactgaagaaagaaagttgaggaaggcatgcacagctgcaaataagccttatatgattgccacacgatttactattctactatctctatcccataatataaggcgtgcacacattccaagattcaactttaaaaacatttgaccaacaattattataatataaattaaattttatttgttaaaattaatatcattggattgacatttaaatttactttaagatgattataattttgttgcaataaaccttataatatatgagaaattttaagtcaaagattacttttgaagactgcaccaagtttgaccatgccttatattatgggatggagggagtatatcaagtgcctgatatctaagaaaatgcaaggaattttgaatcaacaccacaacctacagagtttctctttcattttccattcacttgtatattgtagttctttttccctggaacaagaatgaaaattttcaaccttcgatggtggaaaatgtagaatattctttgtagtttgtcacacgtaacgtaaggaaatagcatgcaacacaaggttttgaggaataatgcattaattgtttgtttagcagttgtgttagtttgtgcatttgtttgattcattacccatcactttgctattgttcaggaacaatttgcctcatctgtcccagcccttctctttaatcttgaactagataccttgcggtatgtgtcttatatcccacctgatggcttgttccttctaaactctattgatcgccttaggataacttatgatctttatcctccagctctgacttggggcttctgggattcccaccaaaagatttgcattacagatttctttctcagtttaccccagtattttatatcaggcagcgtgactactctaaggtatccatttgttttacttttacaaacttaaccattccttttgtgtatctgaaccatctatgattagtatttctccctatactttgtag

SEQ ID NO: 3871 - DNA, 643 bp, Oryza sativa
caatttgtcatgtacgacttcagaaaatgtgactcttcgttagaccatccaacaagatattacttccaaacaaaaacatgctcatgacaaatacagttatttttgcacaagtcggaacaattgcttcaggtacaacctttcaagaagaaccaacacttgtaatcacatcattttttgcattcaacaagtcaaataattttgaggttccaagaacaggggtcaaaacagtaaagaatcaaattacttacaactcacaactcagactgagccattatgctacaaatatatactactagggggcttcctctaaaactgctgcactttctaaattcagaccaactgcttacaacagaaacgaccacggccatctaactaccaacgtgagtgggctagaacacccctttacgacaaagcattgagccattgacaccatgaccatcacaatcagatgcaaagatgatacggctaatgagtttggctcgaatcatcatccccaccagaaagcaaccagcgcaggtactcagatacattgtccaacgacgaagcgtcgccgtgcatggtcaccctcttgcgcgtaagagtttcgacagtcacagctttcctcttccgtccacctatcggacacgagagtaactgctcgtcc

SEQ ID NO: 3872 - DNA, 2008 bp, Oryza sativa
tttctttctgcattcaggtatgcttttgtgttattgtgagatataaggttaatatgcattattgaaataactatggttcaagagcttcacaaatatgttctgttttcctcccaaactttacttggagagaaacctacttgattctctttatcttacagggaattgagatgctatcacttggatcattcaaaactggtgctattctcttggtatgggctgtttgtactgaactgaaacttatattttctggcagaaatcttattactttttttcaccattcttccattaaagccattacttagtagagcatgtcaatacaatttgaattatctgacactgtagaatttatgtttgtctttcatttgcctatgaaattaaaatcctgttatatttgtagaaactattgcactgcttgctgtactttgtaaatcactattaagttgtaacgcttatgtatcacgggatttcctttttgattcaggctggcctctttttctatgatattttctgggttttcttcactcctgttatggtcagtgttgcaaaatcatttgatgcaccgataaaggttagtgttctttataagtgattttgactcttgttttgatacaaaatgtctttttctttttacaaaaaaaggctaatctggttatccccttttttctgcatagcttctatttccaacaggagatgctgcacgcccattctctatgcttgggcttggtgacattgtgatacctggttagtaatgaaatctttagaatgtttagtgctattttttttctggtctatgatttctgattggataccgatgactgatgaatgccatatgagagtgacaacttgtttgaagtcatgatccatagcaagttgttagaactggattatttgataaaaaaatatccaatttaaaaattgtatatgtttaccatatcatttgagtacctttttctgtggttctaaatgtagatatagttagggttctttttgctgatacaaggagtgtaggttcaagtcttgcagaaaataattttaacttaaactactttgttatccagatgagtgcaacaagattagcttcaaagttcgaactacttggttgttgtataatgagggtatatgttgatattacttggttatagttgactttgaagccctggcaatgattcgtcatttttattccagtgataatttatgttagttgggaggtgtgtgtgcatgccttttttgaatgatgcgttgaactcattgttatctttagtagcactgaagtgggagtaacatttgatgctagtcgccacagataattcatcttctcttagcattctctgcaattcttcatccttcatgattgaagatcatgaaattctcacatatttctgcaagcagcaactcttctattaacaaataatactcacttctacttttgtttccaggtatatttgttgcgctagcactgcggtttgatgtctcaagaggaattaagaaccgctacttcaatagtgcatttttgggttatacggtgggtttgaccgtgacgataattgtgatgaactggtttcaagccgcacaggtgagtcatgttacttgggattcttgccatcatgtttcctccactcattttcaaggcacatcataagagtgagtttagttcgtagattatttaaacaaaatgaattgttatacatacattaattaaacaaaggtaattgtggtggtgaatttgcaaccatgtaacctccacacattttttacgaatcatccccaatatttcatcaggaacatgcttgaggaccttttttttttcatttttgtctgtagcaaattcatgcattttgtgagtagcacaaagaaaactataaacctataaaccttatgaagggaaaaataaaaaaaaaagaaaacaagaaaattacatcaggatccaactgttactcttgttactccaattataaaaaggagaaagttgcatctgatttgtgtcatctctgaaatattaacgcactct

SEQ ID NO: 3873 - DNA, 690 bp, Oryza sativa
caatgagcaggactgtaactactgatttcacccagcccttcattgaatctggcttggttatcttggctccagttaaaaaacatattgttaattcctgggcattcttgcagccattcactcttcagatgtggtgtgttactggattattctttcttgttgtgggtgcagttgtttgggttcttgaacatcgaataaatgacgaattccgtggctcaccgcgagaacaaataattactattttctggtatggagctgatttgaacattttgtatcatctgcccacttgtcaatcaatctacagatattaagatacaaaaaaaccttttttgcaatacattgcacatagctagcaccttaaaaatcctgtttctatatttctacacagccaagtcctccaatttgcatgtgtaaatgaggtattgatgagcaatgcacctaaaccttgttttacgtattctctgcatatgcagaatctattgcatatgatagtatgatgcattacttgcacattgcttgcttgatggtgtgcatctttgctaccaaatttgtgaccttaatctcaatttttatattctacaggttcagcttttcaaccttgttttttgcacacagtgagtaaaccaaccttctattatatgttttttggggcaaaagtaatatttcagtctgacacattgctttcatctctat

SEQ ID NO: 3874 - DNA, 4274 bp, Oryza sativa
  unsure (1)..(4274): unsure at all n locations
atcggctatatttgagaatactttgcattgactagatttagattgaatataataaaaaagaaattctttaatagaatcaatcctgatagatcgaacctaatcgatacagtataagattattgacaatactaaagttaattatcatatgattataagatctaaataactagccggtgtacaaatatgtgagcagggcttaaaataactgtgatcggctcagaggtgatgcgacatgcaattaatgacctaatctttcgctttaatataagcaactataatacttcctccgtttcacaatatcaatatatgaatgtgagaaatactagaatgacttatattgtgatatctagattcattaacatcgatatgaatatgaaaaatgctagaatggcttacattatgaaacggaggaagtagatcagaacctaccgaggcattattaattgttggtaacaaagatcatatagattaataattatatgagttcagacaatagccgatgaggttacttaagctacatatggataatgtatcggctagaactctgatacaatcttatatgaaaatgtcatatttagttaaatatattaaacaagtcacgttcttagcagatcgaacctaacggtgaggtcaaagataacatgcaatcttaaacaaaagagttacatatcaggcaagcacactgaaaccctgataaaatcccaatcggcaattatagagcatgatatttcttatagctttaattacaacttagtagattcaaacctaaatgatgcaacaccaagttataattgaaattgatggatctaaacaagtccgcttacgcaagatacacagattaatctataacaacaaaacagtttacacgataacggcttaagcaagatgaatcagctgatagcagtaaacaataatattgtctaagattaaataatatatatgataaatgacgcttatatcgactggatcatagtgtcggttccaaccgatggaaaccctagccctgtcgatacatgcgtgttgacggaactcatcttgtcatcgaaaaccaaaaccgatgcagcccaactcaagaaaaaaaaagaactcgtcgaaaagaaaagctagggtggcgatgcaccgaaagttatattattgatgaattgtcctttacaatgatcccgggtgtacatatttatacacatgggttgatactacataattcttgttggatatggcacaaacttttctaaaaataaagtaaaaatatactacaagttctgatcgggctccaaacaatcttttctaaaaataaaatgaaaactaacttactttgtctaattaatagataaattatcatgccacttacttcttgaactcgatcggcctcttctagataaacttcctttaattgattaacttacttaaccaaatccactgatattaatccgactgctggcaactgataattcccatcaatcaattctaggactttgaaaccatactgactttaggccgatgaagattccaaatactttagaccgatgacgattccggagcttgtcaaattttaccgttacaagtaaatcagaggatactcttccgagcatcagcatagccacggcgttaaagcccggacctgttgtcgcgtacccacgacctgctgagtcccacagcgcccgcgccgccgatcgacgtgcgttcgctgcgctgaaccatatcgcgagcccaggggagaggagaactaacgctagctgcacacacacatggcacacggcagtacggcacaccgcacaagggcacctatagctagctgtgcttcttgggcacccgtccgaacattcagccaaccaaaacatactgcgccccggcggtatatttgtaaacaaaaaataatttatgaataaaaactgaaaaataaacttcgatagaaaaacttcaaaatcaactttaaatttaaggctaaaaatttaaattttagctgataaatataaacataagtaaaaaagatgaggctgctactccctccatttcatattaccggtctttctagaatttaaaattttgtatcaaaatatttgctctcacattccgaaacactttcttnnnctgtgtactcttctaatgcagtcatacattaaagtactgtgataacttctattatatatattatatacttagaaaaataattgagatattttcttttaagatagaatggatataaacccggctgaagctacagtgatttttacgaggaaagataaggttacatgtattaattacaatcttcttctacaagtagctccaaaaaatgtatcaccgcagcaaacggtggatgaaatctccttcaatgtgagagccaatatatcttgaccggttttcagtagtgaatacaaattgtgaatacaataccggttttcagtataattcacggctgaacaaattgtgaatacaatccgtttccaaaaatattgatgaagccaacaccggcatttttacccatattttctcgcgcgcaagtggagatgttggcctagtttagctttttatgagattggattagcgcgataggagatgggaggacgattgtgtctttaaaggactccctccatttcaaaatataaagaaaaacctaaaactagattcagatatataatattaggtgatgtcatatcttangttggtacactactacacaaagagttataggtgccggttcgtaaagggccatagatgcggattttcatccggcgccaattggtcggtaccaatacaaacaattgacacctatgaggaaaatagaactagcacctttagttttgctcgagccaaaaaaacagagagcccgctcgaatcgagccgaaatcaccaagcgtcgttacctcgccatgcgcccatgcgagttactccaaaatcaaattgaaatcccaaaatccccaaatcatccacaaatcatcaccaaaatcgattgacatcacataatgaacatactcaacaacaaaatcatccacaaattcacaaaaacatttacaaagaatccacaattgagactggggagaggaggagaggggatgacaaggggctggccaccgggcttcttcatgctccaccttctacttcgtcgccggtggggagaggagggcgttgccgtcgcctgccgcctgtcgtccgccacctcctctcttgcgccaccgcatgccgcctcccctcctgccagatccggcaaaggggaaggcgcagacgccgccgctgccgtcgccgaggtgcgccgcctcccctcctgctagatatggcagaggagagggtgctggcgccgccgcccccatcaccggaggccgctgcggcctcccatcccgccgcctcccctctcgctagatctggcggaggggaggtcgcagccgccgctgcgcgtgacaaagagaagtgagagaggcaagagagatagcgataatgccgatgctcactcattcgtatggataaggtcgacgacagatctgctcaacaaatctataattatttgtagatgtcgattttaattaactaacatttataatatattattataaagatgtcgggttttctaaaaaaaatcaatatctatagtataggtgacggtttttctttagaattaacccctaaagttaattaaaggtaccggttttatgtattttcaatccacggaagagagggaaaaatattataggtgatggttttagctgtttcgataactatagtcacaatcgctaacatgatgtcctcgtggttgtgccaagcatgtccttttcgtaccttgcgtggacgagttgaattcctctataaatgtgaccaaataaacctgaaccgagaccgttaatttgcttccttggtctttcgttgactctagtatagcttatcatcccagaagttttcctttgatcgaaagtggccgcccaggcatctggggagtcaaaataccacatgtgatcagtaaatgcacacgtacgtacgtggacaaatttctaatatggtaccgtaggctggtagcatcgtccatggtttaaacatgtactcccccgacctaaaatatacttcctcttttctaaaatgttgctagctaagttgttgtccagattcgttgtcataggataagtcaaatatcccattctagctagatagcaatattttagagcggagaaagtaagaaattaatttgtgtggatgtgacatatcctatgactatgaatctagatatgtcacgtccacctaaaatctcttatattttgagacggagagagtacaatattattgattactcc

SEQ ID NO: 3875 - DNA, 10504 bp, Oryza sativa
attctggagcccattggcctggttttgacacccatttcttcgtcgccattcctgccatccttcaaagaagttatcacgaccgtctgggactgacttgtgttgtcatggacattgtgggaaatgtgggtaggagtaatcgttcttgtatgttggtattttctgtaaagggcaaacacatttaatcttgttctctgttgactgttaagtagcgctccatccaactggagatgtgatggcgatctcatgtcatgatgatgtagtttagtagccatggaatgaaatgaaatgaagctgagccggttataatagttgtatatctccatctctttcttgacttgcatcatgctgtctgctatgttacagatggctctgtctgctacattacaaaacgagactacgtttgcttgcattgtgtgaccaaaattattattcttgtacttatcatctaataataacgagctggcccttaacggcagaggcatttgtatgcatacatatacatggactaatatagacatgctgcttccttcgtcttaccaaggaagtaggaaacataaaaggaagaaatgactcaggtggtatttggttggggggactaaagtggggctaaactttagtccctctcacaaaaacataagtccctaccatagggatttgtacttttgtgagaggcactaaatttagttcctagtttccaaacactcccttaggattgatatgtaaaaaccaaatccattacagaaagtagcaggtcttgaacataacatattagccattaggcaggtaaatcatccagcagaatatcactgataaaaaaaaattaagcggctcgtgaatcgcccaatctctgcagcttgtttcatctctttccccctggcagcctacgtgatttcttcttcttttttcttttcttattagactccatggcgccagttcttaccagagttcctgtctcacctacatcaaacacacaacagaaagggttacaccttttcttgctccctaataactagggcaacatagggggtgtttagatccataggtgtaaagttttagcgtgacatatcgaatatacggatacatatttaaagtattaaaagtagatgaatttattaagcctaatcaatctgccattagcaaatgtttactgtagcaccacattgttaaatcatgaagcaattaggtttaaaatattcgtctcacgatttacacacaatctgtgtaattagtaattttatgtgtctaaacattcgatatgacaaggtgaaaaattttacgaggggatctaaacaagcccatacagtaccggatcattaaacagaaactagtacattctgacagtaatagaattatctttttacctagaaaaaaaataccgttcgtatgcttttcaaatactgtttcacttcaggttacttttggtcagcatctactaattacataaagcctagaggaaactgttaatcctaggggtgctccctgaaaaacagtcatggatgaactctctcccctccccccacccccaaaaaaaaaaaaaacaagagtcatgaatcaaagtttgtaacatgtcaacttctaacagtagtcaaaatgaacccttctccaaatgaacaagtcatgaactattgaacttaactcgagtataataaatacagcaataccccatcaacacaggtcaactagaaattacctgtagcgttgatgagatatttggagatctcactggtaatgtagtagcgcatgaagctggaattcttcctgtgatcaagctcagtcacaccttgcagtgtcttatccctcagatcaacagaaataacccatctcttatcatcactgtagccgatcttggacaggaaagagatgacattgccatccatgcccaatgtggggtgacctgtgagcaacctcctcaatgtttcctctggatcattgcagatctttggcagcagctcactgtacctgacattgtcgacgacggcgatgtcggttacatccaccgtgcactccctgtgccaatccttccatgaaccagccggtatcggcctgctccatatgttggccttccagtagtaagcaacatcctcgtctgagccgtcagaagaatccgagtcatcagaattatgttcaatcaaccgtcgtcgccgccgaggtggtggatcaccggggcgtgtcaccatctcgacgtacttgatgcaggagggagcagagtcctgcacgacgacggtgatgtcacggtaaccatgtgggtagcctctgcagaaggatttccggttcctcctcgccggcttgggcagcggcaggtcgcggagcacggggtgttcgtcgagcacgtcgtcgcagagcaggattcccctccagagatccacccagccgacggccatggcgtggtcaccgccggcgagcgtgatgaccttggtggtgtagtggaagagcacctcggtggcagtgtccgggatggggagcaccctgtccctctcggccggctcgtcgacggacaccgccgtggaggtccagcggccgacgtcggagtcgaagcgctgaagcttgaactccatggggcacctgatggtgggcatgaggccggcgatgacgtagcgtgcgccgcccgagcagcggacgatggcgaccgcgtcgctgctgaagggggaggcgtgcgggttgggcagcagccggagcgacgggcgggggctggccgtgtagacgaagtagtcgtaggatctgatgccgcggtagagctcgtcgttggggtgcgggacgaggaggagggctacgtcggcgtgcgtgctgatgactcggggatcgacggtgaaccggtaggcctcgccgtggccggcgccggggcgggggcagtggacgcagaggtaggagaggcgcggcgggcgggcgaggcagaaggagacgtggatgcgtacgccggtggtggtggtggagacggcggtggtggcgttggagacggcgtcgggggagacgtaggcactcgcgtcgaggtacacccagcttggggttgggctcacgccgccgccatcatcgtcgtcggccgggagcggaggcgaaaacagcaatggcaggaggagatcgtcatccaaggggatgggctcatcatcatccatggcgaatcacggagacgatccgatcggagatcgacgaacgcctctttggattggattgcgcccaccccacacgcattccgagctcccgcctatctcgctcgctaattgcgatcagggtgaaatttcggaccgaatttcttacgatattacttcgaccgaattttttcatgaattttggtagtatttgttcaaattcaactaaattttgttcaaaatttcggaccgaaatttcggtgaggcccaatcaaatccaacgccggcacgcgggtgcctccctccctacagcagccggagctccgccgccgttcctcgccagccgacggatagtcctccagccagggttttcccttcgggaaacaagaaaatttcggtgggcaccgaaattccgaaatttcggacaaattctgatatttcgaacgaaattttttgaagaaaaaaaattctgatttcgaatgaaatcttgcttttgaagaaaacccaaaagcaagagagttcattacaaaacgaaaggtaaaacacgaactctaacgatggggtcgccagcttgacattttattacagtataataaccgaagaaaattcctgagcatccatttcaggccaatcatcaggggaagatagcagtttaacttgggataaacagacgaaaaccaaatccattacagaaagtagcatgtcttgcacagaacaactctgataatagctcattacagaaagtagctcatgaatcgcccagtctctgcagctcgtttcatttcttcaacccaggtagcctacgtgattcattaattaattcctacttcttcttttttgagactctactattaaccccagtttttacaagagttcctgcctcacctgcatcaaacacacaacatacacagagagggtttaagtggcacttcaaaaacaaatcctaggagtgcactctgaaaaacacactcatgaatcaagtttctaacctgacaacttgtaaacagtagtcaaaatgaagaaggttatgaactatccattagattatttgactattatggtgcaacagttataaaacaaacctgtagccttgataagatatttggagatctcactggtgttgtagtagcgcttgaagaggaaattcttcctctcatcaagctcagccacgccttgcagcgtcttactcctcagatcaacagagataacccatcccttatcatccaagcgattgatcttggacaggaaagaaatgacatccccatccatacccaatgtggggaaacctgtgaccagcctcctcaatgtctcctctggatcattgccaatctttggcagcagctcactgaacctgacattgtcgacggcgatgtcagtgacatccaccgtgcactccatctgccaatcctcccatgaaccaactggtatcggcatgctccatatgttagccttccagtagtaagcaacgtcctcttcctcatcagagtcagagtcatcagaatgttgcggcggctgtcgttgtcgaggaggtggccgatcaccggggcgggtcaccatctcaacgtacttgatgcaggtgggaacagagtcctgcacgacaacggtgatgtcccggtaatgatgcggcggccctctgcagaaggatttgcggttgcttctcgctggcttgggcagtggcacgtcgcggagcaccaggtgttggtcaagcacgtcgtcacacagcaggatccctctccagagatccacccagccgatggtgccgccgagcgtgatgaccttggtggtgcagtggaagaccatctggctggccgtgtcagggatggggagcaccctgtccctctcgaccggctcactgatggacacagctgtggatttccagcggccgacgtcggagtcgaagcgcataaccttgaactccatggggcgcctgatggttggcatgaggcaggcgatgacgtagcgggcgccgccggagcagcggacgatggcgacctcctcgttgcggaagggggagacccgcgggttcggcagcagccggagcaaggaggcgcccgggcctgggcgggccgtgtagacgaagtagtcgtaggatttgattccgcggtggagcccgtcgttggggtgcgggacgcggaggagggctacatcggtgtgcgtgccgaggactcggggatcgacagtgaaccggtaggcgccctcgccgtcgccggggcgggggcagtggacgcagaggtaggagaggcgcggcgggcgggcgaggcagaaggagacatggatgcttacgccggtggtggtggtggagaaggcggtggtggagttggagacggcatcgggggagacgtaagctctgtcttcgaggtacacccagcttgggctcacgccggcggtggcgtcgtcgtcggccggcagcggcggcggaaacagcaagggtagtagcacaccctcatccatgacgtaggggacgggctcatcaccatcatccatggcgaaggcggcgagggatccggtcgaatcgaatcctaatcagcgatgaggaggaggaggagctaaccctaaatcggagttgtgccccaagacgaggaagaatggggaatttgaggtttccttttttttttttttctctctttcccccctcacccgcctcgggaaagacgggagttggattttcacctaatctgaaccgttgtgtctttttctacgcataggattaagccacgtctctcttcttgttccttgatctgtctccagggagaaaatggatatttagccattctcaaaacactggaatgctattctgaaaccgcgattgttaaaatgccaatatggaccgcacaaccatagccacttttccattttctttattttcgatttcattttcgttggggcagagcttgatgagacgattttgcccctctccccactctcttctcctctgctcgaatcggagggaagagaagaggtcgccgcgcagcgatgccgttctgcagcttctacgcctccacctccctccagcttcgacgaggaggaagaaacggtagggccccacatgttcggctggtgcccggtgaggtcacgacctcgccaccgcctgcgcgaggcgctggaccttcgcggcgatccctggcggctgcggccgctcacggccaccgcatggttcccaacgatcctgccggcacttgtgctccgccgtggtggcaccgtcgtttcctcctcgcaaatcagtccccatctccctttgctcttccttatttttttttcaatatccacatcacctcgcatggttattgctctcttgtttgattggtgtttcttttgtctcattcaaagaagcattcatgttggggatcgatatgaacggttgtgcttgctttctctgtccctgagatggatacacgcttgtactagtttgcaaatcttgatggtgccggaggagtatgtcggtgtcttgcaggtgtttggggtgaatcctgtcaggatgcatgcggtagtgtgcagtaggtccttgtggaggagccggcgacccgacgaggcatgggacagcgaggcggtgggacgtggtcgtcggcgagcagaccagcgggtaggcgtcactgtaacgccctgaaaatcgccctaaatttaaatcgtgctttaatgcatttctagaaattttaaaagcctaaaagagcctccaacaattaaaattcaccaagatttatgtcaaattggcttgtgggtatttttaataaattccccatgcttaaaaatgtttaaccaatttttacttgaattttcagagcatcctaaataattttaaggcaacaaaaacaattaaagaattttacaaaaaggaaaagctaaaagaaatcatcttcctcctgttgggctgtttgcagcccatctctctccccctcctctcagcccagcccagccgccccctcaccctccctctctccccttccactgcctctccttgggctggctcaactgctccctatattcctggacaaaagtctgcttcacctcccctgcgcgcccagcctgacaggcgtgctcctactcgatgacaggtgggtcccactcgtcatccctaacctccagccatcctctctctctccggccgaattccaagcgacggcaacctccgattcgcctcctccactcgccgtttcatcaaattaattgaggggaattaattcccacctcatcctctccaattcccccataatttcccactcaatcccacattattcgtggtggattttgatgatgctcatcaatggtgagctccaccatgccccgcgtcgatctccctccccggcgcctctctccctcccctccggcctataaaagggacccccgactccctcctctctcccctcacaccgctgccctctccctcctctctccgcggccgccgcgccgctctcttcttgtgccgccgccgtcgcaactccggccgcccctcgccggtggtcgggacctcgtcggagcccggcgtcgccaccatccgcttcgtcgcttcctcctcttccccgtccacccctccgtcgagtacaaggaccgcgggaacgacgccgacgccgacgacccgaagcttctcgtcgtttcttcctcaccgccggcaacaccgtcgacctctcgccgccgtgtctgctcggtgagaaccgtcgtctcctcccctttccgtttttcccctttccgctctccgtcgcactgccgccgcgccgttggccgtcgccggcgagccgcctggccgggtgctgctcctgcccggccgtgtctgtgcctcggtgcaccgtgagccacctcggtgctctcggctcacagtggaccgagcggctgccaagtgggacccgcccgtggacccctctctctcttctctgtgcaataaatcaatttcctttagaaaaataattcacaaaattgcaaatttccatttaaacaacacctaaacttcaaatggccatatcttgaccgtttgaactcggaatcgacccgttcaaatctctaatttctcctaaaaatgagtagaatccatttatgtgctttattgcttctgttcatatggtttttattagtccttttgtatttcttcgcgttggtcgtgtagatcctgccgttccggaagatcagctcttcatcgccgttgacgccgaagactttgtgagcgatcaaggcaagtcatatctaccttgaacatgttgaatcccatattgtgaaaattatgttgttttacttatattgcattgctttataaattataccgttcattattaatattgttttattagttattcctatgctcttggttatggccatgatgttgatttgatatccatgatctttgtgaaccctagtaaaattataacttgactagtctagtaccctacatgatggactgactagttgctttaggtaaatgcttagtcatgcttagttccaacctagaacttttggttaaactagactttggtggttaacaactaaaattggattagttatggactattgactggtttgtcaatagatgggtgataaaatgatttgtgcaactaaaatatattttttttgggctgggcttggggtgcaagctagttactttggtagtcgcaccccggctaatataaggaccggtcttcgggcctctgttgcaaggcatcttcgtgcaaccacaagtctagtgggtaaggcctgactggaaatttagatcttctcaaaacagagaccattggttggaagggtgtggggccaggattaaggccgtttttcacccggcgcaagggggggcctgactcgtcccgggggatccgacaacctttaccttgtcggggaccggcgggcggcgaaacctcagcgggttctcctgttttgggtagacctagatggatagtcttgtcacgacctctatccgagtaccgtggtggtacccggcgcgtggcaacgcgtgttgaggttgtgtcttgtgggtaaagttgtacacctctgatcagagttaaaaactattcgaatagccgcgccctcggttatgggcaagctgagcaatgtacccaaagttagttttgttttataaaacattggagggtgaaatcatgatggtgtagtcatgtggagattagcctgggttaaggcaggttcgcaggctcatgcgaccttgatgatattaaaatattggcttagaacaggatcgtgttttaaaatgagctttaacttgattaaaatgtttaaattatggctttatgcaaaataaaccctattaggccatttccttgttttccctacgcattattgttgcatttccggtgtgacttgctgagtacggtggtggtactcactcttgctcacaaaaataatccagaggatggacctgaggaaggtgaaggcttggatctctagttcgctccgccgtcgagtgcctgtggctgctgctgttccgtagtcttccgctgttttatttgtttatctttgagtgtgagggcctaagtcgcccatgtaatcaagtactcctttacgtttccgcaagtgtggcatgtaataatcaacaatgtctatgtgtacctcgcctcctgggacgaggattaatgcactgagcgtttggaaatggtgtatatttccgggcgtgacagtcacgaaacatgcgtgccgctgctcaccggctcgctgcctccatcccgcgccccaagtgagtccgagcaggcgagcaccggtccgtttttaggaacagcgcacgtcggcgtcggctgggggtgcctcctcgccgtcgaacagtcgaggatggggtcctgaagacagagagcacggccgtcgtgaaagcctaggcggcagaggtagaggagcgccgagcggagctggtcgcggacgctgcaggcgagggtctgggggcatttgacgacgacgcggcgttaggtggtgtccgggacggcgaggtcgtcggtgaggaaggcgaagaccgggcggaggtcggcgcggacgctggcggtaaagaaccgccaggagctccgtcgggatgtctctgtcgctgtggtgacgaagcagcagcaactgggtgagcaggggtaatttggtctcatcaagccacattgcagcaaatatggaattgaaaatggcaaaatggctgtgatcacgcgcttcatattggcattttaacgaaacacgcttttgagatgtcattcctctcctcttgaagccaactcccacaagcacatgatctgagtgagtcttgtgcatacgaaaaaaaaaaaactttttccacctgcaccaagcaccatatcgattgaaccacgggtaaaaatgctccctgctcctatattccatatatttaaatcctaatttcagctatttttaaattgtatttatatatagactatgtatttttaaatctgaatttcagctacggggaagaagaaatgccttccacacgatgtggcgatgaacggactggc

SEQ ID NO: 3876 - DNA, 1346 bp, Oryza sativa
tcggctgtgtggtactggtaacatatagtacgtatataaactcttttttttctctaaataaatactagtaaatttacggtcctcgatcgaataggtatagaaggtaaaaatttcttattgccgattcaagtggtggcgttgtaactcaatctcactactattttttttttctcccaagcgtagagcctataccatagttacaactggagtcatatattggccggtatactggtatagtacaaggtgtgcaggtgttcaggccaaaaaaaattaggaccacaagtctatcattcgtagtaattatctatacttaattagcatcaaattacaaggcttagtaaacagaagaaaaaaacaaaccataaagattacaaggcccatttacccaatcccattgatgggttgtgcttgatgattcgtttctaattatgggaaagcatgctttggttaaattatactacctctatattttaatttatgacaccgttgatttttttctaacgtttgaccattcgtcttattaaaaaaaggttatgtaattgtcatttattttattgtgacttaattcatcatcaaatgttctttaagcatgacatgaatattttcatatttgcacaaaaattttaaataaaatgaatagtcaaacattggtcaaaaaagtcaacaccgtcatccattaaaatacggagtaatatttaattttagagtctcattatgtgtttcgcagttggaccttcaatccctaggtacgatattagttataacctcagtatattctaaagctgaacatgcacacaagttatatcattacccaacaattattactgattttaaagcacatacaaacatacaatattatttacaaattagtgtataatctagattttaacatgcaaacgtatcaaagtcatcatcaccacatcattttcacatatttcaacatatatcgatataccatttctataatatttaacatatatttatctatatattttcatctagttttttttaatgtcatggaaccataaacgagtggataaaaaaagactcgaatattaggaaaggacctaatatcaaataattagaaatggtgaggctttgaacccagatcatatagcccaccaccttatggagttagccaaaagacccctgggtatttctcgttagacgagtggatgtctacattttttttctcaacgtagaattttttctaatttcatagaacgccgaacaaacaattaaaggctatgtagactcttctatcaaaaccccaccatcgtgatgcagttatagaacgttcgtaaccatgcatgcaagtgtacgtagcatcaaattaagccgtgcta

SEQ ID NO: 3877 - DNA, 2252 bp, Oryza sativa
acacagttagtctttactcaaaagacaaggcgcataagacttccttttctcttttctatctcatgtagagagcaaaccttccagctgggggcagggcatcaatatgaatctttggggggtcatttgatatttctctccattgatcatcaagttcatattcggtgatgaatcttcctatagcacttcgcaagaagcccacgaccctgttcagaatgaacgcacagttacaacatttgcaaaagataaagatctgtctatacaacatacgccataaatttgaggtataaacttaactacacaatccaaaataatctgataaattccaaccacagtatttggcagaatacatgttactgagattagtaagaacattttgaccacaattggatttcctaagaagcataggaaattattcatacactttcagttgacattaaaagaaagttacactctctagtcattcatatattctcctgtcttcagtctgctctctattaactacttttgcttctgacttccacatgcatgctctctctatataattgtgtcaccataaattaacaaattcgaaaggtaatggcaggaatttgtaaagcgattcatcaatattttcagctgatataacatttggaaaaaggcaatgtaaataagtagcaagtcgcacctcgcatatgagttggatatttttgtacccaggtttgcatattgtccttggaagtgcccatagtagacacaaaaagttttgctgttctgatagaccatactctttagttccccagcatagaaaggcccttctctgtgctctactgtgaagctgcatgagactataatgtcaaaaaacaaatttatacatccttcaaaaaaattataatatgactagaaaaagtgcccgtgcagaccccacatgatcatgaaaaactatcacgaagatcatgaagttgaaaaatatcatcgtatatgtcattaacatgtgggtccagaccccacatgatcattctcgtatacgatagtatttcacaactcacttatatttatgatggcattttatgaattttctattgtatgaaatcattgggatttaatttagacatatttgcattattgcagggagcaatcctgacatgtactcataaacatgtccatatttgtatcagagagcttaattggatgtgcatgtgtaggatgctctcctacggtagtttccctaaaagaaatggatttacatgcatatgcatatggagccatggagacgagcagactacataaatagccaattagcagaagagcattgaggcgatgatacacccagcatacatcttcttttctcaatggaaggcccaaaaaatatctcaaaccagtctttaaaaaagagagcccgattcagttctctgctttaagcccatcccaaaactcctattatgattactggattttacgtaggatcttcacttatgtgcacacatgtgtcggaagaagaaacatagtaggacagctatgtcgttcgtaataagaacttgatctgatgaaacacatcttcaatttttataaatcacattgggctagtcttatgctctctaggatacatcaatccaagaaatagttgataccttcgaaggaactgaaggaagttgtagccaactgtttcatcttctcttttgttcaccactgcagctgcataacttcgagggcttggtgtctgttgggactgggaggcctgctgctgccgctggccgtgttgggctgcctcgacgacgtcagtgggcgaggccaacgttcccgagcgctgcggctcgaccgcggtccccacctccgcctccgcctccacctccgcctcctcctcgacgcggacggcgggcgagctgtcgcccgacccgacattggcctctccgcggtcgtcggtcttcttccgaggcttccccttcccacccttgttcttcttcttcctaccaccatgatgaggcatctttagtagcctagcggggatgcttcgctctgcgatccgcggtggggcaagccgaggcagcggcgggaggtgcgcccgcgacgtgctcgacggaatgcgcacaagagggtgggagggcaggagggggagcaggtgggagggcaatgggtaaagtaaaaaacccctcggcctcatccgcactgaggccggcgtgggttcttatatacttcggatagacgtgttgaaccacaagctactagtagtactaaagttgaaccacaagctaggagtaccgtgtatataggagtat

SEQ ID NO: 3878 - DNA, 2144 bp, Oryza sativa
tacgtggcgtcttgagatcacagttgcttatggctaccattgtacatgccctaaggccgtgtgtagttgcacagccaaaattcttttaagtatacgaacacacatttgaaatattaaatatagactaataataaaataaattacagattctgtttgtaaactgcttgacgaatttattaagcctaattaattcatcattaacaaatgtttacagtagcacacattgttaaattgtgcaattgattttttttatccacatttaatgctccatacatatgtctaaatatttaatatgataaaatttttagatgtttgaagggaactaaacacagtctaaacacagtctaagggggtgaaagagttgtatccatcacgatcgttccgacgccgcctgacgctgccacggtctggcccacctcgacgcagagcaccatcttgttggtcacctcggcaccactgcacgcaacacactgtagttgtggattgcctcagatcagtcgtgtgtgtcggggtacacaagcaggcggcgatggtctccatgcatctccgactcggaggaacggacaaaagagatagcagggagtccataacactcctcatccaaccagccggctgcagcatgatcagtcagtgaaagtggcaaatggttaagaaagaaatctctcctcaatagtaattttgtaggagcattggaaaaagtggtatttttgagagtgacgattccttagagcaggtataatagtagactataagttagctgtaaatatattttaaaaagataaatgagaagagcgaagagcagtgggatacagatttgtagccagctgtagcacggatttcaagacgcggtgtgtgtatgataggtgggaccagatattaatagtgtacagtatgtaactattatatgaatgaactattagatcgactatatatgaattggagttagtagttggctatactattaaacttgctcttagggtgtgtttgaataatgggaaacgggggtgggattgggattaggattggaaaattaatgaatggttaaaattaaatgaaagagagagaatgaatggttaagatttaaagatgtatttttgtaggtgagaaattatttccagtgtcaaatagttcaatttccccacgttggcggattaggatttttctgatgggtgtgcccaccaccttgactatattatcaaattgaaagactttggctatatataccaaatcaagactttgaccatatcaaattcaatgcacgtaggcacgccttgtactctacatagacaaatcaaacacttcaatttgatatggtcaaagtcttaattaaataatcagaaatgtatccagagatagaggtcaagaataacacatcaccaattgcaacttttttctacttaatttctcagttactctttgtctctattctgtagtttaccccatcaccatcatcaatgtgatgccttgctaagtgaagtagaatctgattctgatccgttatttggtgccttgctatagacagaaagtgtttctccttatatttgaatttgattcgatcgattcaatatttcttataagttcgaactctgattggtttcacctcttacatggatggctggatccgcacagctaacgcctgaagctggaccctgtatggctggcatgttgcctgctgatgcgatcgatcagtgcatccttgctgttggccggcctgttgctgttgtcgccggctcgccacaatgccgccgaacccggccagtccccacggcgctagtggctgtcgcctgttgggctgccggcgcatcatcggattgcgaacctctgatttacttgggcccccttgaaagataggattgtcaaaacatagaaatagaaaaaatgtagaaatagaatatcatatttattgaaattcctacgggatataaaaacacaataaagtttcaaaactaccgttcgatagtcacacagaaaagacataggaattcaagacacgggaaaaaaacataaggtaagacatcatgctaatttttctccaaaattccactacaatagtctattccataggaattttaaaggaatggtaggaatcaatcctttatttcaagagtaattttatggtctttgaggaggtatcatgaggtacc

SEQ ID NO: 3879 - DNA, 10817 bp, Oryza sativa
caccgccggcgtcaccacctctgcgccgcttgaccgctcgcgccatccgcctcatctccttgaccgccccaaggtcagttctcccaaaccgacatcgccacctataaaacccacaccccccctcccatacctctcacttcctctcctccatcacaccactgccgcctcgccgttcgtcgtcgttctcgccctcctctgccgttgtgcgtgtcggggagctagcgagcacgaggagtcgacgaggagctccgcgccgcccccatcctcgcgcctctccatctcttcttccccggccgcgccgccccgccgtcgcgtccgcctcgccacgactccatccgcgccgccgacaccgtttctctcgtcggtgagctccccactgaaccccttttcccctgtcgcacgctgcgccgcgcccgccgccattcgtcacatctcgccgcgcgcccttgctctgtcccgggcgtcgctcgccgtcgccggcctctctcggcgtcgcccgtgccctctcgaccgatggaatgagctcgcgacctcgcgtagatgctccagctccaacgaatcgaacccccgttgccctggtgaagttttccccctttgctcgccgccgacgatcgccgtcaaaatccgccgccgtcggctcccctcttgtcaatccctctcgccaccacgctcccggggatccccttgatctcccccttgttgccccatggccgccggcctcccctctcgctctcgcgccgtgccgccccttccgccaccgcttagcgccgccgcctgtgcgtcgccggtgaccttcgggtcccgcgtcaccgtgtgcgcgtcgcaaccccctttccgcgacagctgagcccgagaccgcgcgcccttcgctctttccacgcgcggccacatcagcgtgtcggcgagattggccaccgccgtcggccgccgtcgttcttcccccggctaatccgctccgttgaatcgattccccttggcctcctctctcttccggtgctaaccccccaatccacctcgccgccgttcgccggtttgcgtcgctcgtcgccggccatcggatcagcctgcccggcctcctctacctccccatccgacgtggcttccacgtggacgccacctcagccctgggcccgcttgaccgagtcaagccggcgcccagtcagcccccctcctccctctccccgctcgtgggcttggcccatcaaccatccccccttctcggcctaggggaaaatgaaaagtctacttttactccctctgtccaagcccagtgcccacacacatgaacaaaagtccacttaatcccccccatgtacagtacacccttggccccgcacgtcagtgactgtcaataatattcttgagaatattatttctataaattccataaaccatttctcgtcttccagaaattctaattgaacttccaaaattcatatcttcccaaccgctcttctgattgactccgttcaacttccagtaattccgtaaaattgagatctatttaatggcactattatttagtctaaatagggtttttttcttggtcttttgtttaggtttttgtttgtttgcgtatagttgtggttaccggattttcgccgatcgcgggttttctcgaagattcgtgaagctccgtgaagaccttgagcaaggcaagtcaccctttgatcaattgcccctataattggaaaatcattattattttgtttgcaacttgcattattagaatcacacataacttgcttggcctcgatttgcgtgccaaaccgacggacctacccagtagtcgcactaattcctgtaggctgtactatcatgattccttgtcgctccacccttgtggtacttcggtattcgtgctctctgagcgcgtataccaaatatctcacatacatcgttgattgtcgaaaacttgggaaatgggtttgagaagccttgaaaacccgacatgtggtgtcggtgtgtttaaaaataaaatgaattgtgaaaactcgcgatgcgggggttgtgcctgcgtggcactgtcccgtgttcgcatataaggaccgattcctgtgggaaactcatcgagcataatcaaagtgcaaccacaaggtggaatgggacaccctggctaagtaattagtcggttcagggaaacctcgcatgccaatagttggggaacgctggggcggggtcggttggagccaaaccgggttcctggtaagcaaggaataggagcttgctgaattaccgatcgaggtggttggagtttgatttgtgaaaactaaaatggcatatatttatgtgaggatttgatccttctatgtggcatgaggtaaccctgggccggcttaggaaaggccttgttgcgaacctccgacaccgacgggtgttcggaataagttcgtatcttgtgggtaaagtgtacccctctgcagaggttaactaactgtttgaacagccgtgcccacggtcatgggcggatgtgaggtggttcccgttgcgtagatttgtttgcctgtgctttgtgaaaagttgttgtgggatgggaatcgtaaccagaatcagcctatgtggcagatggatgacctgagtggtcagaaacgaatctgtgtgattcgggatgtctacgggcatcatagactaggcttcccgagtggaagcggaatgttgtgctgctgggcagctggactctgggagtccgagaaaatgagaaaggctctgggagccgattaatcaagtgaaatagctctgggagccgagaggtaatgatctgacccgggaggtcgatacattaccaattgagttgttgaaaaatatctcttaagtcgatttgagacgcaagtctcttttcggcccaaacttaacaagaagtaaatcacttagtgatttcaaacaaaggatttgcaaaacaaccttgcccctcttccaagcttgcattaaacacctaaattccagtgacttgctgagtacgaaagtactcacccttgctctatataaatatatatagttcctccgtcctgaagttgaagatgaagtaaagtgaagattaagggttttgtcctggttcccagccgtcgcctgtggtattgggtgttagaccgttggttccgctgctgctgctgttgttggtgtttgcctcgtccgtgtcgtcggttgcattcttaggctgtctgagctgcaacctaagttaaggtaaataagtcctctatttattttaaggattgcaatgattcatatttgtcaccgtgggtaccagcgctatgtcctgggactggtactgagatcgcggtttcgtagggagcggtttgcaccgtttttcctacgacacgctcctatcaggtgccgttgtacgacggtgccagattggggtgtgacacctcgggcttgactcccctcgggggaggaccacgtggcatcggggggcagcctcctccgactagtctttgggaaggagtggccgccgccctacctcgggcccgacccccctcaggggagggccacgtggcatcggggggcagcctcctccatccagtctctgggaaggagtggccgccgtcccacctcgagcctgactcccctcgggggaggggcacgtggcatcggggggtagcctcctctgactagtctttggggaaagagtggccgccaccccacctcgggcctgactccccttgggggagggccacgcggcatcggggggcagcctcctccctctaaacctgatacatacccccgggcctatatcaccgacataactctaaaacttcttatattatgggatagaaggaatagaaaggagagcagtgccaatgtcgcacactttatgccgtcagtactcctttcaaacgcatgaattttattggattttaatacgaagaaagcatagaaaggagcttaggacaggttaatttttttttaccaaagttactggcctggtgactaactggacccacctagcggctcaaattttaaccccggccctgatcataagatgtaactaacgaatttctcaactatgtattgctcgccgcttttttgaaatttgtatgcaaaataattgcgtagttcaaccacaggacagtactcctattattttcagctggagtgtcaatatgacaacatcaatatggaatacactgtaaattcaaaaaagtgtaacatgtacataggtataaatgcctctcccttattatacctccgtttgtatcggagaaattccaaaggaattaatttcaaaggattcaattcctaaggaaatatttcactcttaatttcatcaccgtttgcaacaaggacgtgctccggcgtgttatcatcgagtcgaactccagcgtattgctggtctcggtcgcagaattgtttacgccttaggcgtgctccggcgagttgttgggcggcgtggcggcggcggcggcggcgttgatgacgttgcggcggccacgctcggagcgggagttctcggcgaacttgagacttgcaccgtggaggcccttgctcttctcctgttcgctccactcggagccgtagtagtgctcctcctcggcgccggcgttgggcgggaggaacatggagccccactgcgggaaatggacgagcaccaccggcagcgtgcacgccatgatcatgatgcccatgtactccagccccgtgcccgtggagtacctcgacgacgtgaagaagagcagctgcgtgagcccggcgccgaagttgccgccggcgccggtcatgccggagatgatgccgagcgagcggcgggagacgaaggggatgacgccgaagatggcgccgcaggcggcctgcgcgcagaaggagaagaggaccatgcagacgacggaggtggggagggtggatgcgcggccgagcaggaggcagaacgcgccgccggcggtctggaggatccaaatgttccagaggcgggcgcgcatgccgaagtagcgcgcgccgaggtccgagaggaggccgccggtggggcgcgcgacgatgttggccatgccgaaggatgcggcgatgatgccggcgacgcggaggtcgaggtcgaagcgatcgtagaagtactcggcgatgacgttgtcggtggtgagctcgacgcccatggagtagccgtagaggaggacgaagatccaggtgcggtagttggtgacggcgtaccagagcaccctggagaagctgtccctgttgacgtcacccttcttctgcaggctgcgcaggttgccgtcggggaggtcctgccccagcgtcagcaccagcacgcccatcaccacgtgcagcgtccccggcacgaagtaggccagcctccacgccgtgaacggcgtcgcgccgcacttgcggatcacgtcgtagacgagcggcatgatgagctgcgtcgcgccgccgcccatgtttccccacccggcggcgaggccgttgacgaggccgatgatcttgctgttgaacatggtgctcatccagtactggcatgacacgaaggtggcgagggagaagccgatgaggaagcgcacggcgatgtaccccgcggcggagtcgatgagcgacatgcagaagacggtgggcgcggcgagcatgatgaggaaggcgcagccgtagcgcgggccgagcatgtcgcagatggcgcccatggcgagcctggagaagatggagccggagacggaggcgacgccggcgttgccgatgtcggccttggtgaggttgaggttgtcgcggatgatggggacgagaggggcggcggcgaaggtggagacgaagcaggagaagaaggagatccatgataggtggaacgtcctcatatgcgggttcgcgaacgacagcaacctgatcgtcttcgccttgtgctccgagtccaccggcaagtcgaacttgctcgccgccgccgcgtcctcgccgcccacctccgtcgagaacgcgaacgccggctcgcgccccgtcacgccgtgcagcgagctccccggagcgcccaccgtcgacgagtccatggcaactactagctgctgctagccgctgcttcttggagatggaatcgatcgaatcgctggttgcaagagagaagctaggtgagctcggatgcaattgctggctttgctggtggcttgggagttgggatcacgcatcgcccagctatttatagagcttcaggtgcgcgggaattggcacgctctcgttggcgccatccttatggcatttgccttaagattcgtgctggtgcaaaatggcctcatcgtctccgttctctcacctgataatatcgacagacctggacacgttctctgaactctgaagtttattgctgaattaacaagagtggatttttaattatgtgattatacgattattacgttacgagcgataagggggcagcaagcgttgacaatatcagctgtgaactctgaaaatatagtactactagtagcatgatataagaggaagtcatgtgagattaattaaggagataacctcggcgccgcatctccggagcagagtggcctttatcccatggaatcctccaaggatcagaatatgcaacgccaatatgggacccacctgatgcatgcgcagaatcgatctgttcatctgttgttcctcagctggttgccacttcacaatttcacacagaaaaaaataacagatatagctgtaaatgcaagtatgcatagacgtagccagaggtgagtaaaaaaaaaattttgaacgaatcggtaagctgccaatttcattgaatagagaaagagtaaactttacaagtaagaaaaaccaggcccaggaccttcggtcctactgagctaaaaataagaagcaagccagctaccaagatgcctcgcccccgcccgagaccatgttttggcctcctttttaattttggccaacagacttccggtagataactctttgtgctgaaaaattctacgatttctctcattccagatttcccagttgaccagaagtgttaacgtgtgaagtgctttctttggggcttccttcaagttggcggtggcctcccaccactctaacaccgattgagctagttgccattgaccgggatttagttgaccacacccagtccaatcagataacgccgcccagattttcttggtgtatctgcattctgcaagaaggtggagagcagtttcttgggtgtgtctacataaggggcagaaataatcgttctgccaacctctggttgccagtctgtcggaggtccaaactctattttggataatcaactaggcaaaggtcttgcacttgcgtggtgcccacggcttccatattatgatgttgaagttggtggctgtagtacctaagagctgcgctttgtaggccgacgtcaccgtatattcaccatggccagtgagcttccacactatcttgtcctcctcattttctgtgaaatgtacgttgtgtaccgcactccagacattgattagctggctgaccagctccgttgtccagcctaaggctggaggaaggtccagatcgagcagccactggtctatagttgaggcctattgtagttctttttcttggagggaggtgagtaaaattattttgtgttaatgtgcactttgcagttctttttcatatgattcgaaagaaataaaaattagcctttggattcggtttaggcgcccagctagtagcattttcaacttcagctaatttttctacctgaaattttgatatctttgtgaatatatgcttttcctagaaatgccaatagaaaatcatttacagcatatctgttacatgcaccaatttgactttcaaatcatttcctgatcgatacaaatttcgatgccgactttaatttcaaatcatcaaaaccccgagtcggccagctgaagtagatcgagcagtaaacatcagtagtgacagacaacagcgacgtcgagtagtaaccatgaacacggcttcgtcctagtagtaaatcgcatcttttgcagcaatcgaacggccatcgcattgcatcatttgctctgactatgcaaatcatgtaattttgtcaaccgctgacactgacagcaagggacaaatgacctctagtgttcttccttcaggtctttgctgccttttacacttgtaccaaaggcatattttttttccaccaaatttaattctgcaaatacgactttggacttggatattattgctgcgactctgcaaatcggttgttacaacttacaattaacacttgcctaactaattcgatatttcgattgctgaattcttgcttgctccaacactgtgacgacaggggacagaaaggcagtctagaatcaatgctacaactgatcgaaggggacaagtgaaatgagctattgacgtctcggcgggacaaatagcatccagttcattgttctacaccgtcatccatatattctcatttctcaatttagggcaatttctcggttacggtgacatggtctcctgccttgtagaatctaactattgggaaatcaatcatgaaagctgccatgtggccggttctagtacaaataatgtgtacctgtgtactccacttacacttgcgtcctactacgttgtatgttacttgagatcgaccgctcgatatttttcatccataaatatgtgcatttaatgtaatgaagaagaatacatttaatgtgtaaaattagggaatctccacccgtttctgtaaggctttcttttccttttcaatgtgttgtttgattaccttcatcagtttttctcaattgaaaaaagctcaaagagacgtgcacatgaaatctggccttttggacttatcagggctgcgcgccgtgctatatgcatgataagttatgatcaagccagttaagtgacatcaagtgatgcatcattgagtcttgagggaaaaaaaaagaattgcttgtaaatttcagaggcatttgactttgtaggagctggtacagcagccgtacaagggcccacgatctatacagactcttcttaattaaccccccccccaaaaggttatcttttataatcatgctgaattgatctattttcctcgtaatctttaatcatcagatcaatcaataccgattgttcatcatgccatgaatctccaaacgcttcattttttgttgggccgaaagctttcgacctggctgacacgtgctgaactctatcatgggcctggagacatacggcccacgcattcaatcctctctcctgggccttggcccactaggcagtcctgaactgaactctgatgatatcttgttcttatctgaaaagatcgccacatcgatcacatggccaactcatcgagcggcgcgatgctaatcaatctaatactgatacactacactaatcatgtgttgcattggcgtttgttaatcaccatcttggtcgtcgtcgtcgtcaatcgtcatcgctgagcatctttgtattgtacattactaatacgagcagcgatcgtgatcagtaaaaacaacaacgtggtcagtccagcccccttggattagttacactaattaattaattaattaattaattaattaatactcctctcttccaggtgtatacccagtaaacgacacaagctgcaattagccgaaatcctccgtatatttcaccaagccctaacacggacaaaaccatccagatgtgcctgcaattttctttcttaactgcgtgacgtgttcgattcctcgccctcgaatggacactgccacgtaccaaacttaagattcatctgagcttgcagatcgaacatggtcgatctgtgaatctataattattcctcctcctccttcacatgcgtatgtatgtataccagtatgtggatcaactggcgtaattaaaatgagtaaattaacaacaattagtatgcagctgatggattccatcttagctagctagattctccgatccctgaaacaaatcggcagcactggacagatcatgcattgcatgtatatatatgaccaaccatttcagctaacgagtagctatccagcatatgtttgctagtttcagttcagtgatcgagtgagcgagctatagtaattaaggccttaagtgaggagtgattaattgcagttgatatggggcacagtggtggcgttgaggctgcgtgcagagtgctacccatcatcgacgaggagtcggagtcggaaatggacgaggggtcgccggagaggaaggtcgtcgacgaccgccggaaggccatcgtgtccaggatgagggagctgctccggcgagcggccgctcagtcgtcggcgcagtccaagctccggtccaccgtgcttgtcagtgccaagaaatggaaggtaagccaaaatccattcgatctctgactaatttatgcatatgaattcagttgcatttctgtgttgaacctctgaaatttaacttgtttttgtgctaattgatgttgtcagagggtggtggtgagcctgcagaacagcaggaggaagcaggagcagcagcagcagcaactgacgacgacgagccggcagagcgacggcggcatgagctcgtcgccggtctccagcaagagcgacagcttcagctgggacatcgccacagcagagagctgctcgtcctcgccagcgcagtcgccgctgtggccggcggcgctgcgtcagttctcaccgtcgccggcgacgaagcacggcatgaggctccggcgagacagctcggggtcagcagctgacgatgacaggatgagcagcatgtcgtgcagtggcagcccggatgacgacgactatggcggcagcagcaggctgtgtcagtggatcaccacggattctgactgtaagtgattgctcatcatctcgatctcgcgttcacgcataagacaattaattcaggttgctgatgaacggatcatt

SEQ ID NO: 3880 - DNA, 5190 bp, Oryza sativa
tgcgcgcaggccgcctacggcgccatcttcggcgtcatccccttcgtctcccgccgctcgctcggcatcatctccggcatgaccggcgccggcggcaacttcggcgccgggctcacgcagctgctcttcttcacgtcgtcgaggtactccacgggcacggggctggagtacatgggcatcatgatcatggcgtgcacgctgccggtggtgctcgtccatttcccgcagtggggctccatgttcctcccgcccaacgccggcgccgaggaggagcactactacggctccgagtggagcgaacaggagaagagcaagggcctccacggtgcaagtctcaagttcgccgagaactcccgctccgagcgtggccgccgcaacgtcatcaacgccgccgccgccgccgccacgccgcccaacaactcgccggagcacgcctaattaagaggccaagttaattaattatgcatgcatgtataaactgttgaacgttttgttaccgttttctttatactatctagagtatgtcgtcatggagaaaggcctttgtattacttgcttcgaaaagcgtttaaatgaaaagaaaaaagttaagaaatttttgtgataaaccaacaaaactacccccaaagtttgcaccattgcgttgattttttttcttaaaaaaaaatggaggcaaaagctttgctttgactataccattgcgttcagttattacagatcttatttgaaagtagaattgcatacgagggagactacgtaacaatataccattgcaacagaataattaccgtcaatatggtaccatatgtaccatttatggtatcttcggtatcagatatgacaccccgtatgtatcagatccggtacataggtactatgtacatgacataaaagcaagcgtggtgcatcttttagctctgtgttttataaataaaaccacatttgtacacatcttcagtggttaattaatctctacccatttataatctggatccaccattgaccattgtaacataaatcggcaacaaccaaagccaagagaaagaaccatgatggcctcatggccagatcactgttggggggtgactataccgaatggttatttaggaggtgtctaggattattagctgttcagccagggttatcttttcagtaagagcatctccaacagatgtacaaaattcgaaccccaaaaatcctctattggggatagccaaaaaagaatttggcctaaaatacaccccccttcaagaggtgtcccaaaatgttaaaatttgccacataatcatttgtgggtccttctcaactaattttacagcaaccagtgattgatcgagtcgtctccgtagtgttgctgcatgcgtgcaacaaagacagaagattactgcagcaggatgagggaattacccaagtactgaatagacacaattctgaatataaatagtttgtattgcacagacgtagtaaaccacctaatctagacacaacagacacaattctgaatataaatagtttgcattgcacagacttaataaacctaggtaaatttctaacgaatcttcactaatctgaactccaagtacgattgccaccaaatattgccatctccttccctcccactctctgatctggtggtttccctgttgatagtaatgagatggagttaaaatgaatcagaatacatgtacagattatacagctgccaatttttccaatatattgtaattaataatgtgaacaattctggacatctatgaacatttctgatataatctaaacaaatatttctgaacatttctgaattgccagctagcacaacattctgaaggtttctaaaataaatctgaacaaatacagtagtctttgatgctagaaatctacatccagatcaactcaatcgaaggtaatacagctgaaaatgcaatgcagtatgttaaatcttttggcctcaaagaccaaaattcagaccaagatttggcagtgcatcatgcagcatatttaaaaatatatgcagccccatgtatcagtggatcgaatcagatggtgtagtgcagctgtgcaaaggcagcatttcaacaagatggagacaagaacaagtatatgcatggacaggggcactcaactgaatgtaaactgttatgagacacaaacctatcaaccggaactgttcatgcgacgagcgatgatctcattttgtaaactcttgtagaactgctgctgttagagaggcttggaagaaatgtccagttgaaaaatctaacatagtagagatttggactgaggaagtgtacctggacgtagaagaggaggcaccttggaaggggaagacggtggccggcgctgccctcaatggaggaccagcgacgccctagatgcagggtcgccacgcaccagaagaggggctgccggcgcgctggatgaagggccgccgcccaccggtacgagggccgccggcgctgtggatggaggattggaggcggcctgtggaaacctcggaggtgaactgcggcggcgtgcgcctagctcgagaaagaaacggcgcgagagaagggtagaaaagaaccgggcacctggcggaagaaaaaaaagacgcgggtgtgaaaaaagtggcgcgagatgttgattgggagggcgtatatgttcccaaaatctaggggtttggcactggttttaggcgtgggtaaattttgggatcttgattaggaatctgttggagggctgttttttatgaaaatcctaaaatttaatttttaggaacctttttagccctctcttggagatgccctaatgaaagtggaactatcaaaaggtgtcaactgtcaaccagaagaagcaatattatttgaaaggaaaaaaaaaacagctaaatacttggcaacttagcaacaatttgtgcatgtccaaagttcatggaagtgcattagacaaacatgaaggacagctcaggtacttgttggaccttattaatgtccacaacaaatggcttatctcaccatcttcaaatttataatcgagtaagattatgacatgaaatgtgcacatctttggaaatggtctactgatccaatgtcaacttagaaaacaatatattagatgcacctgtatagttgtgtgtgtgaacttaattggtattgtgattttttgaggtttgctcaaagaaggaagcaaagggtgtccttcctctcaaaaaagaaagaaagaaaaaggtggcaagagtcagattaggcaaactcccaagtgccaagtgtgaactgacagaaaaggggagaaatttggacttttagcaaaatttataaattcaaaattcggttggaactttcaaacaaaatatttgatcaaattttaaatttgaaaaaaataatgtgcaaatctaacctaaattttaagagatgagctttaaccaattatggaatatgacgtgtccagcaaccctccgccatctctcatgcttgtttgcaaatcgagatgccatcgcccccttgcaccatgagatgttagagcaggtacaacagcagactataagccatctataaacacatatcgagaagataaaatatgagagagaagagcagtggggtacagatttgtagccagctgtagcacggactccacgacacaatgtgtgtatgatagatgggaccatgtaagtatatgtttataggtaactattatatgaattggctattaagttgactatagatgatttggagctactagttggttatactattaaacttgctcttaaggagccatcgtatcattttcaacctaacagaatactccctccatcccaaaatataacaacttttagcccttaggatttgtcccaaaatataacttctctaccaacattctctttccaaccaatcacaaccctctactattcacttttcccacctacctccactactcgtccaatcacaatcttccaacattcacttgtacctactttcttaataaccatatccaacttgtcggagaatgaactcctccaccagggaaccgtgaggcccccctttgtgagttcggccgggggcagcgggtgagattcgagggcttggtgagcgaagctgtgtaatcttgaggaggttcaatcccccaaagacgatgaaacaaaaggggtttatacatgttcgggccgctaagaagcgtaataccctactcttgtgcttgattgattgagtagagaacaccagtgtttggggttgcgagacccaagagccagttcgctcggaagtcccccccctctccaccactaggcctggacctccttttatacctcaagaggttaccacatgggcccaacaacctaacctagctccggtggagaagtattataatctttgcattaaatgcatgtcttgtctcttgacttgggaagccaagcgcatgtcatcttgatgatggggcctgtcaaatcttgccgcctgacatggggggtgcccctgttagtcaccatttaatgggtgaagacttctgggctcctattacaccgggaaacgggagccttgctttgaccagagcgagaggaccgactccggctgggataagaggatgataacctgtcaccatcattatttgatgggatatgtcgggttgcacgtcgcctgacacacgcgatggtgcgcctgacatcctgggtcccatcagtcattcgaccggtcacagaccggttgagtgcactgcacaccacattaaatgcggcgtggcgcgaccgctcgggtcgctataaatgcgggtaggtgggcacctggaggtggatacctaacccaccgtacgtggtgacctagagagggggttgggggagcccgacccctagttacgggaggggacggccgccgcccgacctcgggcccgatcccccctcggggggagccacgtggcgcctggggcggccttctccctctagtctcggccagggagtggccgccgccctttctcgggcccgacccccctcgggggagggccacgtggcattggagggcagcctcctccatccagtctctgggaaggagtggccgccaccccacctcgggcctaactccccttgagggagggccacgtggcatcgggggcagcctcctccgactagtctttgggaaggagtggccgccgtcctaactcgggcctgactcccctcgggggagggccacgtggcatcggggggcagctcctccgactagtctttgg

SEQ ID NO: 3881 - DNA, 3718 bp, Oryza sativa
gtcgttgccgcctcctcctctgcctcgtgggcctcgtgggctcgtcgccgcccgcgcgccgcccctccccgccgcccactcgcagcttctcccccaccgccgccgcgtcgcctctcgccgacaccctcctcctcccgccagctaagtcagagaagggagagagataaagaagggagataagaggggaaaagagagagaagaggtgggttatatgacagcatgacatgtgggtcccactctgacttagccgtcacgtaagacaaaaccaggatcaaaactacctaaggatctattgtgaccggttttgatagttgagggatgctggatacctgattttacggttgggggacgattttgtaactcgatgacaagttgagggaccttcggtgcactttttcctaatttggcgtcaacagggccctgcaccgcggcctacgggactgtctatccatttgtcgggtgatttctaaccaaaaattacccagattttttttactcttagatttacatctaacggactacaaaagaatatacaaatacatatttacttacacattatttttatcaaaattacagtgcacttatatgccatatcaactgaatttacaaatgtaattttaggtatataggacagtaattttatattttaaagaaaataacaaatatatatttacttacatattatttttattaaaattacagtgcacttacatgccatatcaactgaatttacaaatgtaattttagttatgtatgactgtaactttatatttcacgacgacgacgagagtggccgtactgccggcggccagctcaatcagaggccaccttggcaccgtgcttctccatcatcacgcgcgcgggggtagctaggtaacacaggccgacgtgccagccggccggcgagctgcatggaacatcgatcttgcaaattgccgctcgcatcgcaagctgcatggaggccaaaacaaagtgtcaaatgccagaaaaaaatcacacggagatggatagcaaaatcgttttcatataaaaatgagattgcgactctttgagtctcctcctgctaccgaggatgtaacactcactctccttatgcaatattaattcaagtgttatataaaaagcttggagaatccatccccgtgtccctggaaaagccaacaccaacctttcaacgggcccaaatgttgctcctgcactaattaatcactttaattacagctacgcagagcattttggctaacttgaactcgtttaagaataaatctaaagcaaaaaaaagtcacctgtcactcttgatgtgtcattgtacagctggaagtcagacactgcgagctctcttcagaaaatgtatttgcacggtcaactctttgatgcacattatatggactctgctgaaagcttgaaattgcaacaaattactgctttgattgataaggcctggtttatggctagcttctcagattgggacaatgcttacatggatccttgtgtgtgctgatccaattaggcaaatactgagccaaagtactagcatcttctttaattttaagttaagtcaaacttcattatggcatctggggcaatagcaacatgccaacttgttaatttccataccaaaccatgcatgatggaaggaaagcatcagtgccaagtaaccatgcaattcacacttctgaatccatcatacattcattgtattgacacttttaaaaaaagagagatttgctctggtacgacaaaaagtaactcgaggtaccgatacctcatgatgctaaatcgttttcgatcgttggatctaacaatgcacatcatgtccagctagattcaacgataagaaacgatttggtaccgtgaggtaccggtacctcgagatactttttgttgaattggagcaaatttctttaaaaaatacctgcaggtgctctagttcaactgaagggccagatttagcaatatctgagtccttcaaataaattcatcaactaacaaacttcaaccgaagctatatataaacaaaatcaaaaaccgtgatagaataacggtatatatttgaccagaacatcgaaaacgaaacagggaaatgtacaaaattggaaagaaaaagggtgaaataacttatggaacataccaaaggttgggggtgttgacatatccacacaaattaaactataatctgaagacctccaactccaagttgtcaagacaaataaccgagcacgcgagcgcggttcatatgatgtgtatgggaattgggatgctgaaaacaaatgcaactggacacatatctgcaacttgtaaataacttttatttcttttaatggaaaaaatgtgcctctcgcgtattccggaaaagaacattctgtcctatacatgacatcctgatatgttgtaaacatgataaataactggtaagttgcctgaaatctctatcaaggttaaagtcggccgaagaattgcagggagacagatgaactgatgagtaagagacagcaaagacctgatgaacacaagagggtcatatgtccccttgctgtcagtgtcagggttggcatatttgcaagccggtgtgcaaagtcagattgataacgcatgcaatggccgttggatcgctgcaaaagatgtaggttagatagaaccgaagccgtgaacatgatactagtagctaacaacaacttttgttgttgatcctgacacgccgttgctttgcttcaggccgtcatgaaaaaaaaccagtgcatatctcatggcaagaagaagtgcaggttgtgaactgaaactgcaaacatgaagagaaaatacagaagtttatgaagaagctcccatcaatccaagcaaagttttttttttcttgttatttaatagaacaaagttacaatgccagagtaaacagtgctgagccacaattcttggaatctcattttactctgaacactgaaggattctgtggacagatacagaacataacataacagaacagaacagaaaaggaagagaaattaattaatcggcaagcaacagatcgattctgcgcacgcatctgatgggatattctgatccttggtggatcccatgggataaagggcagtcttctccggagatgcggcgccgaggttatctcctttatcaattcatttcagcttaatttaaacggttctttgctttcctgtaatatacatgcaatgtagtttcagagatcagagtcgagactgtcaacgctagctagctgcctctaattttgttgttttaaattcagaccaataatgcacccattgttaattcagaaagaaatcggtaagcccagagagttcagacttcagagagctgacagcgtgttcaggccgttcgattttggtgaggccattgcaccagcacgaatcacgaggcagatattacaacttgagctctctataaatagccccagcgatgcgcgatccaaagcaagcaacagcagcagaagtgcacttttgcattctatttccaatcaatccaagaggctagagctagcggccaagatcatcgtcaccggcggcatggactcgtcgacggtgggcgctccggggagctcgctgcacggcgtgacggggcgcgagccggcgttcgcgttctcgacggaggtgggcggcgaggacgcggcggcggcgagcaagttcgacttgccggtggactcggagcacaaggcgaagacgatcaggttgctgtcgttcgcgaacccgca

SEQ ID NO: 3882 - DNA, 7399 bp, Oryza sativa
tgttactcgcagccaacactgtcgccagcccactgctggcagggaatccggcagtgataggccccacgaaccgatagtgttagccggttttggggctattggtgttggtgttaccgaatggaatggtggcttatatagtcctaatttccaatatacatgagatttataacatagtcagatttagtccctatatttgtaggggtattccctcaaaaaaaaatatttgtatgggtagcactagatgctgcattttgttcatctgaatacgtgaatggaagtcaattattaaggccgtgatgtaccaatgagccttgctagaattgcattgggtgggttaaggtatgtgctgacaaagtaaaagttctaatgattttttatggcgtttttcaggtgttggtgaaatatttggacaggagtgtaagaaacgtggcatgatggttaaggttcttggaaacttgatagcgatgtccccaccactgataataacccgtgaagaaattgataaagtaattaagaacaaatcacagcataacctttctccctcttttctggttgtagatgaaagcaacgctgttatgtcatgactcatagtactctattgcttttcagctggtgagcatatatggagaagctctgaaggcaacagaggaaagagtggcagagctaaaatccaagaagaattagtcaacatatgtcatctatggcaatggcggcaaaggttgaaggcaatgatgtggtccctgcaccgaataaattccactggtgcttgttgttcgataatttgttgaaatattactgatgttgtgttaaaagacaattattagctttccactaaatctcggagtacttgttctttctgatagtacgaaatcgtactgccacaccttaagtacattatgtgtaacccgcagcggcacccggagacgcgccgatgcaggggaggcacatccccccctcccggcgcgcgcgcggaacaatcacccgggagatagcctggtatcataaacggcactgttcttgcttcatgttgatgtagattagcgacgctccaatacataaacgagtggcgttaatctcgacaaagagacaagagagagggcaccacggatgaacgacatattgtcatcttggcacggcggagaggaaacatcacggatggacagcatcacatcaccgttggtgtagcggggagaaggcatcacagacggatagcatctcatcatgttggtgtagcgaaaatgggtgtcacagacggacggcatctatctcagcgtgacagagaggagacgtcacggatggacggcaccaatcttggcatgacgaagagagagtgcaccatggactgatggtatggctactccggggtgacgaagagaaggcctcactggcggctggaatcgatctcgacaaagacttgcgagtggtgccaacagattggttggcacggcgactccggcatgatggagagagtgcacctgttgataaaaaaacacacactgatctgagagatttactttactctagtgcaggttcaaagattaatttgctttcgggttcagggtgtgccagttgatttgatcttacaaccaacaaaaaaacaaagaaaacaaagttaaatctataaacgatagccgatcggacggattgccaatgacgtatcgtttaatattaagacgatgtatcatgcatcagatcggcagtgaagtatataacaaagaaataattagatctacttgatcggctaaagatatcaataatatacaatctatgcttcgaaatatgtttaaaccaagtgattgggatagatcggacagtacgccgagacagtataaatcacttatgattaaaagtactttagaacaaagattatatatattcatagcatagccgatattccttattttttaattcaaatttcagctatttctaaattgtacttttatatggactatgtttttctttttctccgattaatatgaaaatttttatatgccgagagcgaatgtggagactcatttttctattactctaataagttaatagatagatttgacggtctcacttacacggtacactgcatgcatgcagtacgtactgatctcccagttcctccttggtttgccctcatacatgcatacgcatatatatattaaccaaacatgcatgtgtatatagctgggcacacacatatttgcatgcctcatgcatcacacgtaagccaacaaactagctagtttcacatattaatacatgtggctgtcattttgcttgttttggccaacatccatattctctatttgaacaagatagcaaaatgccctcaaacaacgagtgctccggcgagatcaatgatgggcctgtttgcatcataatttggcgggaaaaagtacaccgaagttccctcaacttgtcatcgagttacaaaatcatcccccaaccgtaaaaccaagtatctagcatccctcaactatcaaaacaggccacaataggttcttcggtggttttgaccccggttttatcctacgtgggccccacatgtcaggctgccacatcagcttctctctccctctctttccccctcttctctcccttcctcatctctctctctcccttctctgactcagccagcgggaggaggagggcgtcagcggccggtgaggggcgacgcggcggcggtgatggcggcggcgggcgacgcagcggtggtggggggagaagctgcgggtgggcggcgaggagcagcgcgcgggcggcggggggaggagtggcgcgcgggctcccccgtctgcccctgcccacgaggctcacgtcgtacaagtccttcccgtcggcactgcccagcgtgaactcggcgagggtgacgggcggcgcgccaccgagggagcagctcacaacgccgccgaagtcccccgtggcacaggcgagggacgcggtgccggagggtgcacagtccgtgcgcgcccacaagcggccggaccaaccatccggggctgggaacgagacattggcaccgagcgacagctcgaagccgccacccccgatggccaccgcggtgtttccggacaaggtggtcggccagacggtgtaggtgcagttgttgcgcagcgtgaagaccgtcgtgccagctgactcagcgccgaactgcagctgtgaccataggaaccctacattgagacacaacattgttgaagaatgagtcgggtgcaagtggctgggcgttcgacagcagcggctgtggtggtggtgaccacgactgcggtcaccggaggcatgacggcctcggacggctagccgagggcgtgggaaacagctgcttctggccggcacggcatcgttcgatgaaggggtcggagactggcttggcacagagaggcgtagccgatggcagcggaggccggctcggcgcgagaggcgcgggcggcggagatggaggccggcttggcgcgagaggcgtggccggcagtggaggaggcgacctaggtgagaggaggagctgccggtggatatggcgtggtcttcggcgcacgaaggctggccggcgggggacgtcggtgcaggggtcccacatgtcggcagagcttgtgtggtggtggcgcatcggtgcgtcagccgtggattcgcagccggtgagcggcgggtgaaaacccagtgcggccttggccgaaccgacaacgatcctcctgagggtgttgttgtgctgtctcacccctcaagggtgatagccgggcgaaagcccagtcttggctcttttgagtcccgacggacgggcggtggtttttccgtcgcttctcttcttgaagacgttgttttggcatcccctagggggcgatctcgtctgtgtccctttgttggtctaggtgacggtcggtgtcacatcctgatttttgtttcaggatttataaattatttaataaattattattagaatttatattaaatgttcattaatttacaagtgaagttaaatgtgggaaataaaatttcctaaatataaagcatggatggatttaatttttattaaattctccatgattaagtatactctctgaaattttctcgaatttttcgaagctcaattcctaaatgatacaaagaacagttcagtaattatttgatcattaatgatctaattataattgttaagagcttttcttgtttaaaaatccttaaattataaattgttgtttaaaaggaattattagaaatgatcttaaaagcctaaaagagaagattttttttaatttgctaaatctcaatataaaattgggcgagataaaattttgttaaatacttctcttgaatctttagttcctagatttttctggatttatttgagccaagaaagtatttttaataaatggaattgcatttcatgaataatttaaattgaaaaaggtttttaaaaagtctcttttggctttgggccgaaagccggcccaaaacctctctctttctctctccctccccggcccagtcggcccagcccgtcgtcgcttccttctctctcggtgccgctgacaggtggggcctacctgttagggctgtcttcctcctccagccgtcgcctggccgaaccctagccgagctgcgccgccgccgcttcccttccaaattccgccgcccctctctatttccggtcaaattgattgagggcaaatgatccttgagatctcctcttcctttcctcttttggaatcatcgcctaattcggtttggaaacttgtggattcgatctcgaatcggattcatctctctcccctaaccctagactttccttctcgtcgccggtcgccgtgggccttcgccgccgccttccaacccctatataaggatccccaagctctcctctacccgccgccaccctcgccttcgtctctcgccgtcggtagcgccctagcgccgtgtaacctcgagccgccgtcgttgccgccgctccagccgtgcttcgccatcgtttcagtcgtcgccgtcgctcgggaaggtcgccatcgtggtcgccgtcgcgtcgccgtcctcgtccgccccttcgccgtcgctgtagaccgccggagcatcgccgtcgtcgtcaagccgaaggactccgccgccttttcctcgacgccgccgccgtccgttcatcttccgccgcttctttggtcatcggtgagttcgccgcgtcgctctctacgtgctggtgccctccgttcgtgccgtagtgccgtcgttcgccggcgagcaagtgcgcccgagccgccgccggaggtgacatcaccgctgacgtcgtcgtcatcgactctcgtggcccggtcgtggaccgttcgatctcggccgtccgttttggataggatcgatctcggccgttcgttcccgtgagccgccgccgtgcacccggttcaccgcaaaccctagccgatgacgcaataattccctttttcttttcaaaaataattcattattgcgtcataattcaattaaaatccatataagtgttttaacccgatttaatctttaaaaattcataactaattcattgtaactcagtttaatgtagttcaagttacaaaagttgtgtaaaataaagatctacatattaaaattatccataaattgaattaaatttatttaattctttttaaatgggctttaattagatttaatcttgtaaaattcataataaattcatatgaagtcagaatgaggccgttcaagtctcataattcatctaaaattatgatctacatgtttgtttactttatatgtattgtttatttggtttttattagtctttttcttcgttttgcgtgttagcttgtcgtttccgtcgttgcgaaggttcgtgagtgcgtcgggagtgttcagaagattaattgaagaccgattattgcaaggcaagtcacacagatcctaaacacaatcctttgagcatgttgatcctatatttaaattctctatttatttcaactgtgcatttactttcgaatgtcactgggtggtgtgaatctattcctttgttatggcctgtttgcattgattactttattacttgataccttgggttattataacttgactagttgagctttatatattggtttagctagatattagatatgattgcttagccatgcttagaaatattagcacactattgggataacttatgactcactattatttaatgatggcttaatgatagttcacgatggtcaatcgtgattggttaattaattacttgccaactcaaacttgataatggtgggttgtgagcacatggttttgagaatcgtgctcatggcaattaaggaccggttcgcgagctactgttgtgaaatattaaccgtgccaaccacaagccagcgtgggcaacggctttaccttttgtataacatgattcattgcggagcaccagactgagaagtggcggagataagcccacggaggtcgctggggagtccatgccttgttttataagggggtgattatgatccaggaatggtgcactgtggtgagttgtgttgtgcagagggtattgtcacagcctctattcgggtactttccagtatcgcgacgcatggtagacatgatgttgaggctgtgtcttgtgggtacagtggtacacctctggccagagtaaaactattcgaatagccgtgcccgcggttatgggcgggttgagcaatgtttttcgtgattagtctcacacctctcacaataattatggatgttatacctggtaataatttgcttagctcctggtttggagttagatctgtacagccgggtatggttgttcagaatggttgggcctgagcagcatgggcgtgttgttcagtgttgattaaaattaatgattaaagtactctactgttttattactcttaaatgtttgctaaatgctgcttttgcaaatgagcctatattatgccatcctttggtatccttgtgcacttgcatatttgctgtgtggcttgttgagtatgtcatatgctcattcttgcaataattaatcaacctcagttgaagaaaaaggatccagaaggagaagacgtttggcttataccccagttgagctgcctgtgggagtggagctgaagccatcgctagaccgttattccgctgctgttttcttttcttttgtaagtgtgtaacgttattattatgatggatttgtatattaaattgtcagtttgtgtacctcggctgattcctggacgaggattttatgcacaaataagttcggaaattactagtgaattttcgggcgtgacagtcggtcacgcttagcggcggtcggtcacacttagcggcggccgctccggtgctagccttctcttggacgcttgtgttggcgatgtcggtgtgtgagtggtggtattcttttttttccctggttacgatcctccagggttgtaatctttat

SEQ ID NO: 3883 - DNA, 744 bp, Oryza sativa
tctcttgaagtttttagttggtcttgatatacacttcacttctgcattagtccatatggacagttcatttttctttccttaggaatatttgctaattgcaaacactccagttttcaggttaacttgagtgttgcaattataccaatgtcacaccagtatggttggaactcatcgactgctggattagtccaatcgtcattcttttggggttatgctttgagtcaactgccaggtggatggctagcaaaattgtttggcggaaggtttgtttgcggtaacaaaaccccccttgtgcatagacaaatacaaaagctacctatgattctccatctgcatgggtgttttaatatcttagcaatgcttttttttggtggttgctgttgcttccgggataagcatgtttccaataataaatgcaaatgatgataatggctatttctttctgcaacccatcttgttaggaattaggatatcttacggatttttttgtgtacctttatgggaaagaatgatccgttaagttggtagtaagcaaaattgcaaatagcagtacgaggtcataattttttttggatggtacatatcttcatttattttacccttttccttactcccaattgtttattttaactataaatttgagtaaattcctagttacaatgatttaatagcagcagtaatcaattcaaataaactagaagaaccatatagcaattttaaacttcaggagaaatcattctgcct

SEQ ID NO: 3884 - DNA, 4004 bp, Oryza sativa
cggtactaccatttgcattttgcagtgtcctacactacaaccaaatattcgctaacattattttccactcaagttctattggcacctataacaaacacgttagttggtgctacatccaaatatatcttgtactaggtcatttgcacttcagctctggtaacaaccatctatggcttcaaaatacaacttttcatactgaattacgcccttgagaagaaaaattgaagcttccttgtccaaatccctattgtaatcactgcatgcaaatgattggatgcaatttggacacccatcagagttggtgcagctgcatgatgaaacaagctctaaagcagcaaccagaagctcaccaaagagcagcttggcctgtgatgctaagccgatgccaccgggatgtttgtcgtacaacagaattctgtctgcagtttcagaattttcttgaggctctgcacattgtgttcctagatcagaaccactgcacatcatgtgcagaggtattatacttagaagcgcatgagaagcagcgtgtacaccaccacagagctgatattccatctgctccatagtcgtccttactgacacaggaatctgtacccaaacggcttgagtttcaaaggagtatggaggtagatgatcaaggttaatgctgtcggatttctggttgtttgacttcaatatccgatcaaagccaacccatttggttgtcaccctgcagtcatttgcttgagctgttgtcctcctgatgtcaggtttacactcactcgcaggatgttcatcaacatcacctccaatgaaactgatttcagtgtagtcctgaactttggtgtagtagttcagatcaaacaccttgcagtaagctatccttgatgtcagatcaagcttatcaaccaagtagctgacaccttggtgcatgtagacagcaccatcatacacctgaaagaaagccttgctttcctcaatctcttcaagaactcgattgcttctcctgtcgatcaccttgtacctgtgatgctcaattgcccgtatgcttacactatgagaaggttttttatcaggtccaatatacttccacacgcctgaatctcctccagatggattgttcatgagacagcccttatctttcagtgtcatcaaaacactgttcatgctaaaaccaaagtagctctcgtcatgttcctgacgcagtggatattcagaagcggcgcaagcgagatgctgttcaagaaccttgcggttttgtgaatcaacctggcagtgctcaatgggcttgccaaacagcttgtgtggtgatctcatgaagtactggtcaagagcaccctcaaaggctacataaacagctatggactgctttgctcttctccctgatctccctgcctgctgccagaagctagccatgcttccaggaaatcccaggtgcagcgtcgcatcgatgtgcccgacatcgatccccagctcaagagcattggtagccgcgacgccgcgaagaattccaccgaagagatcagcctcgatcttcctcctgtcactcgcaacatagccaccacggtagacacagatagaattcaccaattctgcagctgtctccttaagaatctgacgcgtctgcattagcacctgctcacacatcttcctcgtcttgcagaaggcgatggcacgaagcccatgctgaaccatctcggcgaacagataggaaacctctagtactgggtttggtcttctgtcttctgctttcgccaattgcaatggcggattccacaggaggaagttctttgagccgcaaggactcgtgtcattatcaaccagcacgactcgatcaagatttgccagctccatgacatgctccctcggattggccaatgtcgcggtgcagaatatgaatgttggattgcttccataaacatatgaacagatgcgctttaatcttctcagaatcaacgcagcgtggcagccaaatgcgcccttgtaggaatgcgcctcgtcgatgacaatgtacttgaggttgaagaggaccctcttgaactgagcatggcatggcaagatcgacatgtggagcatgtcagggttggtgatcagcagcctcgcggtgttcctgatccttgtccggtctttcatggcggtgtcgccgtcgtagatgctgacgtcgaagtctgagcggaacgccggcttcatctcgagcagtgtcttgagctggtcttgggccagagccttggtggggaagatgtagagcgcgcatggcgcggagctctgggagatggactcgaggacggggatgttgtagcacagcgacttgccgctcgacgtcgaggtggacaccacgacgtgctcgccggagacggcggattgcacggcctgcgcctggtgggcgtacagcttggtgacgccgatgcttctcagcgcgtccctcatggaggacgagaggtggccggggagttcggcgaacgtcgcctcccttcccgggatctcctcgacatgggtgatctgtccggccttcccgagcccttgcctgagatgctccaccatttgggtagggtcgagaggttgggtgccatggcaggagagcggcctcggcggcgctgggttcgtcggcttcttggcgtagatgtcttcgccgccgccgtcgtgccaagaaaacttgcgtttcctccatggattcggcgcgctcgacgacggagggtgcggcggcgctgacttggcgttgaccgggatgaaagagatggactcgccggggccgacggggaggttgccgaccttggcgtcggcgatgagcttggtgcccttgaggaagaggtggaagtcgggggaaaccagcgcgggagcgaaggaggaacggagcgccgtcctgaggtcgctgacggtggcggaggcggcgatcgtgacggtggtggagcgcccgtcgtgggcgcgcacccggatgactctcggctgcgccattgccgtcgccgttgcggaggaaggaaatccgcggcggatttatagccaaattacgcgcaatgccgcatcggaatcggatctgctgcgatactccacatagaaaccaactccgatgctgtgaagtttgaacgtggccgacatcgccggtggcgtgctgccgccgtttagccggcgccgcgcactcatcactcctccatggggcttgggctgactttaccacgccggctgcgtcgatgagattgagaatttgaggcccattccaatttattcccgcacggtaaccctggtaaattttggcccgttttcatgctcgagagaaaggcccatacgcataaataggccgcacgtataatttggcccaatttgtgtgggctgcacaaaagtcagaatctcgtcccggcctaacatgggctgcgaacgtaaaaacccaatcccgttattgggccattacggtaagtgtcggcccatatgtggtccaaactgagaaggaaacggccatgtgagctctacggcccagaacgggttgtcgtctccccgtccggcgggggcgcggggcgccgccagtctcaggagcccgccggccgccgcaggagagggagagcacccaccgagaccgagtcgacgctagtgcctactgccgccattctcaggaacccgccgcctgcgcctggttccctgcaaccgcatcttccgcccgccaccaccaccaacaacgaacgacggctgcactcaaggtgttcgatcgtgggtttgccccggagtggccagaagcggcggcatcatcttgatgcacactgatatctattctcgtctccggaggagctcgcctcgccggcaatccacgacgtggcggttccaatccgggaagcgtctacgatgacaacggtcgtacgttaccttgtcttgccaacgacgctgcctgtggctacgaggacgtcgatgtacatgtacgtgagttcagcacgcccccactgcaatttctttcttcactacgattaatatctggtctctacacacacctgtgaatattggtttagttccaacggattgtgcgctttactctgacagaaaat

SEQ ID NO: 3885 - DNA, 2306 bp, Oryza sativa
gtagcccaactcgatagcaaggccctgaacttgatttcttgttggagatcgaacaaaaccaatgcagccctgctcaaaaactcggcttgatctggataaatttccatcttccaatcgagtttttatttaaccgaatccactaaacaaaagtaccaaattttggtgttatcagtaccttaaagcgataagatgacctcaaacagcatgaggtatgtgggcgatggcaatcagtagcggcaatcaactcagtcgagccctgttccctgcagcgcgtagactaggggtggatagtgagccagctcggctcggctccgctcggctcgctcagctcgtcatcctaacgagctagaaacctagctcggcttggctcgtttgaaagctcgagctagctagttaggcttgcgagccaaaccaacaagcagctggtagaggaggaggaggggaccttcttgccgactggggaagtgcgacggcggcagcggcggctggggaagtgcagcggctgtggcggcctagcggttggcgcggcggcggcagctggggaagtgcggcggtggcggctggggaagtgcagcagctgtggcggccctagcggttggcggcggcggcggcagctggggaagtgcggcggtggcggcagctggggaagtgcggcggcggcggcggccctagcggctggcggtggcgcactggcgaactaaattttgtataaaatttatggtccttactctacagcagaactttacaacttcaaccgtaaaactacagacaatacttctaaacaaaaagtcccatccgagacgtcggatgccaccacaccctatgtactttttctacactgtacaaaacgacacagagatgttttttctccacacatgctccctatcatctctcacatgcatgcactagtgtctctcacaaactctttctttccaaactctcttaagcatgcatgtctggttctattaacaaatataaaatatttttctcataaattacatatttaatctatgatccgatggcaccattttattaattataattaaatatttataacaagatatcacttgattatatttatatcctgagaaaagaaaaatagaggcatttctctatcaagggtcaaaatggtgaaacaaaaatggaggcattaaatttcaaccgttaaaatttaatgtttctacttgatagagaaatgtctcaacaagtatttcatggtgtttcacaaattatttaattgtttcaatgactacttttttatgtttcaccaagtgcatcttgatgtttcataggtagtctactgaaacatttggctgcctcattttttcaatagatttttttaaatgttgtacattgtgttatttagatgtttcaataagtatttttccttatgtttgtaaaatgttgcatgttatattcttttaatgtttcaacagttaaaattcaatgtttcatatataatacaaacatgtttcaattcaaaatataattgtttgttattcataatataatcatgtaagatcttgcttgaatatttaattaattgtagtaaatataacaatgtaatatatctcaaattgaaaaggtaatttaggaaaaaagtttaaagattgttaactaagttacttagggaagagaagagaaataagtgagtgtgcaaagagagcgtgtatgtaaaagtgggggtatgtgggccctacatataacatgcatgtatagagctaaaggagaaagctagaggctacaaaagcacagaagtgggcgttcgatttttcgagtttcatcggacgtcttacacatgggtagcccataaaactacttataatcttatattaattgtcataatactttagagaatcgtccccttactcccctccaacaacaaaagaaccgttccctctagttaaagaaaaaaaatcacttcctcctttaaaaaacgctcaaaaaaaatccaaccaattataaaaaccgacatagaaagaaactaaatcatatttgtatcatctggtaccgttgcaatgcacaggtatgtaactagttaaatataaaaacttgaataattttatttagcttttctcttgtaaaattgatgtacagtgttgtctgaagttaatcacaaagctagcaaaactagtacaggattgttgaccatggaaaaaaatcgcacttgtcattattaagagaggacacaatggaaataagagacagttcgctcaccacgactcggcacctccctgcccccgctctcccattatacatactcggtatacatgtaagaggcatcaaatgcaatacactacacagga

SEQ ID NO: 3886 - DNA, 1560 bp, Oryza sativa
atcatcatttcatgggtactcgtattatggcacccacctatattattcaaatattttaatatttgataaaataggttaataataacttttattttatttgattttaatatcttgtgcataattatttgtaggattaaatatattctcgtaaatcatatctattgcttaaatgtagttcttttctttactttcttagtgatcatttatggtttggcaagcaacaggaatcataacaaccagcatgatgcaaaagttttaaaaagttcgaaattttagtgatttttattgttgggaattttcaggatgttacataggtccaagtttgcgcttcttcgttattggtacattgactttcgccaagcacccccatgtgcgcaaataagaaagtgatggttttctaccaatccatatctcataggtgttttgtcctatttctgttaggaactctgtttaacacatgatttgaggtcaacaatgcctccccccaccatgccttaggcagtcccgcggtgtccaacatggcattcaccacgtcactcagtgtgcggttcttcctttcagcaatcccattagactcgggagaatagggcggcgtcctctcatgtatgatgccatgttcctcacagaataagtcaaactcgttcgagaaaaactctccaccacgatcagacctaagcctttttatctttctgtcaagttgattttcaacttctgccttataaattttaaaatagtctagagcctcgtctttcgttttcaacaagtacacatagcaaaatctagtagcatcatcaatcaatgtcatgaaatatcgttttccacccttcgtcaacaccccattcatttcacaaagatctgaatgtaggagttctagtggtgccaagtttctctcctcggcagccttgtgaggcttgcgaggttgcttcgattgcacacaactatggcacttagaacctttgacaatggaaaacttaggaattaaacacatgctggaaagccgagacatcaagccaaaattaatatgacataaacgtgaatgccaaacattagcctcatcatccacactgccacaaatatggttcacagacttattgcagaaatcagaaagggaaaagcggaacaggcctccgcactcataacctttaccaataaaatatccatgtttagacacgactactttattagactcaaaaaccaacttaaatccgtctctagtcagacgggagccactaacaagattcctgttgatagaagggacatgctgcacgttcttcagctgcacgatctttcccgaagtaaacttcagatctaccgtgccaacaccatgaacagaagcatgtgacccattccccattaggacggtggaaccccgtgcgacctgataagaagaaaacaatgagatgtcagcacaaacatgtacattggccccagtatcaacccaccaattagtagattgattaactgaaaaaacagtaggtaaattaccatacccgcttccatctccagtgttgccaatggtcacattagcagacttagaagtctgccctgcaggtgccttca

SEQ ID NO: 3887 - DNA, 1457 bp, Oryza sativa
ggtggtgtgaccaaccacccgtataggcgaagacactagttgcgcgcggatgagggcaagccggtggtgatgttctgactgatccattcctggagcgtaggagataagcttaaagccatgaatcccttttatgcatatctggatctggatcctaaagaacaaacatataggatgagtagtatctgatataaatataatactcgaggaaaatttaagtattttaaaatatttataaatatgtatttctcctcttgtcaattttgatttctccgagcagatgactccttacgtttaaacactctgcctaactagtcatagtccccaagcattgggagtcggcttaggcacttcccaaacatgcatatgagggacatgagttcgtcattaatggaacaaagtttcacggatcagagtttactactcgggtacttttacaattattaagagcagaaaataaattatttatctctatgcttgatttattccgagtaatacttagcaccttgcgttactcggtccatccaacgagcccccggtgctaggaatcggctcaatggcaactatccattggcaaaccaaacggaaatcataggaagatggaactccataactcgataggcacttttgtactcagattatgtcgcgagcaatcaagataaatagtatgaaaattgttgaaaaaatatgatataacatctgtagccaccgactcactagtcaacggcaaaccagttgatgtagtgaggcagagaaaaaagaaaatatcatataaagaaaatttaatgatgacttagctttgtaatattccccttggtgatggcagaggtggccaatgtgggaacaaagtcgtccatcaataacaataaagacaccagttggcggcggcgggagcaagccggtggtgtagatgacgaggtccatcaatggcggcggagtccacaaccgtataggcgaggacaccagtcggcggcgacggaggcaggccggcagtgaagtcgaagacgcccaacaacgacggggtaataggccaaccgtgtaggcgaggacaccagtcggcggcaacggaggcaggccggcgatgaagtcgtagacgcccaacaacagcggcataataagccaccgtgtaggcggagacatcagtcggcagcggcgaaggcaagtcggtcggtgaagccatggacgcccatgaacggtgatgtgaccaaccaaccgtataggcgaggacaccagtcggcggcgacagaggcagaccggtcggtgaagacgtagacacccaacaacgacggcataataaaccagccgtgcaggcggagacaccagtcggcggtggcgaaagcgagccggcggtgaagacgtggacgcccatgaacggtggtgtgaccaaccaaccgtataggcgaggacaccagtcggcggcgacagaggcaggccggtcgatgaagacgtggacgcccatg

SEQ ID NO: 3888 - DNA, 722 bp, Oryza sativa
tcctgcagccccaagtcgatgaagacgtagacgcgcatcaacggtgatggcaaaatccaccaatcatgaagatgaagaaaatagtcggcgacggcaaacgcatccgacggtaatgatgattagcggcaacaaagatagccggctatggtgacgaagttgcccatcaacggcagcagtgtaggtatgttgaagaggcttgacaggatgttgatgaagatgacgatgccggcgatccaatcaatagcggtgtagcagccgatgataatgacgaagacgctcatcagcgtttgcgtagtaggtaacccgtgaaggtgaaataataagtcggcgaagacataatcagccattagcaatagcggagatgtcagggccgatgaagcagagatgctagtgatgatgtcagtgacaataatccatcaaactattgagaagatatcaaagctcgagtagtttccttgatgcgagcgtgtgcataacgaagactgatgcaacgccccttgatttataaagatgccagtagaacttggtcttgtagctgttgcagatgcttcacttggaggaaagtatatgctgttgtccaactcaacaaaactgagctgattggttgataactctaaactcccggacatgtagattaaatctcaaacttgatagttgaaaattttagagtaaattgtggcagcgtctagaaatccaaatgccggtgtataattggagtcgct

SEQ ID NO: 3889 - DNA, 659 bp, Oryza sativa
ggggaatgggcccgtagattcagagtgtaccgatccagattctgataagggtaagcgcgggaagattccttcaatggtgatgtggtacctaccaattaaggaccgcctgaagcgtctgtactcaaacccgactgatgctgagttgatgagatggcatcaagagagctggaaaatagatggtatgattcgacatcccgccgacgctcgccagtggaagacatttgatgcaaaacacccagaatttgctaaggatcctaggaatgtaaggtttgcgttgagcactgatggaatgaacccgtttggtgacttaagcagctcgcacagcacatggccagtccttctcacaatgtataatcttccaacatggatatgtcagaaacgaaagtacattctactcactatcctcatacaaggtccaaaccaacctggaatcgacatagatgttttccttgagcctttgatggaggacatggaggagctttggaaagaggggttacgactatgggatgagtttaagcgggagcacttcaatctacgtgcgatcatattcgttaccatcaatgacctacctgcaaacttttcattatctgggcagattaaagggaagactggatgtctgatatgtctggagaaaacttcatacaaatacctgacgtcgt

SEQ ID NO: 3890 - DNA, 1094 bp, Oryza sativa
  unsure (1)..(1094): unsure at all n locations
agaatagcagcagcacaatgcacaagcatcttttctctgtatacattgcacttcaatcccattgtgctctgtgactctgtcctcaactccacantctgcaaaaagggcnntttggtgncatctgnngcactnntccatgcaagnaacttactctaggcttctcttgtttacttttttatcttggacagatcagctgaattctgtttgtgaggagcctcataaaaaaaataccacttcaatttggaaagctttatgaggagattaattaattaactaaaattgctatggatgacaaaggagataactgaatcagcagtggcatgaaaaaaattgctggtcagagccaagctgcagctgctgcagggtttgtatagtgttcttgtattgtacagggttgagggttccaactccctttactagcactagttattattacatgatggaacatgtcatcatctcatctctgctctcttatacttaattaattaactctcttcattaattaatcactcgattaagctataaactctctgggtgaagcagcagcatccatccaagaaaattaagaagaaatgaaacttaattttccagggttaatcattaattgacccttcttgttcttgtcttggatggatcagcagctctagctagatggatacttggatagctgacgccgccggcgatggcgatggcgacggcgagcttcaccttggcttgaggcggtccaaggcgaggtaggcgatgacgcggtagccgacgaggaggagcgccatgacgcagacgtcgacccagtggttgttgagcccgacggccttgatggccgggaagtcggcgacgaggcagcgcgcgccgccgccgccgcagtcgtagtgggcggcgccgtcgccgaactggatgccgatgaggaggcggtagcagtagaagctgtagttgagccaccggagccagccgacgaagggcgggatgtgctggacgtagtagccgccggcgatgaggaagaccatggtgatgacggaggcgagggtggtgccctgcttgacgtccatgagcacggcgccaatggcgagcccgaagctctgggcgaccaggacgct

SEQ ID NO: 3891 - DNA, 767 bp, Oryza sativa
acttattcggcacaactgagtttggctataaaccaaataaacccttaatctcatgatgcaacacatgcacatgtgggtatttttagaacaaggctaataatacaaccaatctgttggctataagattccttgtagtcttttcttagcctacccatataatagttagctctttacaattaatacatgacccacttatctctctcacttaatttcttagttcttgtatccaagacggctgtaagtttacaggccgcttctcctctctctcctctcttctcttctccacctcagcatttagctggcttatagcctactattatatatttgctcttagtggtaaagtgcgtacgctagtacagaaagtgcaataggtgcactatacgtataggcgtaagtacacgtggtgtgcttaggcgtaagtatatatgatgtatgtgcgtcctatctatactcacagagatgtgcacggccaactaatctgtactcacatttccaccaagattaatgggaacttttactaaccatagatagtgcctaaatacactccttcctagtccaccctgagaaatttattatcacttccaaaaagtattaatatctgtgaaagtacgtgtaacctagtggttacattaggtcctaggttcgactactcatgagagcaaattttccaggatttaacggctttgtgtttttagtggtagatgacgtacctgtcgacagcagacacctatggtgacgtgtgcgtgcgttatgaattttttaggatt

SEQ ID NO: 3892 - DNA, 740 bp, Oryza sativa
tgatgatttgtttgatcagcttaaaggtgccactgttttctccaagatagatcttcgatcagggtatcaccagttgagaatcaaagaggaagatatacctaagacagcttttaccactaggtatgggttgttcgaatgtactgttatgtcttttggacttaccaatgcccctgctttcttcatgaacttgatgaataaggtgtttatggaatacctagacaagttcgtggcggtctttattgatgatattcttatctactctcgaaccaaagaagagcatgaggaacatcttcgccttgcattggagaagctacgagaacatcaactgtatgctaagtttagcaagtgtgaattttggttgtctgaagtgaaattccttggtcacgtcatctcagccggaggagttgccgtcgatcctagtaacgtggaatccgtaaccaattggaagcaaccaaagacagtttcagagattcgcagtttcctaggcctcgcaggatattaccggaggtttatagagaatttttccaagattgctaagcccatgacacgactgcttcagaaagatgtgaagtacaagtggtcggaagaatgtgagcagagttttcaagagttgaagaatcgcttagtatcagctcctattttgactttgcctgatccaaagaagggtttccaagtgtattgcgatgcatccaaacttgggttaggttgtgttctgatgcaagatgggaaggtggttgcct

SEQ ID NO: 3893 - DNA, 5284 bp, Oryza sativa
cctccccgccaccgccgccgccgccgccgcgccctgaccaccaccaccgcctccttcccgcgcgcagatgtccagcttcaccgccggcgcaatgtgccgctcgtacgccgccgccagcttccccctcacctccttcagctccgcctcactccccccgccgttcgccgccgccgccgccgcgccaccaccaacatccccatcaccaccaccgccgctgatctgcggcgcgatacctgcacgagcaagaagagagagaaaaaaaaaaaccgcacgtgagaccgtgagctcgacaagtgtcccgccattgttcacaaaagatttggaggtgcaatacaatcatgagcgcgcgcggcgctgtcgggcgcggggaacgcaaatgcgccgcgccatgattgggcagctgctcgatcgatccatcgatcgagactcgagagtgcgccaagctaagtgtgtccccatccatgtcccctgatctccacccaactaagctattgcggctgccgatcgatgccggccggcatgccgctatcgctcgctcgccattgcgcacgcaatgtaatcaaacactaccgcgacacgaacgcgtgatggcgatcgatgatcaagtgtgagggctgttcagattaatgctattttaaaatatacattttttttaagttatcaaagatatgcatacatttattttttttaactttggtaaatatataagaaatccagctaaaatttcagcaatattattaacttactaaaattttggtactagtttattttgactataatctaaacagtctataagtattaagtattgctatcgtcaggggacccatggaacggcatgcgcgcaccgtatcaaggacacaatctctcaaacacgttggctcgtgcttctcttctcagtgctcaccaagctcaccctcctctctctatctctgcttatgcttttctttttctttacttattaaaaaatttatgagcccatggtatgtgtaagtataaattgtttgattattgctttatgttcacctttttgcaaggtggttaactgaacaactgtggggagaattatatattatgaacaagtgttgaaggatctgattcctctagcttttttatatgggacgaattgtacgggagaataatcctgtgaggccctgtttggaatgtggggaatttttcgttttctacaggaattgaaatgtttgcttgtgaaatttccgcaaaatccgtttatttgagggttaattagactctgtattttcttcagtggttggactctgtttgcagaaaggtaccctcacagaaacaacacatggtataattccaattccaaagtataaccaatgaaaaaaaatgctaataaaatggaatatgccatactgtgaattgagtccagttaaccacacatgtatgtgacacaaattcttatagggcgacctttcaagatcactgcattacttttcaagctcaggacttttagctgataatagtggtgactaagggctacgagcctatgatcaagtgtatggtacatgttctaaatgtcatggagatgccaagaactgatggttgcaatgcttgaaacgattttaaaaaaaaaggaattgatgttgttgccgccatgttgggaggcaaaggggagaatcctaatgacaaactactgaagggtgaaaatctacacggatgctcgtccatcgtttacttttcagcttataagtcgctggaaaaaaataaatattaaaaacttatttttagagttggttttgggaattttcatcatagtttatttttcaacttccgcttttatatcgctaagaacatttataaaagttttacctctaaattattctttgatcacttataaaccgttacgggcttataatcagctataggcgaaacgttgaaacacaaatgtgtatcatgatttttcgacgatataaataaaccttctaaaaatctatgatacaaattcttctgtggtaatttcgccgatttgttggacatatgacgtgagcgttaggaatagagtgtcagatgccaatatgccatgtgaattggagagcatcacaaaaagttagagagagagaggaagagaagatgaggaggaggagagggaataataatggcgatcgaggagtggggatcgatggcgtacgtaccgttggcgaggtcgagcatgaggtcagccgggttgagcgacagcggcgaggcgaagccgactgaggcgaagtaggagagcgcgtcagcggcgaggccgtagtagatggggcagccgtcggaggagaggaggaggaccttgtcgaacatgtggtagagcctcgacgacggctggtggatggtcaccaccacggtgcggccgccgccggcggccatgcggcggagcgtgccgacgatcctggcggcggtggtggagtcgagcccggaggtcggctcgtcgaggaggaggaggctggggtcgacgagcatctcgagcccgatgctgacgcgcttccgctcgccgccggacagcccgcgcacgccgcggacgccgccgatcatgctgtgcgccaccttgccgagcccgagctccagcatcacctcctccgcctgcgcgcgcttctcgccggcgccgagcgcgcgggggagacggagcagcgccgtgtaccagagcgtctcggcgacggtcaggtgggggtagagcacgtcgtgctgggtcacgaacccggtgcgccgcttcaccgcgccggagaacggctgcccgttgtaggtgatcttcccggacagcatcccccgcccgccgccgccgccgccgccgtgccggccgcccagagcagtcagcagcgtcgtcttgccgctccccgacggcccaagcatcgccagcatctcacccggccgcacaaccccggacatcccgctgatgatcgtcttctccttcgccactgccgccgcacccttcttcctcctcccctccccgccgccgccgatcgccgacgacatcctcgcgcaccaccccgccgccggcttgccgatcttcaccttgtacaccacctcctcgaactgcaccaattatcacaaaaaaaaaagcatggtcacgtctcatcaccaacctccctcatgcacatatgtcaacatgctcatgcacgtagctctacaagtacgtacgtacgtacatacatacatacccctccgtcccaaaaaaagatcaacctagattcgtaactaggaattcattttttttgacagagtagtatatatgtatatatacacaaatgtgtacttgtctactcaccttgaggacaagagggtaagagttggcggcggagtggtggccggaggcgacggaggggtgacttgaggtagtggggtggacgatggcggcgccggaggtgttggtggaagaggacgacgcggcggtggcggtgggagaattggtagaagaagaagaagaagaagaagaagaagaagaagtggttgaaggtggagaactgaagtcgcggtggtgaccgtcaccggcgccgcccccgccgctgccagcgggtgtctggtggtggtggtggcggccatgatcatcgccatgcaactcctgaggcggcatggcgatcgatcgatggatgaaaatctctctgtctctcgggtgtttttcacacacaagccactataccaacaccacagctagctaggctgtgggattggatgctatactactacagctgcagtagtggcagctagtagctagctagcttgatcgagctgagttgacacacaaccttgtgatgatggtgatgatgacgatgttgaaggagaagggatgaaggagagggctttgccttctcctactacttcaactaggctatctcactcccaagtgaagtgctgtctggtttttggcttggtgattgcaggtatatttatcatagctgaagaggagagagagagagagagagagagaatgtgaatgtgtttgtgtgtggagtgggggtgaattggcaaaggcaaagaaagaaagggagggggtaagatggacctaccaaatggggcaggggagcaacacttgttgctgtcactttttttattggctagctaggatggcaattggcaaaccctataaatttattgttagttactacccagtaatatatgtgtgtagttttttttagtgattttgtatatagttgattaacaatttgtgtggcgtattatctaaaaaaagaacaatttgtgtggtgtgcaaggtaacacaccactagatgcatatgctgatgatatccattagaagttacaaatggtggtggtagttattgttgaaacctgaaagggagtttatatcacccatatggtggttttgtagctctagcatggtgtggactgtggatcatctcactttcttttcaaagatattagagaaatattactgatgtggtgtagtgcgcataatgattaaactgggcagttggtttgcaaatgggatctaaatgtaaatctggttacaacttaccccaacaaacaaacattctagtaattaggtatatttacacgggatcggaaatgtttgcaagattgcaggaatagagatacaacttgtagcccacaatggcagccatacacaagacaacaatgattaagatggcaggaaagtgatgtgagttaaaatttttttagggaaatgacaaattacatacacccaagagaaagaaaggagagaaacaaaaatagtgcgatcttgaaggagagaggaggaacagagaaacttaaactagaaaaagaaaagggaagctctacttgttttatttgtgtacttgagactaatgaaagtcatgtgtggattcgcacttaatttgccaccaattttgctgcttaggcttcatcatgatgtcctgccattaattgttccatatttaaatagatatggtagcatcataactgtcacttatgctaacaacgttattaaggcttagttcgaactagattgttggctcggattttaaacagcacagtaaacaagatagcattagtattattgagtatttttcaaacttaaaaaatagatttatttatttttttaaaaaacttttatatagaaaatttttacacgaaacataccatttaattagcagtttgggaaacgtgctcatactaaggccgggtttagttcccaactttttcttcaaactttcaacttttttatcacgtcaaaactttcctacacatataaactttcaacttttttcttcaaacttacaattttaacgtagaactaaacacaccctaaacgagggagagaccaaacgaatagtgtcagagaagtggg

SEQ ID NO: 3894 - DNA, 1540 bp, Oryza sativa
caggcgcttctagtgaagaaacatggcgcacaccaagtgacccgtttccaatggaaataacacaagtcgccccccgcgatgatgatccggactacatacctatcgaacaggccgtaagtgctgaaaatcgttagccatgtattattccctaactatgatgtgacatgaacctaatggtgtatagagttacctattctgtgcagatggtagtccgacgccgctcgaaacgtaaagccgggaggaacaggacagagcaagaagttgagatggacaccgctacgtctgcacctgaacgtacggagacatctacaagtgcaggcgggagtgggaaaaaaagacgtggtgagagaagcaagaataaattaaccaaggaaacttacaacgtgattgctctcgatcaggatgggaagcccatcgagccaccgatagtgcggtccaagttcagcaacgcctgtggcactctagtcaggacgcgttgtcccattaatgtcaagttgtgggaaacagtggacgacaacatcaagacacttctctggaatgagttgcagaagtattttgtgttccctcctggatcagaggtcagggggagagattacgcacttaaaaagatgggagatcgatggcgacagtggaagtccgatctaaatcgggattatgttcagaagaatctcccaccgtttacggattatggacatatatcgcagtctgactgggacacgtttgttgcggatcatacaacagctgaagcattggctttgaggaaaaaaatgtccgagctcgcgaagaagaacagatatccccatagattggggtcgagcggatacgctggtcacgtcgatcaatggcgggagatcgagcaaagatttgccgcggccggtaagcccctgctggtagaccccatggttgaacgtagcaagaactaggtttgggcgcgcagcacaggtcaagtctcggatgagggagacatactattcgagactccagacatagaagaagtgactactaatttgcagcagatagtcgagaaagaaagatcaggacaattcgtcccacggagggagcgagatcagcttactgcggcgttggggacggctgaacactctggacgtgtaaggggtttgtcctcaaagacaagttggaaggtcgggtttccacaagacgcacccagttataagaagagagaccaatacaaagaaccactatcggacaagatctatgcgcaagtgaaggaacacttctactcgttggcagctgaaaacccgacagcatttccaaggttattccctgatagccagcaacccacacaatccgcacagcaaacaactaatgtacccagcagtgtaggctcagtgcagacaagtaccttccctgtggatagtataactggaccaactccgtgcagtctcgtcgtaccaatcggccgcgctggaaagactaaggaggttgcaacgggtttagcgatacccggacgtcaattccacaacacggcatccctgaggattacgcaagggtacaggtcgccaaggtccatagcgaccac

SEQ ID NO: 3895 - DNA, 10258 bp, Oryza sativa
aagttagaaaatcagagtaaaaaggtaagtaaataaagtaaaccaagctttgcgagataagttaaaacagttggaaacgaggtcacaaattttgtaattttgaataactggtttcaaaagaaatgaaagaaaattataaaaccaacatgctaaatttattttattgcagcaagattaaataaaacagtgttgtaaaacttttgctggtaaatgagccattagtacagtaatagatgtacagtactaataacactggaataaatttttaatgagaaccattaaaagagattatgaagtgcatgtgccattagtttggtttaattaaaagagaaagggaggagaacagttctacttttccaatatttttagagggcttctatggataaccatttggcataacctagggtcaacctggctctgataccaacttgtcacgcccggaatttctatccaaaattccaaacgcttacatgtgtgtgaaccctcgtccaggaatcagccgaggcacacaataacaaattgataatagagtataaatattactctaattaataagcgaataaaatgtcattacagaggtagatagttcctctcaatcaataaaaatctaagcagcggaaaataaataaacggcgcagacggctccactccacaggcagcttgaccaaggctacacctaatcctccacaccatcagcctcattgtagaactcttcctctgatgaatgattgcaaggtgagtatatgacatactcagcaagccacgcagcaaatatgcaagtgcacaggataacaaaggatggcataatagggtttcatttgcaaaagcagcatttagcaaacatttgagaatttgataaaacagttaagcaattaaacaatattaatccaacgctatacaacataccctgttgtataggcccaaccattctgaacaaccatcccggctgcacagttctatctccaaaccaggaatgtaccattccaaaccaggagctaaacaaattattaccagtttaagcatcttttattatgatgagaggtgtgagactaatcacgaaagacattgttagacccgcccataaccgcgggcacggctattcgaatagttttactctgatcagaggtgtaccactgtacccacaatacacaaccccacatcatgtcaccatgtgcctcaataccaccacggtatctcggaaaggagttgtgacaatacccctcgcataacacaatccactgcagcgcaccttcctggatcataatcacccccttataaacaaggcatggactccccagcgacccccgtgggcttatctccgccacttctcagtctggtgccccgcaatgaaccatgctatacaaaagataaagccgttgcccatgctggcttgtggttggcacgataaatgtttcacaaccaaaactcgtgaaccggtccttaattgccatgagcacgaccatcaaaaccatgtgctcacaacccaccattaccaggttttagttggcacattaattaattaactaatcacgattgaccatcgtgaactatcaataagccatcatgaaataatagtgagtcattagttatcccataaatgtactaatgtttctaagcagggctaagcaattatatctaatatctagttgaaccaatataaataaagctcaactagtcaaattaatataacccaaggtatcaaggaataaggtaatcaagtacgaaagggccataacaaagaataggtcaattccacccaatgacattcgaaaatagatgcaatagttgaatagaaacaatagctttaaataggatcaacatgctcaaagggttgtttgggatctgtgtgacttgccttgctggccttggaattcttcaaactcttcttctgcgaaaacggactctccggaaacgactgaatctaagcagaaaagagcaaaatcaccaaaacagcacataaacaagcatgaacagtacatgtggatatttttaatgtgtagatctcaattttagaaaaatttagagacttgaaccaactaaatcggagctaagatgaattagttatgaatttttaaagattaaatcggattaaaacacttaaatcggtttaaattgaattatgacgcaataatgaattatttttgaaaaggaaaaggggatttattgcgtcagcggctagggtttgggtggaccgggcgcacgggcggcggttcacacgaacggacggccgagatctaaccgatccaagatggacggccgagatcgatcgggtccacagcggctcacggcggacggacttgatggcgtcagcgatgacgtcaccccggcggcggcggctcggcggctgggacggctcaggcggcgcacgctcgccggcgaacggcggcgcgaggacgctaacaaagggcaccaacgggtaacggacggcgcggcgaactcaccgacgaccaaaacgacggcggagaaacaacggacggcgacggcgacgaggaggaagcggcgaagctcttcgggtcgacggcggcgatgacgctccggtggtctccgacggcggcgaagggacggacgaggacggcgacgacttggcgaccacgttgacgtccttcccgagcgacggcgactgctgaaacgacggcggcgcacggctggagcgacggcggcgaaggcaaagctagggcacacggcgctagggctactccggcgacgagaggcgaaagcgagggtggcggcgagaagagaagagcacggggatccttttaaaggggctcggaggcggcggcgaaggcccacggcgacagcaacggcgaaggaaactcgcggcttggagagaggaaagccgatccgattcgaactcgaatcaaactcattccaaaccgattgagccaaagattccaaaggagaaaaggtagaggagatcccggagattgtttcccctctaacaaatcggccggagaaggaaaggaacagccggattggaaggaaacagcggcggcggctcggcggcggcgcgctagggtttcggcccgaggaagacgacggctccgacaggcgggacccacctgtcagcgacagcgagggcgcgcgcgcgcggctgactgggccggctgggccgaggagagagaagagaggttttgggccgactttcggcccaaagccaaaagaagactttttaaaacctttttcaatttaaattatttcttaaatgcaattccatttattacaaatactttcttagctcaaataaatcccagaaaaatctaggaattatagaattaagcaaagtatttaatgaaattttatctggcccaattttatattggaatttattaattaaacttatattttcttttcaagacttttataattatttctaaaaattccaattaaacaacaatttatatattttgaattttcagggtgtgacaaacctaccccccttaaacagaatctcgtcctcgagattcggaagaactggcgaacagatgcggatgagctgacttcaattcatcttctcgttcccaagttgactcttcttccgagtgattactccattgaactttgcagaaacggataactcgattcctggttcttctctcatttgtttccaagatatggattggtttctcaacataagtcaaatcctcttggacttctatctgctcaatattagcttcttcggtaggtatccttaaacactttttcaattgcgacacatggaacacattatggactcctgccaaagattgaggtaattctaactgataagcaacctctcctcttctactgacaatcttataaggtcccacaaaacgcggtgccaattttcccttggtgtgaaaacgatgaactcctcgaagaggcgtgacacgaagatacacatagtctccttcttcaaaactcaaatctctacggcgattgtcggcataactcttatgtcgagactgagccactcgcaatctttcttgaatgatctttaccttttcttctgcttcccttaggatatccgtcccgaaaacctgacgttctcccgtttgatcccacaaaagcggagtgcgacacgcactccgcttccgaccatacagtgcttcgtaaggagccatctgaagactagcttgataactgttgttatacgagaattctgcatagggtagattcttatcccaacttccactgaaatctaaagcacaagctctcaacatgtcttccaaaatctgattcaccctttcggtttgtccgtctgtctgcggatgataagcagtgctaaagttcagcttagaacccatctcttcctgaagtttcttccaaaaatttgaagtaaactgactgcctcgatcagacactatcttcttggggacgccatgcaaacacacaatccttgccatatacaattccgccaagcgacttccggaataggttgtctttaccggaataaaatgagccactttggtaagtctgtcgactatcacccaaatagagtcatggcccgatgacgttctgggcaaaccagtgataaaatccatacctatttcttcccatttccattcaggaatcttcaaaggctgcaacaaaccggcgggtttctgatgttctgccttgactcgctgacaaacatcacatactgctacatattctgcgatttcacgcttcatacttgcccaccaaaatctttccttgagatcctggtacatcttagtactaccagggtgaatggagtataaagtatcgtgagcttctttcagaattgcatctttcaaatctttgttgtcagggacacaaattctttcacccaaccatacagttccttgctcatcctccaagaaaccaatagcttttcctcttctcatattcttcttgatctcttgaatatcaggatcattaatttgggcttctctaacttgatcaattagagtgggcttcgcttctaaggctgcaacgaaactgtaacgccccgattttcgttcgggattaaaaatcatttaataatgcatttcctagaaattgaataaaaagttaagcaatttaatcaagtgaaataatgggagaattaaaattttcccttaaaaatcattggccgggaatattttgtaatattctttgtgccctaatgtactctccggaattttccgtgaattttcggagctcgagaaatagttttaaagtcacgaagatcatttaaccaattaaaataaaaagaaaacaaataaaatttcccccttcctctctttgggccccttttcggcccaagtcttctttcctctcccgcggcccgcgcgccttctccctctctcgggccggctcccctctctcttggcccgctcacaaaagtctgttttgcgtcccttcttctctcccttcgccgacaggtgggacccgtggaccccacctgtcatccccttcctccggctccaaccgccgccatggccgcccgagcctccccacgtcgccgcaaaatccggcgccctcccgcacccgagctcgcatccaacgacgtggacacgaccccctccacgtcctccaccatttcccccactcaccccgcaagaaacggcgccggtttgacctccccacgagctccacttcacctccccacttcgccggccgattccgccacgtccggcctcgatcccgccttcccgagcccataaaaagcatccacgggctcccttctctcttttccccaatttccccgagctctcccgtgccacaaatcgcgctcgcaccgcgagcccgggcgccgccgctttccggcgagctccggccgtcgctcctctctgccctagccaccgccgcgtcgcgccgccgccgccgctagcatcgccatgccttgctctaccccggcccccactccatctccctcctccaccgccggaaccaccttcccatcgcgaggccgagccactaccgccacacaccgccttcagtcggccgcgtcgcgccgccgcgccgcaccatcgccgccgtcgcgctcaccgagcccgcccgcacctcggccgccgcttcattgccgcgaatcaccgccggagccttttttctcctcgcgcgccggtgagaccctctctcccctccgtctccggccggcaattcaagccgccagggtcgccttcccttccctaacccctctatgctctctcctagggtgccgccgccgcccgttcgcgcctcggcatcaccggtcgtcaccgccgttttctcccttcgcgccggccgccgtgttcgccggtgaggaatcccctctcctccttcctttcctctctctcccatgggcgccgccgtcctccgcgcgtgcgccgtcgtcttcggccgccgccgccgccttcgtaccggccgccgccgtctcccgcgctgccggtcaccgccggtgaccgcgcgtgccgccgccggtcgccatggccgccggtcggctttgaggccgagccgagcccggccggcgcctccctcgcctccccttgagccactgcccggtggggcccaccagccggtggaccacccctccctctcctttcccctatggagccgctgccagtggggcccgcttgccagccgcccctctccctttcttagtgccgctgacgtgtggggcccgcgtgtcggcgccggctgccccttgctgacgtcagcgagatacttttcctttgtaaaaataattaataattgcgcaataaatcgagtttaattctagaaattcattaaaatggctcaaaaccttctaaaattcatatctaattcattcgaactctgaattgagccattcaacttgcaaaattcatctaaaattgagctctacatgtttgtttactttttatgtactgtttgcttggtctttattagagtttttcctcgttttgcgtgccagcgtgtaatttccgccgtttcggaagattgcgttcgcaaggataagagttcagaagatccaagtgaagaagcaaggcaagtcacacattccccttgagcatgttgatcccaatttacaaatgttttactgtttgcaaataaatatgcatattttgctaattacatggggtcagggtattacctatctgctcgcttgtgccatgtttacttgatatctgttctttgtcaactttgggtaatgaatcgactagctcatgttacttatgtgacctagctagaactatatgcttagccatgcttaattaccactagctcagttgatgggataattgcagtattagacattctagtatcttgatgagctgcgtgctcgagacatctggccatgcttcatggtcgtaattatccaactaaaatgcaactgaatggtgggctgtgggtgcatggttttgctagtcgcacccatggcaattaaggaccggttcgcgggatgccctggaagaacttatcgtacttaccacaagccagcgtgggcaacggctgggcttgtagtgtagctttcctctagccgacgcatccaggcaagggtgggcgtgatggagtttggatgggccctgcgacggcctatgcggcttccggattcacctaggcacgagaggggactgcccgctgccttgcgaggagtgggggtgaaacctgaggtgtggtgtgcttggttagagggggttatgcgaagggtcctgtcacggcctctttccggtatgtcgtggtggcatgtcggcgcacggaaacgtgtcgtggggctgtgtcttgtgggtacagttgtacacctctgatcagagtaaaactattcgaatagccgtgcccgcggttatgggcggtcgaccagattcaccgtgattagtcccaccttaataaatcgacccaatgcactgtagttcaggtgggttggttgggcctgttcaacgtggtgtagcgttgatcagtggagattcaatattactttaattactcaacagttttactgtttcgctcaataaaatgttttacaaccgcctttatgcaaatagccacaaaccgtccttgtgttccccttgcacgtctgcatcgtcggtgtggcttgctgagtacggtggttgtactcagccttgctattattcccccttttcagaagtgtagtgcttctgagctgaagatggagttagaggaccaaggctcagaccccagttgagttctgcctgtggagtggagctgaagccccgctaggatcgcctttttccgctgctgctgcttttgtttcggtgtgaggactaagtgcctcttctgtaagtattttacgcgttatttacgtttggaactgtttattacttgtcgttttgtgtaccctggctggtcctggacagggatttaatacacaaaatagtctggaaattcgggctaaatttctgggcgtgacaaagtggtatcagagccaactcgactgtaggttgagccaaatggtcaaaccctaaggacaagttttctgaaaaccctacttgcaaattgtctcctctcgcccttcggcatttctttgtgaaacggtttttcaaaattctcctcccaatctctccaattcttttagttgtcaaacctagaggaccagctgtcagcttcatgtctgttcggaagtcaagtcaattcgagcctcaagcttcgtgcaaggagcgagaagatcagttcagagtcgtcgttctgcgaagatcaagtggagttttctcggagatgacctaaacccaatctttcccagaagagtagttccgttagctttctagatcgtgtgttgtttgcttgtgtgtaggggtatggtttgcatcattggtggggatgcgaccatactaggttgtttgcttaagcaacttgaagaataaaagtctactcacaacatatcagtaggcaagtggtttagtaccttatctttagcaacccctctcttccacctctcttccgtcctggcagcggatggtcagtgtcagagataagatcaattaaagtcaccaatcaatggttcagttgaaagctacaaggtatcccagtgccagaagaaccctgctcgtgatcaacatttggtgtccaagattagatgatggatgtattgatgcgggagatgcaaagctcgatgcaaggtcaagtgtagcggaaagaactccagcagtagtgtgttgcagtcaagagtcagtgtgtccatgagctaaatgagagtcacttttatgtggaatttcctatcatcaactaaggcttaagttccaaatcttgtcgggatgaaagtgcatcgccattgcttcaatttgatggaccgatgaagtttcagtcttcaaagtcagggcatctgtaaatccgagaaatgttggtcattttttcaaggacaacagttcaaaggttctcagtcaggcgaaagtaagactacccactgtaaggggggtaggtctcagagatgagttttggtttacctcgtcggcatttcacttgaatgttcaacccagtgcagcaatttggttagtaattaaaggagtccgttgcgagccactagcagagtctcccaatctcaagtcaacaggttcaattctaatgtacacccgtgaggccaggtcaacagttcagcttagagaagtagcatcagggacgattgtagttcagacgaaagacttgtcaagcaggtttcctggaattacttgtcattcgagccaggaccagttcaagcggacgtaggaccaatgagttacaaatgccagatgcaagattcaagaacaactccatccttctctagccaacttggtgaactgtcaggttatcaagttgctagcattgacagttcgacccaagataagtaagttttatgagtacgggcagtcctagtctgcgtcagtttgagcagaaccaatcaattcaggtttgggaagcaacgggacaacagtgttgaatccagccagatcgctcgtataggtttcatcagctaatcggtcgtgttgggtaccagaactccagggatctaatccgatgaaaccagtcagtcagtcagttcgaatcagaaagaggcagcatgtgtcagcagatcagtcagaccgtccatcagcaccggctttctttctagccatcccagaatctcgggacgagattcctgtaaggggggtagatttgtaacgccccgattttcgttcgggattaaaaatcatttaataatgcatttcctagaaattgaataaaaagttaagcaatttaatcaagtgaaataatgggagaattaaaattttcccttaaaaatcattggccgggaatattttgtaatattctttgtgccctaatgtactctccggaattttccgtgaattttcggagctcgagaaatagttttaaagtcacgaagatcatt

SEQ ID NO: 3896 - DNA, 583 bp, Oryza sativa
gcatcgagggaaatgggcttgatacccacctaaggttgcataatagtggaaacctgtccattatgatcggagatcccgtgaatttggatggtgaaacaaactattgtgtgactgaagagacccttgaaaagggctcattttcatgatgtgcttctcttctttcctgcatggtaggatggcttatgtcttaatgtgatccgagtggcttttccaagcagagatgttgacctgcagaacatcttagaaggaacacacctatatgagttcgactgctagtcacagtctatgagatttgggtgatctctagatactcatgaaaggcctggagtatgacttataagctccaacccgagggaatactaatggttgcctagtatcagttatggaattgagtgaaacctaactgcacaagactgacaattcaaggtatagtccattgttcagttgtggtcaggtgtagctccttttctaggtgaaagttcaacttaacagtcttcaccgaaacactggtatataaaagctgctatggaatagagagcattctcatgagccttgaaatttggtggggattgttagatttaat

SEQ ID NO: 3897 - DNA, 861 bp, Oryza sativa
gtactgcgtcgcctttcaagaagcactcaattttctttaaatacttagattactggaaggacctagagattcgacatgcaattgatgttatgcacctcgagaagaacgtgtttgatagcaccgttggcacattgctggacatcccgagtaaaacgaaggatggattgaagtcacgtaacgaccttgtagatttgtccatacggcatgaccttcacccagtactgctgccaaatgggaagaccgagattcctcctgcttgttactcgttgacacttgatgagaaaaaagccttctgtaaatgtttacaaggggttagagtgcctactggtttcgcatcgaacatcaggaagctagtatcaatgaaggatttgtccatttcgggatacaatgcgcatgactgtcataggttgctaacggtgttcctaccaattgctataagggcagtcaaaccagtccatacaaaggtggttataacaaagttgtgctactttttcaatcgaatttcgcagaaagtatttgatcctttggaattaggtccgcttcagacatttgccgtcgagactgtatgccagcttgagatgtatttcccaccatcatttttagatatgatggagcatttgatcgttcacatcgtccctcagattattgaacttggtccattatacttacatcagatgtgggcctatgagcgttacatgtcgatcctcaaaggctatgtacgcaatcgcgctcacccggaaggatcaatgatagagggatacacaactgaagaggcagtcgagtgttgtatggactacataaaggatgctaatgccattggaattcctgttcatcgacatgaaggtagattgtctagaaggg

SEQ ID NO: 3898 - DNA, 1560 bp, Oryza sativa
agtctctgcgtgaacccttgtgctacaagcctcgccttatatctcaccacctcattgttctcattccgtttccggatgaaaacccatttgaaacccacggggaaggtttttggaggtgtaggtattacttgtgagaatacctctcttttattgagggaggctaactctgcttcaattgcttccttccatttgttccagtccgagcgcttcttgcactctactatggattttggatctggatcattttggatggtatctgcaactgatgatgcaaagtatatgtggacaattgtagtcttacggttgaatgattctccagattcaacatagtttacggaaatttcatgcaccccagttgacggctcagtatttcccaatatgaccgcgtcggggcgttccaatgtcccatcattataaatttagtgcactgttgatgtgggaagtggatctgatgaatccacttggtgtctctcaacttgaggttgagtttcatttactgtgtcagaggattctttcctatgtttcctcgtgcgctttcgaggatttgccgtacttctcccactctcttttgaggaagggaattgaatagttttatttggtacctctattctttccggcacattccttgcgggaatgtatgattttgtgacacttttactcaagtaaatgagactggcaaattgtttgcagctacctgcaaatcaatgatccttttaacctgaagttcagattctgtggtacgaggatcttcctttagggtgtctaaggcatcccaatttatttctgggcattcaatgtgatacttgaattctccccctaatgccggaaaatgttcttcattgaagatacaatcagcgtaccgggccgtgagtaaatcccctgtaaggggctccaggtatctaataatcgacggggataaatatcccacgtagatccccattttcctatgagggcccatagatgtacgctttggtggtgagatcagtacgtatacagcgcaaccgaatttccgcagatgggaaatattaggaggatcaccacgaaccaattgcaacgggaaagttgtatggtatgcagttgggcgcaattgtattaagtcaccagcgtgtaacactgcgtgaccccaacatgaggttggtaagttacaattttgcaataatggtctggcaatgagttttattctcttgataagagatttggctaaaccattctgagtgtgaacatacggtacggaatgttggacttcaattcctaaagccatacaataatcattgaaagctttggaagaaaattctgcagcgttgtctaatttgattgattttatatggtgttcaggttgatttgctctaagtctgatgacttgtgcaatcaattttgcaaaggcatggttccgtgtcgataagagacacacatgggaccatcttgtggatgcgtctattagaaccatgaaatacctgaatggtccagacaatggttgaatagggccacaaatgtctccttgaatgcgttcaagaaactttagtggctcagcctttattttgagatatgagggtctcaaaa

SEQ ID NO: 3899 - DNA, 2787 bp, Oryza sativa
tgtttgtgttgggccttggctcgtttggctcgcgagctggctcgttatagctaacgagataaaatcctggctcgacttgttaacaaatccaaacgaaccgaaccatgcacgagtcgagtgagctaaggagtgatgagcttttcgtccagccctatctcattgtgaatgatttgataagcttcttgatgcaattattggctattgttccctaattatttatttgcaaatcagtgatcacaaatcctgcatgtttataaggagatgtcgaatctatattatatcggcaagttagcattccaggttgaacatttaaatggcttacaaaatataagcacctagcaaatgagctgaatatttgattgaattttatcaacattgagtacgtaaatatcaccatatctcacatgcgaccgtaccttaaactacaaaaacggggacaggaatgaaggacataagctcttcttttcccgcttagaacagaagaatatctcctaaaaaacttaaaagatgcccttattttgatccattgcatagcacagaaaaggttttctgagaatcgtcgattgcttgcatcttcttcctccaataatcatcgctccaaatgcttcagcaaacaatgattcagaagcaaatgtgtaatgctgccgcaaacaaggcttttcgaatactgacacctgcatggtgaataaacaggagataagggaacatgaaagctatgggcaaaagctgagcttccagttcttaccaattcaggattcaacatctattgtaatgtactgtcataaaatccattcctgcgatccagaaccagaagctggatacgagcacattagttgacagaaacaacatgccagtgcggtaatctgttcctgtcttccggatgtctgatgacccttatcttacctgtaccctgttataatttgactgaggttgcggtcaacagggacagttgggccaagtatgatctttttttcattattgatgctatttttcctggtaatggcaagtatgatcttttggccaagttaaatgtagagactgatgtcgcagttacaacttgcaaactttgcaggaaataacttcttgaaattattcctgaaaaacataaaggcatcataacgatgaaaacctcaaggagattctatttcaccacctatattttttttttgcataatttatttcactatcatattccatgaacacatgttttgtaatagaattcttgtgagaaggagaaaagccatcagaaaacaggtgattacatttagtgtggatttgaaatgaaaaaattccatcctaattacaatatgcagtaacaatcagtgttatatgcgtttgaagctcatgaatttatcaacttaacaaagctattttcctacttgcccaaaagcaactattaaagatattcatcagcatttcaaaagaacgtttctatgtgcatggaaaattagcatcaattatggaaggcgcacacattacatagctaacagaaagatttacgtgttgaacaaagggtgatgataacaaaccaattacggaattcctgatcaatgctcaaagtttcgggggaaccttgtataaatttgttaagctgcccaaacaagagacagcagactccagcattctctgcaactataagaagttagaaagatggagatggagagatggagatggaaaactatggaaactttagctacccaccttgtcaaattttactagtcaagctttgaatatttgaatgtttttttgacgcaaggaatatttgaatgttgatttatgaactgaatgaattaatcgaaatcagtgaaatcaagagaatggacttaagaagcctgaacccaactactcccaggcattttgtttaagcctctttctgccattatctttcttagcctcttaactttctcccatttgtttgcttctgaatatatgttacccaaaagaatataatatccactctctcctggctcaagttcaaagcacttggaagcaacaatttccccaagctcaacattgttgtgcaacctgcaagcaagaagtagagcaccccaaatgctagcatctggcttcattggcatctgcatgatcagttgatatgcttcatccaattttccactacgtccaagaagatctaccatgatggtgtagtgttccattgaagggctaatcttatatttttctgtcatggaagcaaagcaagcacgggcttcttccattagcccggcattactataagcagacaacaaccccacaaaggtcactgcattgggactaatctttgcatcggacatctccttgaacaaactaacagcttcattgaacttgccattcatcccacagcccacgataatcgcactgtaagacaccacatctcgcatccccaaacctctgaacagatcaaaagctctgtcgatccgcccactcttggtatgcaaatccaccagagcggtgcgcaaatgatcatccagctcaatccccacagaccccatgaaactctcagcccacaagccaaacctcaagtctccaagctgcgagcaagccgagatgactgacgagaaggtcttctcattgggcatcacccacacatgaggcttcaacatacgattgaaaacagcaagagcctcccttgcacagccattctttgcgtagcaggcgatcatcgcgttccacgcgtaaagatctttcttgttctccatccgctcgaataattcgccggcagcgtgaacatcgccggagttggcgtagccggatatcatcgtgatccacgagacgttgctcctcacgggc

SEQ ID NO: 3900 - DNA, 1473 bp, Oryza sativa
aaatccaaacaagccataacaaggttgttgtacagcagctcattctggtattcttgaggtatgcgaaggaagaggctttcagcttcagaaatgccatgaactttagctgtgaactccaggagatatgagtaatctagctcactaagcttgtagggcctctctctcatgatccattccatgacctgtggcaataaaaaaacaggagatgcactttcacttcctgaacagcgaagccatggtaaaagaaaaactttagaatctacaagtaatcaacatccattcatcgtgttatattaaatgaagagaagcttgatttcaccatgattaggtaagcaataatccaatcaaaaagtacaaacagaacatattaccagtcaattactcgatgtcaatttcgttcatctctaaatctttatacagacaagcacaaaatatgcaacaagaatgtaggtttatctatctatcaccttcattcagaataacacagatcacaaatctctctaaaaaaacagatcacaattgacacagatgaaatgcagcttcgatagttgatgccaatctcaagcaaagcacagattgcggagacaacggcggcgaagataaatctttgatgggatatatctcagttctcggcctaactcacatcaatcacgaagcgagccgctcatatgggagatttcattggatccgagccaagaacggggactgcgacaagaggtggaagagacgagagagagacctggagggcggcgcggtggaggcggcggcggcggaggcggtgacggcgtggaagacgtgcccgcggtgcacggcgcggccgtcgcccatccacccccggatggcggcgcacaccgacgccgaccgctccacccgctgcgccagcgacccctcccgctccgcctcgtctgccgcaggacggggaggaggaggagggagagctatacgggcgcctcctgagctcgcaaagaaggttgcaacggcgaccgcgaccgcggcggaggggatcggcggccgccgccggcggagcagcgcgcgcagcatggtttggttgcggtgcggcaattcgtcgagcagctgccgttgttctggtgcgcgtcggctcgcccagcgcgctctgtagccgtcggatcgggaatcaacgcgccgaatggcgtcctaccattgaagtcgtcagatcttgttgggcttgctgttttgtgcgtcggaataagttcactgaaggtccctcaacttaacagcgagattttttaaggtgccttaaccacaaaaccagaaatcttcaccactaaactatacaaaaccgtctaatttaggtcccaaggcagtatagatgcatgttttgctgacgtggcatcctagtcagcaaaaataataaaataaatatgtggggcccacatgttattgagagaaaatgatgtgggccccgcatccatttttttcttttatttttctcttctcttctcaacttctcac

SEQ ID NO: 3901 - DNA, 936 bp, Oryza sativa
aaggggctgaagaacgaaatggctgaagtcaagaagctgcttaaggtgatgtgtgctagcttgggtgaaggagatcctgaaaagaggccagaaacgggagaagcttcaaaaagggtaagtggagctcctcatgatgtgaatgccactactgctttggctgatataattgatggttctggtccaatgcttactggtactgctcctatcatgagtcaagggggaggatttttcattgagccaaatgttactcagcctagaatgtccaactgcatggcctcgatgccttttgtagctggaagtaatggaacagggcaagtctttccacaacacataccccacaacacatacccacctattccaccacacaacctcagttcagtgtgtttggacagcattttggggcaggtcctagtgttcctaggatggatcagatgagaaatgttcacctgacgcaatgaggtaatgcggtgtatgctgaagcaatcatcaaaggccctaggctagaaatttcattgtttgaaggagatgatgtgattggctggctgaagcaatgcgaaaagttctatgaattaaccggaacacctcatgaacaatgggtaaatttggctttggctcatttgagtggaagagctgcttggtggttcagaggtgtgggaattccgtggcaactaatctcatggccccaacttgcagccatgatgtgtgaccgattttgtgaagctagtgaccatgaggcagtggagcaattacagaatgtaaagcaggctatcttatcagtaacacaatatattgataagttcgaggaatgtgttgatttggtccggagggaacacccatacttgcaagaacaatacctcaacagttgtttcattgggggattaagaggggatatcaaacatgatgtaagtggccaaaaacctcagggattattgcaat

SEQ ID NO: 3902 - DNA, 690 bp, Oryza sativa
ttaaagtgaacagttccaaggacaacatgaagtcatctagacacatcaagagaagactgaaatctgtcagaaagcagaaaaactccggagtgatagcattggactatgtccaaacggctagaaatctggcagatcagtttaccaaggggctaccacgtaatgtgatagacagtgcatcgagggaaatgggcttgatacccacctaaggttgcataatagtggaaacctgtccattatgatcggagatcccgtgaatttggatggtgaaacaaactattgtgtgactgaagagacccttgaaaagggctcattttcatgatgtgcttctcttctttcctgcatggtaggatggcttatgtcttaatgtgatccgagtggcttttccaagcagagatgttgacctgcagaacatcttagaaggaacacacctatatgagttcgactgctagtcacagtctatgagatttgggtgatctctagatactcatgaaaggcctggagtatgacttataagctccaacccgagggaatactaatggttgcctagtatcagttatggaattgagtgaaacctactgcacaagactgacaattcaaggtatagtccattgttcagttgtggtcaggtgtagctccttttctaggtgaaagttcaacttaacagtcttcaccgaaacactggtatataaa

SEQ ID NO: 3903 - DNA, 669 bp, Oryza sativa
tcctgcagcccgtcgaagaagtcctcgccttccttttgggtataacccttggccacaagccttgccttgtacttttcgattgtaccatcaggcctaagctttttcttgaaaacccatttgcatcctacgggcttgcacccatatggacgctcaacgacttcccaagtaccattgacataatcgagtccatttcactgcgtactgcttccttccagtagtcagcgtcaggagatgaatatgcctcttctatggttcttggggtgtcatccacgaggtatacaatgtagtcatctccaaaggattttgcaaccctttgtctcttactcttgcgagtatctacaatgttgtcctcctcaggattttcctcaggcgtttgatcattgtgttctatcggtgcaaagtgctcatggggcatgacagtttctttactagaagtgctaggtgtatatttcataggaaattcattctcaaagaatgtagcatctctggactcaagaattgtaccaacatgcatgtcgggtactccagagtttactattaagaatctataacccacactgtggatagcataaccaagaaacacacaatcaacagtttttggtccaagtttccgctttttggctataggtacatttaccttggccaaacagccccatgttcgtaggtatg

SEQ ID NO: 3904 - DNA, 1159 bp, Oryza sativa
agttacaattttgcaataatggtctggcaatgagttttattctcttgataagagatttggctaaaccattctgagtgtgaacatacggtacggaatgttggacttcaattcctaaagccatacaataatcattgaaagctttggaagaaaattctgcagcgttgtctaatttgattgattttatatggtgttcaggttgatttgctctaagtctgatgacttgtgcaatcaattttgcaaaggcatggttccgtgtcgataagagacacacatgggaccatcttgtggatgcgtctattagaaccatgaaatacctgaatggtccagacaatggttgaatagggccacaaatgtctccttgaatgcgttcaagaaactttagtggctcagcctttattttgagatatgagggtctcaaaattaatttccccgttgcacatgaggtgcacacaaaatctgatgattttgggaattttctgtcgctcataccatgtccatgtgaattgctcatgatttttctcatcatgccgatgccgggatggccaaggcgatcatgccaagttttaaatgcatccacattgtgaaaaatcactttatatgcaacatgtggtacaagtttgatgtatgtgtagtacaatccagacgggagagaaggcaccttttcaattgtttgtttgccatatccagtatctttggtcaagaggagaaactcctcattgttttcttcatatgtttccacatgaattccattattccggatatctctataacttagtagggtacgtgttgaatcgggatacaataatgcctcctcgatatttatttgtgtacccattggaagtatgatagtggcccttccggaaccgacaatcatagcatcgcgtcccgcgatggtcaaaacttgtccttccctcttagtgagagtttggaaaattttgacttccctaagtatagtgttagtggtacaactgtccactaggcacatctcttcttccatcggattgattcccgtaataatctatataatgcgaaacttaaattcataagaataaaagaaaaatatagaaaacacacataaatatatgtgattattacgtgtataaatggggtagcaacatcatgtcttttattacaatggttactcatgcaaaattaaaca

SEQ ID NO: 3905 - DNA, 2001 bp, Oryza sativa
aagcagtttgactttgaccaaagtcaaaacatcttataacgtgaaacggaaggaatattaattgatatatccaatcaaattgaaacttcatttattatgcatatatcaaggccttatatgcagagtacatttgtatacacacaagcttcaaatttcaagatcctaggctagaatatgatgatgtcatatatcaagtttatgaccaaaagttgcatacatcatcagatatcttacaatcttcttctactccatgtccgtgcattgggcgaatcaatcttgtctagtactaaaaatatagtgttcgatgtcaaaaaaagacatcctcctagtgtagcaagccagagtgtgcgtgaactttgggagcataaaaatagggaggtcttatcccgattaatatagatgcagtagatatatccaatctcccaaagaactcttcgtatcaaatctgcatccggatcccccagtcgaggcatatccttggatggaagtaatgtctacctgaaagcaagtgggttttagggaaaattaacacagcactctataagttaatttcatacaagggaaaaatcagcactggaagatgccacaagtgtaggccaaaacaaatcattcaagccaatcaaaaagtttgcaagttaatttgcaacagtgatcaggatataaaaagaaattaaactttcccaagaaagaaattagaataaagtagtaacgcaaattagccatgccatgccacggtccaaaccccaatcgcaagcgttaaaccttcttcaacacatcattgcatcgtgagaaaccttggcagacaggtgtaatataaatatgtaaaatctaacacatgcctcatgaagcaatcaattacagaatactcttatcatacatctgaatttaaatttgctgtcgtcttcttgcttggtacacaacatacaaagtgtgcaattaaacccgacaaaaccggaccgaatcacatgaagactcacaaaccacagtgactactctgtctcctcagcttacaaggcatagctccttggctccacgaaatcgaactacaacttaattatgtggaaaccctaggtgctgaggaagtgcaagttcttagcctggctagtagtcaaaatagagtttggacatcggatcgactagctgctaggggacttaagagttttccaacacaaggcgctcacggttatcggcttcttcaaaggaagaagcgaggacctaggcacttgcagacaaggtgactactagaggttttactgaaaattatattaattcccttagtcttatttaagtagtccgtacctagggctgtaaatctctcttccttattcaatgaaataggcacatgctcgtgccaattcgttgaaacccaaaaaaaaaaggtactcagcgaacatctgatcagcttttgaatattgtttatccacccatttgaatatttgatgattgaacagggttaatcatacttggttcttgaatctcggctaatgtggctgacatcgcactatctacttgttgcagcaaaatagcatccatatctctttgtctatcacttaggaaattatgcaatactactacttcctccgtttcaaaatgtaagactttctagcattgtccacattcattaacatctatatgaatgtgggcaatgctagaaagtcttacattatgaaacggagggagtatgcgataaaaggacgttccaaggtccaagagctagtaaaataccctatattgatcttatatatgcctaatagcactgggagcagcacacaaattaaacctcatagtcataggtatggcactatactggtattgcacatcagataattcatttaagacaaatcgaaacaggcaaagtctaccaagaacacaaaagtggcttatactactcaaaatcttaatgaaagaaattgcaacataaaattcccaatattaaaattaagcccttgtcatcactagctagcttttttttttctttttcattaaaattaagcccaagat

SEQ ID NO: 3906 - DNA, 5299 bp, Oryza sativa
ttgtatattcccagctagcaattctgtgcgccatgccagaagcatcaaacctcggcaagcttggccttgagctccatgcaccgttcatccaagttggggaactcgtggatgatgggctgcaggagggcgagcttgtcgtccctgtagtagaggaagttgatgagggcgctgaggacttgcacgaggcggcgcgggtcggggcggaggaggtcgcggagcgtgaacccggggaactggatggactcgaggaaagcgctggccctcttgtggaggcggagtacccggatgccctccatgtagtgctccgggttgtcgagcgacgccagcgcgtcgaatcctagctgcccgtcgaggtcgtcggcgctgcaaaatctccacccaacaattacaaacaccgagcgggcggcgccggcgagaggggggagggggaggcgcgcgcacgcacccggtggggtcgacgacggtggcgaggaagttggagatgacggcggggaggagatccggctgcgggttggcgatgtcctccgcgcggaggttggcggtgggggcgaggccgtaggtgtgcagcgcctccgcgatctgctccggcgtcaacggagggaaggagaagttggacgccatcttcttcttcgccgccgccgctctctcgccgccgacgcctttcccccaaatgagaggaatttcgaaggcaaaaaaaaaaaaaagaagaaatgggaggtatttgcccggtttcccgcttcgttttcccgctttgcggaagcggaaaactcgggagcagatgcggcgcttggggagagttctgggcccaaagcccatactcgtgtctaatcttctcgataaaattcggcccagcccaagatgaggcagccagtttccactttccagcccgtgggcatcgcgtcgattggaccagcccaccgaagcaaaattttaggaaattttctggaattttcaggtaaggatgttcgaatctgtccattttagcctgtccacagtgctttgcttctttccacctgtcctgatataattaaaggctagaacattgactaaatggacaagcatgatgggtcctttttggaacaaaaatttccaagaacactttgtattataccccacctattataaagtgactttgtattatatccacctattacaaagtggagttgtcatgtcaacaagcccctgattcattttttgtacagaattacttaaatatattggtcacgtcataacaaagtaacaacagaaacatggaatttatgcagatatgagtacagatgggctgatggtgtacagataaagaagccgatagaagtgtcagcgccaaaatatgtggagttcctaatggactggattgaaggccaacttgatgatgaatctatatttccccaaaagcttggtaatcattgtttgtcacaaacatttgatgttggaatggtcatgtgtaccttagaaatagtgcaggcactactcatatatttgtccaattttgacacaactcatgacactgatatgggtttaattcctttaccaggcacaccattcccgccaaacttcaaggaggttgtaaagacaattttcaagcgcttgtttcgtgtttatgcccacatatatcactccagttttcagaagattgtcagcctcaaggaggaggcccatcttaacacgtgcttcaagcacttcattctgtttacaactgtaagtctcttttgtttgtagattgtaaactcattaccaggattgtttacatttatctcatatttgctcttggttcatagaaatctggggaaagcaaaattcatttgtttccggccttttggtatgtggtgcaggaatttggcctgattgacaagaaggagctggctccactccaggagctcatcgaatcgattattccatactgagaagaatacagggacggaacggatagcgagttctttacatggacgatcgaggaatcagactacttgaaacactgtattactggcatagtagaccttactgttccagatatcagacatagaaaaggacatttgacattgctaatgctatgtttgtgtgtaccgatgttcgttcgtcctgattcggtattgcctttgtacgcgtgcttgtaatgtaataacaggatttgtggattgggatatattgcaaagaaagatctgttaatccaatcgtgagttgcaattgttgcttccttttcccagtaccaacgattcaattgtgtgtgatttcttgtttgttatacacatcaatcaagattggggggaatgaaatgtttgggttaattttatcatggtttagagttggcactaatccaatcaaaatgtaataactgatacaatgaagacgccatagatcatactaactgggagaatggcatcagaatctgagatactatcttgcataccatacacagcccgcaacaatcgagataggggaatgaaatgtttggattaatttaccatgattttagagtttgtactaatccaatcaaaatgccatggttcataaacatcatagtctcatagatcataccgactgggagaagaacaacatcataaatttcagataataagaacacaagatggcaccgatcactgactcatcaggcagcggtttgaaatgaactgtcgatgcaagcaccacgaggcgtggcagatggaagcagaggagaagctgttcctacttaaaacacatacaagctactagaactttctggaagcggatcggtcgatcgggtgttggtgctagagctagacgcggccctcccagaggcacggctggtcgtcggagcagacggcgatgacggcgggcggcggggcgaggccgagcgcggcggcgcggcgccagcgctgggcgcgggtgaggccgaggcagggcccgtaccgcatgtccatgtcgaactcccgagccatcctctcccgcccctcctcctcctccgcctcctcgacgtgcctcctcgcgtcgtcgacggcgcgatctggcgtcgctgcaaaaaaaccgaacaatcgaatcagcggagacgcaatcgatcgaacagtttcgggggcgggagaaaccgggaggagaaaagcaccctgcgacgcgggcttgtggtggtggcggggcagcgccgccttcttggagacgccgccggtgggcttgacgccgccggcggcgtgggccttctgctgccggaagaaggacctgacgtcgccgccgctcctcatggctccggtggactcctctctcgatgatctctatggattgtcgcggcggcgcggcaaggtagggtggatttgggggaaggggaatggatgggaaggggaggggagagagggggagtttatatatggagaggtggtggtgagagggagttgcggccgttgtgacggcgattcgaattttgaaatttgaaaattgggcgtctcgtttcggggtgctaaatccaaccgtccatcccatccatgtcgtgtggaaggctggaaccgtgttcgtttgaacaggttcttggggtgcaaaacgtctgtgccaatgtgccatgaaaccgtgcgtgcattcacacgtagggataaaaaagggtcaggaaacacgctaaaccatttccctattcatattatttttcggaaacggaataaaaacggtaggccggaaacggagatatatcgaaaacataattatttacatgacggtataaattgaaagccgataattcatgtcagaggcaacgaactataacatcacacatttagatagcaatctagcatggttgcatgagacaaattcatcctcactctattcaacacaaatacgtacaaacatgtataatagattgataaatgataatatgatcaagtattcgacaatagttataacttcaatgacatataattgtaagtctataaagcatattaatacgaactaacggtgtgaggaactaccaactaggagcagctctatggtttagcgttatcacaacctcgtgggacactgggactggtatattcaggctaagggaatgggccattggagataacttgggccagagatatttataaaaaaggtaatttaccgaaatatgtaaatggtaattaccaaaaaaaatacaataaccgacaaaacggttggtaaatcaccaaccatttccgataccgtttctgtattttttacaattttcgtttctaggaattaccatttccgtattgtctgatcagtaaacttcagaaacgaccgtccggttggttggtaattactgctaccattttcatccctatttacacaaatagtagtatagtagatatatcatttgtttggttttcaaagatttctagaaaggttctactttttgatttttttttctttgcgaaacacaatgcaagcgcagacaattataaaaacacacacacacactttattttataatcacgtatgaagaccatgctattttccataacattaaactgaacctatgatataacttatattaacctccacgatagaagagaaaactccatctattgcaaagcgcattaccgcttagattgacctaaggaagtacaccttatgttccataaataaacagcttttgaggataaacctgtgtctaaggttgtgctcgagagaagagaaaaggagaagattgaaaagatacgcaaaataaggtgaactattagcgtatgattaattgtgtattaaatattttatgattattaaatattttatgattaattgtgtattaaatattttatgattaattgtgtattaaatattttagacttaaaaattaatttttgagagaagagaaaaggagaagattgaacagatgcgcaaaacaaggtgaacgattaactatgattatttgtttactaattattccaaacttaaaaaaacaaattaatatgatttattaaatcaactttttaaaaaacacaatgttgaatagtttaggaaacgtgcgtgcgaaaaacaaaacaattttctctctttggtgttgctgccaaacgcagccttagatgttttagcccaatatctaaatagcagctttctagtaaatgcttgttctacagttatattttcctaatgcggtagaaatcagccccttcctgtaaaaccaaacatgtagcctctcccaactattaaaatcaatcaaaatacttcgtaatggcactcaaacctttattttaaggagataactaacccgttttgatagtgttgtatttatctgcaataaggaatgaaagaggattataaaccaatatgaaaaactcttttgccatctcactaatataactaggtgatatggtaataagggcatccacag

SEQ ID NO: 3907 - DNA, 2967 bp, Oryza sativa
agtttttacttggcaacttgacaccagcatttccatatcagagtgattcaaggcatttttacataactgcgcgcaatcattcgatgaagtattctcagtcaccgatttggtcagacgaggttcaaacagaccataaggtccataactgtcaccagtgataacaaaaacatatcaattccaaatttacagctgtggcataaaacaaaataggctatcttctccaagtggctatcctcttttcagggagcggggctgcaggagttttctgccattcacaacaaggagagatgagtttcattaggattacagcgcagcaagaaagcaaggtattgcaaaactgccgtctaccaaaattagcttgtaatgctacaataacagctgaaatgttgttaactgcaacaagaaagtgggtgtcattgctggatgacctaacctttctccatctacaatgttgcagatgtgtccaatggctccacagcttgacgatctaaactttctaaagtttctttgctcacctcatcaacttgttccaagaaagacttaaaattatccttgtagcaagtaaactgaagaaggattatattagcaaccaacaattttatcaatgattataggaaatagtcctctaataaaaacataccgcatgtccaatttgttgaaatttagcatatatcagctgtagttcttctgcagcatcagtccttgttgaatcaacttccgcacatagtttagtagcctgtaatgacagaaaaatatgtcaagtatagttgaaataggatcatagtattaacaaataagataatataatctacaggctttagcatattagggagatagtcaggccggtcagcatatgttcctggaccaatactagcgcatacaatgaagcctctttggaacattagattgtattaggtggcatgtggcatgtgaacaccagaaatcaatgattcagagggaaaaagaagttttcaaagacattgagtttgaaccacacaaaatttcaggacgaaatcatcacctttgcaattgtttcctctactttcctttcacgaggttcaagacacttgagtttccattcaacttcagaactcaaagcagccagcttctgattttcgtctgctactatttgatccttttttttttctttagctttaacatgctcctccatttcatgcactaatcaaaaaggtattcatgcaataacgtgaggaaaagagtatttcagaatggaaagagcatacacaaattcagcaatactacaaaaggtaagtacagtttgacaacctttcccatcccattcaataatctttgtgtcagggccataatttcaacactttcatcactaatcttagttttgcgcgctttgacttctttctcaagggctttagttgcagtaacctaacagcaataataaataagagagttactagggtttcatcttaagattaatccaactccataatgaaaaactagcattgcagatgtccatacctgttcttgtaaagcctggattttagtagaatgcttcgacaatttttcataaccctgcaaaatggagacagcatctgcagttattaatggatcagtaggtcaagcatcacaaggaacagtagtaagtagccaagtgccactcttgcaacaagtcagccccaacaaccgcaacaaacagatgatccaaacaatacagtggaatatcaggaaattgaatcaatatgaaacagatgaagtaaccctatatttgctagatattgttacggccaatcggcaaatacaagttaccttctaccttcggtgttttgtaatgaagagtggaacaagactaccttactgtatatctccaaagtggcagttttctcttgtacactttgcgttgctatcttctcagcattctttaattcagcacgagctgttttcttctcttcaagggccctctgtaatacagaataaaatccaaaattagtgatgcaagcttataaagataatttatatgctgttagaagaacaaagtgttgatctgattgattcaaatatatgcatatatttccaaatagcagttgaatagaagcgaggagtattaaactagtgaaagtgtgtcctcgagaatcaagacagagcatctggcaataactgcaactttttaatgaacaaataatatacagagtaaatacgaagttctacggcattggaagaatgtcagttgtgcatgcaaaaataatagtatttacattgtttttcaatttctcacaaactttttgaagagtttagaatggtaaatatccaaatgtccctttaataccagattatgtgaaaaaaaaaacctagatcagcactaaaaactaaacatatagaggacaaaaaccattgcacacgatcactacaaaccatctatgattgtggtgaagtaattcaggtatttaaacaagactgaccatcctgccagcggcaatagagaaaaaagaggaacagatcgaacctgaagcttttctggggactcaacaatttttggcaataacttggaattttcttgtgctagtttcaccaactcaaaatcatttttggcaatctgtataaagaaaataacaaggcgtttagtgagaaatcgtcttttctgcatatctaaaatttcagcatgtcagcgagaaccatttcagtgtagcttaacatatgtcaagagtaaatgatagtgtgttacaatgtaaatgggttttccaaactatttttcaatccaattatacacaaagatcgtcttgtccaaatggcaaagctgcaaaccttctgggttctatccctatttgacctggacgcttctgacatttctaaccaacacaatatacaactggcagttatataatgaccaccaaaagtcggacactcagacctagaagagaatttggcctaatactacagggccaggtgaaacctggtagcaccatatattcaaaagcgcaagtaggattgcaatgt

SEQ ID NO: 3908 - DNA, 2513 bp, Oryza sativa
gacaaccacgccatggccatcggcttggccgaggatgacgacgacaccagcaaggccaccgtcgtcgtggcgcggtccagtgtctcggcgcggcagaggaggatgagcgggcggcggcgggggaggaccaagaacggcgcggcgcacttcgccgtcagccccgagctgatccagagcaggaacaggatctacctcaggggcaccgtcagcaaggagctcctcacgcacaagcaggtcgtccacctctcccacaagatcaaggatggcatctggctgcagcagcaaagatcaaagtatgcctccattgccacacactgcaaatatgaaatgatcaatccttcatttgaattatcatttcctctcaaaaacattgaaactgttcaagtatattgtttacatttcatcgtcagcttaagcttcggagtgaagatcgattgatcggtgtatgaaattcaccaaaatacttcaaatgatttaagtgatttgattcgtatgattttcagtaatggccattcaaattgctattctgcattgcactcagtgaccttgcatttgtatgccatttcttcataattttttttagctttcttgatcctgatggtttgttcctccattgttgaaccaggctgaaagagaagctgggaaatgagccctcatacaaacagctggcgcattcgctgaagatatcaccgcccgagctacgatcaaggatgcacgagtcgtttcttgcaagggagatgctaacaatgagcaacctccgtttggtcatttccattgcccagaagtatgataaccttggtgttgagttggctgacctcattcaggtaatggaatcagttaattcagctgcctttgcaattctaacagagtctgttcagtccaatcatctgttggacacactaggaggattttgtgtgcttgagacatgtagtaacgtgttgcgatccaatcacattttgcagggtggtctgatagggttactccgtgggatcgaaaaatttgatgcatccaggggctttagaatttccacttatgtatactggtggatacgccaggtaagagttctctgctatcctgtgctcaggcaaatggatggaagttcagaattacagtcagagattaactcaatcgatacctgatacattgtccttatttcattgtttcgatcgataccagggtgtttcaagagcattagctgaaaactcaaaaacattcaggcttccaacttatctgcacgagcggctgattgcgattcgtggtgcaaagtatgagttggaagatcaaggaattgctccaacaatagaagtaaggcatactgcactaacaaaataaaaatttggctagttctgtttccatgaactacaaaatatttacaattgcagttttctttgtgtattttaatcattgtttctttttatttttaaaattaaaatttaaaacgcagatctgacagtttgccaacctttatgatggttttcagttctgtgaactgcaaagtacttctagttgctgctattgtatttttaaccatgctacttttgtttttctttgaaaaagattatataatttgaatgtcgcgtctctgatggtttgctataaccttttggtggttattctcagaacatagcagggtcactcaacatatcagaaaagaaagtactcaatgctacagaggtaatatatcttcatcttgctcggtggaacttcttttgttaaattcctttgatatttctggcattgtcacagacatttttactggttgaaaaatacaggctgtgaacaaggttctttcgttggatcaacaagcatttccatccttaaacggcttacctggagagacactgcacagtgtaagcagctatatagctactttgaaacaccattatacattttcaattttgaaatgtgccacgagattaaacctttttcgccctttccttgttctcagtacatagaggatcaaaatgtcgcaaatgatccatggcatggatttgaggagtggtatctcaaggtaaccacagagatatttgttccagaagataattgcactaattgctactagtccataatcctgttctttctttgatttttggaaataatccatccacaagacaaaagatcattatgactccaagcattttgtttttaaaagttgactccacaaacatattatagctctgagttggtactggtatatggatgaccagacctcattaccttatgtccttagagaatcattgaatgtgctttaactataaacattctactaataccaggaagaagtcaacaagcttttaaactcaactctcaacgagcgtgagagggacattatccggttatatcatggcataggaaaacaatgccatacatgggaggatattagcagacagtaagtattatttcttcagctcttatggaccaaggtcctgtacatgttcaactgcctagtcaagtttgctcgccataaaaaaaaatctaaaacttttccattattatcaaactattcataatag

SEQ ID NO: 3909 - DNA, 1344 bp, Oryza sativa
aatgttactccaacaatgatgattgcccctgcatattcatcaaaagatcctccacaggataatgcacaggattttgaatatcattggcaacacacaagatattgatgaagcccgccgccaccttaaggcagaatttgagatgaaggatttgggtaaaaccagattttgcttaggtttgcaaatcgagcaccttcactcaggcattttagtgcaccaatctgcctatgtccagaaattattggagaaattcaatatggacaaagcacatccaaacaaaacccccatggttgttcgatcactcgataaagaaaaatacattttccgaccacgggaggaaggagaggggatattaggaccagaatatccctatctcagtctcattggagcacttatgtatcctgcaaatagtactagaccagacattgcggttgcagtcaatctattagcaagacatagtgctgctccaactaagcgtcattggaccggcggaaaacaaatcctcaggtacctaaatggcactaaatatcttggcttattctttcagaaaactgctgatcctagcttggttgagtacactgatgctagctatatgtctgatccccacaacgccagatcacaaacaggctttgtattcctccatggaggaacggccatatcgtggaagtcatctaaacaaacattagtggctacctccacaaatcattcagaaatcatcgcactgtttgaagcatcacgtgaatgcgtgtggctccgcaggatgataaaccacattgagcaatcttgtggcatcggttcatcagaatcacctactattatctatgaagacaatgctgcttgtattacacagatgcaaacaggctacatcaagagcaatatcaccaaacaaattgctcctaagttgttttatccccatgagcttcagcaaagtggagaaataaacatcttatagacaaagtcttgcgataatctggcggatctcttcactaaatccctacctacttcctcgttcgagagatgtgttaagggaattggtatgagactactccgagacttgcaagcttcagggggagactctctgaatgatgtaccttgttgaaacacatcacattgtactctttttccttttgtgagtttttaccatctggtttttctcatacaaagtttttaatgagacaatgttagatacaagcttatgccttatctcatgttttccccacaggagtttttctagagataaaacaaggcatggattactccttaaaccttacaggtttctgatagagtaatcaccaatcatattattcctatttttttcccacggggctttttgaaggaattaaacaa

SEQ ID NO: 3910 - DNA, 3266 bp, Oryza sativa
aacggcggcgagcgcgaaggggcaggggcggcggcccgagcggagggacgagaggtagagcgcgacggcgcggcgtgggcggccttggtccgcggcggcgcggatggccagcgtccacgtcgagttgacgtctccggcggcggcgggcatgggagcgtcggtgatggtggcaaactagcaatccgtcgaacagttggtgactgaatttgaactcaaggactgacaatttcgcagctcttttttgtttgataggaacaatttcagctcttcatactagtggataaggctgtgtttagattcaaagtttggatctccttttttatcacatcaatctgtcataaacacacaacatttcagtcacatcatcttcaattttaactaaaatttaaactttgcgctgaactaaacacaacctaagtaacatttttcaaaagcttctcaaataaatgtaaactaggaatacaaaagtcccaatttaactgtgctgttagaaaacaaattctggtcacttgaagagattacagttgggactatcttaaaaactaccgcaagtattttttatggaaaactttcaaatataaatatagtataattgtaatataattacaccttaactatactacaaccaattaaccttattatgacttatttcctccttccctaatggtttgacgccgttgacttttttaaacatgtttgaccgttcgtcttattcaaaaacttttgtgaaatatgtaaaattatatgtatacataaaagtatatttaacaatgaatcagatgataggaaaagaattaataattacttaaatttttttaataaggcaaagagtcaaatatgtttaaaaaagtcaacagcgtcaaacatttagggatgcaggaagtatatagcttgtttatgcctgattagttaacaatcatctttgtctgtacggcagtttttattttacttttgctaaaaaaaattctcctgctctctaaacactcctgactctttcaaaaaaaaaaaaaacgggggtgggttgggtggggaagactactgccattcattgttgcaactgttctctcctcttcacaatctttctgcgattgtacaaggcttgaatggatgctacggctgttgccgagtgaaagtacataagttgtattatctgaagaaacgcacagatttttgcatgaattcagttggttcagatcagtcgaaaatattgttcaataatctctctaagaaaaagaagttgccggcatccgaccatttcaatttcagcgatgagtcacaatccaaaagctgaagaccagaaatgcacgtccaggtcctatgcgttcctgaattctaatacaacgcacgtccacatggaccacatgcaaataaattcctcgcaaaatactggatacctgaacaggtgagcaatagataatagaaacaggagcacaaaacattggaacagcatgagtccaaagttccatcgccaaatcaaatgatttcaaggcctacaaggttagcaaacatctataggacatgagccgaagaattggttgaatcagtcgcattaggccaaacaaataccaccatccaacatgccaaccatattttacactaggaataccttcctaccccgcaaaaaagggcaggaacaaaagaacattctctaaggtaccaaccaccactagctcagagctagaaaagctttacaaaggagggaaagatggcagccatctccggcacacactgcggcagccgccaggtgaggtcaagattttctgggggtgggaaaaaagaaccaaaaactaatttagacatgtcatcatcatcatcaatcaacacctgtgctgctgccacaggcaaaaggagatgctgtggacttgatacatttcacctcatcccacaaatctaaactgtttcttctttctccctatctcctacgatcctaccattctttgggtctaacgaatgtcggcactgctggccaagtcactagagggatggtcagacttctggtttgttagctgctgccggagccgctgatattgtggggtgggttccattgtcttgaggaggcgccactccccactttgggtctgagtccaacggctccaccacatgaacagcaccatcgctcatgccgaccgcaatctggttaggctccaagggatgcgcagcgacaaccatggggtaaacacttccaccactgttggaaaagatgcaaaaatgggcatcaacaataacatgatggtcgccaggactaagattaccatacccaacagaaacacaaagcagtgtaggcatgtaggggactatacatacctagacatggaaggtggtatgtatgcagaaggtgctatcctgcatcgcagcctaagagactctgcttcgaagactccaattgcaccatcacaagtccggcgtagatgaggagaccatcacatgagtatattgcacttgaaattggagcagggagtgcttctcttggggaccactgcatgatcaagcaatgaggtcaaattcaactatcataatcaatgattgattgaatggatcacaaatgtttatcacactagcacgatgtaatataatacatgcatatattaaattacggtaatctgagaactaaccgagcgcaagcactctagctttgcatcatagatcgccaactggctctcatgaaccaccaaaatatgtgtttggtcattgtgaaactgcacccttgtatcaccaactaaagcaccagaacgatttgctggagattggatatatcttgatttcttcttttcccaaccatcaatgctccaagcacatagctgcaaaattccattccaatgaccattgattcagaaacaaatatatagtccacttgccaccgcgatcagaatcttttttttttaacaaaacaggctaaaggatggctagacatgggactaacaagagcatggaggatgaagtatgcacacaaagtgacatttaattctgcacaatatataggaaaattcatacctgagcatcagcacctgaagatacaagcatattcattgactgcgaaaatgccagcccagtgatcttttttgaatgtcccttaagcttgcttttaacctatgccatatggttaagacagaaggaatcaattatcactgaaacaagttctcagctgtttaaattttaatcttcagttagttgaaggtcactgagcatttctattgcacataaggtttataagtaaaaaaaaaaatacatatatctaaaacgtcatctacaaaatctcacaagatctg

SEQ ID NO: 3911 - DNA, 780 bp, Oryza sativa
agagaagagagagaggaagagtgagagagaggggggaagaggggagagagagtgtgtatatatgacaggtgggctcactatgttttaaaaaatgaaaatgttgactggactgccatgcgaacgccacgcagaccaaaaccaccgcggattgagtcgagggggtaattcgtccgatttgtatagttgggggtgaagaatgtccggttttatggttcagggggtaattcggacgaccgcgatagttcccggggggaggggggtaattcgtactttttcctttcattaaaggaggggagacagaaaagtgttagtgaaaatattgatttacctctagtttattgcggaaatttagctaataaagatggcttaaagtgaaatttactctttattttcccaatttattgttcttgcatcgaaatcgagcgagaggataatttgttaacaatggtatgagagcctaccacgatgatatggagagttggcgactatacgtcttcgacggtggtcactacgctacgctcagtcgggacgtcgtggcgatatggccgcgcaaattaagcatccaccatgctaccgttgttgtctcaagactcaacgcaactacgcaagcgatattagcaacaccagtataaaaagaaatgcacataaatagtttggatttaactgttctcacatgcaaataaaagttcttaaaacgatgactctcaaaacacgaaattatccaacctaacaaaacgtaagtgtttcaccacatcttgttgtctcatcaaccacctctct

SEQ ID NO: 3912 - DNA, 636 bp, Oryza sativa
tgggcacgttcatcctgatcttcgccatgctctccaccatcgtgaccgacgcgcagcgcggcggcgtggagggcctcgtcggcgtggcggcgtccatcgggctcgccgtggcggtgctcgtcatgtcgctcgcccacgtctccggcgcccacatcaacccggcggtcagcgtcgccatggccgcgttcgggcgcctccagcccgcgcacctcctgccctacgccgccgcgcaggtcctcggcgccgtcgccgccgccgccgccgtcgacgggatcttccatccggcgagccgagggtggatggtgagcgtgcccaaggtggggacggtggaggcgttcttcctcgagttcgtcaccacgtttgttctcctcttcgtcatcaccgctgtctctgccgatcccaacgcagtataattactacctccgttttatattataaattatcttaatcattatttatctatcaaatttatataaaaaatatctacaacactaaattagtttcattaaatatgatattgtacatttttttttgacgagaatgattatcgtcgggtgaccggcgaaaggagcagaaatcgggcgctccccctgccctccgcgtgcgtgcatgccagggcgcgtgcgctcctcccta

SEQ ID NO: 3913 - DNA, 5677 bp, Oryza sativa
ttcctgcggcccgttaatattgttgtagaggcttcaatagagagaaagaacacttgtagatgaaagttctcaggtattctcaagaaaacaatctctatactttcttgctcgaggtaaaaggtatttactttcaacgcggatttgataggttcgatgatgataagcataacaaaggaaatggtctttgcagaggcctcatcaaggggaggggcatctatccttcttatcaaaatcgttagatatggtaagcaaatcctcaattaatttcctcttttttcttttggtagaaaaaaattccaattgtctcaacatgatttatataggttggatatgctacaatgctgatttactgttgttttttgccttttttgttgtctttgctattcttcttttatgagctatatataaatctatggtaaatctaatctaaatcttatcattgaatagaaatacctataatgtttacgttggctacgcaacttcgagcattcaaacattcccaattaccatcgcctccctaaacagcaatggtaattggggatgttcggttgctcgaggttgcgcagcatgctgtgccttgaccgtcaaacgaccccattaataatagcaaaagtggacttgtatatgaggtttggtttgcggatagagtatggtgagggcattttacaaaataatgcattgtaaatctaaaccatttctgagattcttatcgaataccagtaataatggtttttatctctgattgtatttttttattaaatgatttccatctgagtggcttatagaagtttggtgctttgaaagacagtggtaatgacgatggtaatgtcaggagcagacttattgctctgatgtacttcctccgttttataatgtaagtcattctagcattttccacattcatattgatgttaataaatctagatagatatatatgtctaaattctttaacatcaatatgaatgtgggaaatgctagaatgactttcattgtgaaacagagggagtatgaggtttggctcggggctagggtatcacaaatgcgttttctcaacaaattcagaatagatatactatttgggtgatattcatgactatgaagtgagacttggagaccattatacaggctagggctgaatttatgatttttcaacttgaaaagatttatgattttcttactagagaatttagatttgcgttattaaatgcatcgtaaatcaaaatcagtatctacatcttacatcttagtagtcatttattggattctaatcaaatttcaatactcttggtttatctttgattttgtatatctttttattaaatgtttttcttcaagtttcgtggttaccaaaaagttcggttttcagtggcaaccacctcatagaacacctaactcgtggcaaccacgaagttagaaaacatttaataaaaataagatatacaagaaaaaaaaataaaaaaccaagaattggtatttaatatgagtacaataaatggcccctatataataacctaaatctaaatattctaaagttagaaatcattaattcatttatttaatataccctacatctaaatcttccaaagttagaagtaataaattcgcccaaccctatatattggcctctaacctcacttcatagtcatcagtcatcacttcttcccaagtaaaaccccaagaagcggctattacttctctcccctgttcttcttcctccacattcccatttcctaaaaaaaaaatccccaaatctccacatgattcctccgtaattcggcgcgccctctcatggcgtccctcgccgaattccccctcccggtgatctctccgacttgctggagctatcggtagcgggaggaatcaatcaatcaatcccccacgctgggtggttcttgagcaagaacggctcatcgccgtgccgatcgatcacgtcggccgacggggaaatcctctggggatttgtgggtggttttgggctaaagattccgtttctttcgagcccttttggtctcgggtggatccgcttagctttggttcttttgctggttggggggcatggcggcggagtcgtcggctgctgctgctgcgggcgggggcgagaggaggggcccgatggatctgaacctgtatctcgcgctccctccgctgccgccgcctccgggaaggctggatgtcgccgccgattacccgtcgctgctgctgaactccgccgccacggtggcgaacgagcaaaggggctcggtggtggtggcggcccgcctccggcggcggcggcgtactcgccgtcgaacgcgctgtcagcgccggagcaggtgctggtagatcctgttgcagcgtggcttgttgatcccggtgagcagcagccggtgccgccgctcgagacgccatcgtacatggccagggcctcgtcgacgctgccacagatttttgcttgtgcagcgttggaaatgcttgtgcagaccggtggagcaatcccacctactggtcttataaggggagcagagattgctgctgcaagccgccctatgacgccggaggatcggctgcggaggttgatccaggtgagcgatcaacacggcgtcgggaatgggagggcggggactgggccagtgagccgcagccgacgggcgaatagcccggaagccgataatctggcgcgggccatccagaggtctcataattctcttgaggcatcaaggaggcagatgcttgatggtgatggcagtgatgccaccaagaaggatgacggttgcggatgcaacggcagcttcgaatgcaatatctgctttgaatcagctaaagatcctgtggttaccccttgtggccacctcttctgctggccttgcatataccagtggcttcatggacattcagagcactctgattgccctgtctgcaagggcgaggtgctcgaagtaaacgtcacaccgatttatggaagaggaggtggcgaggagaactcctccagaaatgatatccaaatccctcccaggccgagtgcgcagaggaccgagagcttgaggcagcagctgcaaaggccagacacaagaggaggcattgcaaacatggtgaggcggttgatgcaaaaccaagatatagtggtaggccaggcggcttcatctgcaccccggccaaggggtaggggtcgaaggcaggcaagacaagatgcgccttctgcaccagcaacacagcagcaggtggtcaatgctgatgctgggagtggcaatcaggctcctttgccacctcctgatgctaatggtgctgcaccggctgctgctgtcgctccccaacagtcatcatctgtggagcaagcgtcgacttctagcaccgtgggtgttatagcgggagggccagcacaaggtaggaggtcaagagtttctgaatccacccctgcaaggaggacaaggaggaggcatcagtaggtaacttagagttgttactgtaatagaacatatacaccatgtttccttgtaaccttgatcatatttaggctcatcccaaaattatgtagaattgtggatgaaatcttttcttttatttaccttgtatccaccattttaccttaggcaaaggaataaagatttcgatttcaatatatatggatggatctctttgtcgctgtgtattccaggataatattttctgacatgatatctgtttctgataatgagtttcagatattctggttgcaccatgtacctttatgctattgtgattcctggtactgaaactcacaaaacttgtggagccaagtcatgtgtatccttttattcagctagatttgtactgttgagatcgaagataggaaccaatgcattatgcttttcaatttaaatttgacactatgactattacaagttaactagagttcagaaaatcactggtactcagagtcaggtacaagtctcttcctttgttttcctctgattgcagctccattttgaatgagagcaaaacttgcagtattcaggtggtcaagtttgtgtcagcatgttattgttaaccattttaagatgtatttttatgtctattttgcagtgacattccataaatgaatactgtagcatacaagatcatgttatgttgaggcctgacagattatagactccttgatctgaacctctcatggggcataatcagttcctgtgtgtcatgaactaacattttgttgcaaatgtaaaagctatcaaaaacatataaaccaattgtatacttgtcaataatcatttacatttcaggtacatctgaacatttgtgttggcaaaaaaaaaacatatatattccccatggctccataataatattgtttgcgaattactctttgaaggtcaccttgtcaatgtaccagcctctgcaacaggatgcacattgattatgcccggacaggatgcaaatgaaattacttgacgaaatcagtcttctgcgtaataatttctatcccactgactcgataccatatggaacatatggccactgtttattgtaacttctttgcatggattctttttgtacaagaacaatgtcagattggtgctatgcaactagctacaacatacatgtctcggtatcaggcatttatcttaaaattattgctccagagtcagatgctcagagcacaagctgcttgggttagacttgcatgctgctagatttgctgccattcaaatggaggttggtactccttgtgtatccagcatttgggcagcgtagcactgtttccttaagctttataatggttatcttgccttcctttatatctcgttccgtcatttgcacattaaaaacaccaggtcgatgtgtgtttcagggggccgaggtgtgaagatggttgaagtagcacaatgaaacctgcaacatgttgtgtaaccactaagcagtggtcattgtaatatcctgactacctttgtttgcttggaagtgtttgtcctccatctgatgcaatttttcctttgcactattcccctactttgaaaatgcagtgtacatcacctgcaatgtttaggtgtgggggtttgtggggaagaaaatgttagattacaacatctggttcttaggattcagctgacctagtttagcatcttatatgcttcttacatagtagaaaaacaggtttcaaatattcgaataattaatgtttttaccttgggcaacaacatatttcagatattcgaataattaatgtttttaccttgtgctagatgttcaggataacaaaggtagctgcgaggcctgcacttcagcaatgatttgtgctcatcttcagacactgatcatgcaccatgaataccagcgataccatcagtatgacaattggaatattgaatgattatgtgccaaaatgttcacatgttaccaccggttgttgtatggctcagttcagtatatatcatttcaaactccttcacagctacaatagctagtttgtgtacaggttcattatgtcttgaactgctctatcaatcccagtaggctgtatgtttcagcatctggcatcgctcctctcaaaatcatcgctcttaacaaatctggctcataaacttttgcctttacatgagctttaagaagggtattatacacaaatgaattcctacagtactttgattcattcagttcgtcaaaaactctctttgcatttaccaagtcgccattttctgcaaagctttcaagtatcatatga

SEQ ID NO: 3914 - DNA, 596 bp, Oryza sativa
cgccttcccgcatcgtgagcgagaggcaggccgggctgccgcgccgattcatgccggaatctgccactggccgggaggtggtcacgctgggtgagggacgcccggcgccacactacccggggcggccgtcttcttcctctctttcgcaatggcagggctagtcccgccattttcttccgtcttcatggatgttctggagctttacgatctccagatggcgcacctcacccccaacgcggtaatgacgttggccatcttcgtgcacctgtgcgagatgttcatcggggtgcgcccatctctccggctgttccggtggttcttccccgtacagccggtgtcgccgccgtcggtagtcggtggctgctacttccagccgcgggggccggcgctgaaccgctacatcccctgcgttctccgcaagaagtgggacgactggaagagcgactggttctacacccccctcgccgacgaagcgcgcctccgacttccgagccagcccccggtgcaggcctccagctggcgggcgccggtagatctgggagacggctacgactccgttctttaccgactggcgagtctgcggacccaggggctga

SEQ ID NO: 3915 - DNA, 20327 bp, Oryza sativa
  unsure (1)..(20327): unsure at all n locations
cggtcggggcgtcggaggagcgggctcctcgaggccacgatggcgcgggcgggagccgcaggggggaacaatctaccccgggagggggtcgtgcttctgggccccgcgacgggggtccggggggcaactgccctgccgacgcccgggggaagaggaagcaagagggtaccccttccccatctcctccccgagggggcggggcggtgcgtgccagcagcaggcgcccggagggtaccgcgccgacgtcgcagcccgaggggggcgaaagaagaagcggctccgcaagatgggggagacggaaccatgccggggaaacctcatctctcccccaaggtggtcgtttagccgacctccccgcaggttcgtccccgcgcccactgcggccgtattcattctcccatcccccaaggcgagtttttactcacccgcttctttttgtcttctggtttttcttctgcttcagcgagatcccgtcgcgcccccctcgccattccaagtccggccggtctgaggtcgaggagacggcgaccgcggagactcggaggcgagaagctgaccggcgagaagccgcggtccgcctccgggaatccgaggaggctgtccaggaggccgtccgggctcgccaggctgaggaggccgctcgggaggaggctagactccgccgggccgaggagtccgtccgggaggcggagacggcacacgcacgccaggcggcccgccaagcccccgacccgactccgcctgaggcgacgacgacttccgaggccacccacgacaatgccgcgggcgcaccgctcgggcccgacccctcgggcgacgctcaggacgagccggcttcgggggacgcccccgagcccggcacgtcgatcggcgggccgagccgcgcggcacccacaccgaggcggctctcccctctgccttccactgccccactgagcgcggagcccctcctgcaggccttagccaccgcgaacagcacggtgctggacgggctaagtgcccagatggaggtcctgcaggcggagcgggtggagctcgacgcggcgtgggcgcgcgtcgaggaggggcggcgctcagtggaggccatggtggaggcgggccgcaaggctcactgccggcacacctcagagctcgaggcccgtcggagggagctggcggagatcgccagggaggtggaggaggagcggagactgccctcatcgccaccgccgtgctcgacgagatgcgggacgacctccgcctccaatacaggagccgggcggcggagctagagaaaaagctcgacgccgcccggggagtccttgacgcgccgctgcccgggaacggcgggcggcggagagcgaggcggcgtcccggcggcgtgaagaggcccttgaggctcgcgctacggcgctggaagagcgcgcccgcgcgaaggagagggacctggcagaccgtgaggccgccgtcgccatccgggaggcaacgctggcggcgcatgaggccgcctgcgccgaagaggagtccgtactccgtctccgcgaggacgcgctcaccgagcgggagcgagctctcgaggaggccgaggccgcggcgcagcggctagcggacagcctgtccctccgcaaggcagcgcgagaggagcaggcgcgctgtaatctggaaggcgcccgcgctgagagggccgcactggaccagcgggccgctgagctcgaggcgcgggcgaaggagctggacgcgagggcgcgcagcggcgggcggccgcgggtgacggcgacctagccgcccgcctcgcagctgccgaacacacatcgccgagctgcagggcgcgctggactcgtccgccggagaggtcgaggccctccgcttggcaggcgagatagggcccggcatgcttcgggacgccgtctcccgtttggaccgcgccgggcggcaggcgggcctctggggcgggcggaccgcgaagtacgccgccaaccaggggggcctcgcccagcgcctctcagagatggccgggaccctccagcggctccccgagagacctcgcccggggggcggtggagctcgtactggcaagctatcaggccagggaccccgacttttccccgtgggcagcgctggacgagttccctcccaggaccgaggacgacgcgcgcgcgcaggtccgggacgccgccgaccacatcgtccatagcttcgagggtacggcccctcggctcgcgttcgccctcgactccgacgaggaggatggtgcggacgacgaggctagcgacccgggcgcgtcggagtgagcccccgggcccccgccaatcttgatagccctttttttttcgaggccttcgggcctccttcttgtatagactaacttaatctgcaatcaaataaagagaaaatttctgtgtcaattctatttgttgtgtgtatgaggcaaggatggtctgtgccgcggtccttctgagtcttggcttgaacaagggctcgtgcccaggtcccagcctcaaacggcgcgggtcggggctagtgcctggggagatccacatgtcgagactggccaggccgggagcgtggtgaccgagggttatggatgacccgattgtgggcctttgccgattcccccccggagttcaccacaccccggggcacggctcggttctgggccccttttggcgattttagccggcccgggccaccgagggcaggatcgagcacgagcgtgctaattcaagtcaagattcttcaaaaggaaacaatggcacagatacagtccttaggaaatcgaaaatgcttttattgaaatacggaagagaaaaaagataagtatatgcatgtggtagcccccggccaaccctgcacgcccgggggggtgcggggttggcccgagcccgagacctgatacccaacccccactaggggtagaaacgacgaaggtgttcgatgttccacgggttaggcagctccgtgccgtcgcccgtggccagccgaacggagcccggccgggggacaccgatcactcgatacggaccctcccacattggtgagagcttgctcagtccagcacgcgtttggacgcggcgtaggacgaggtcgtcgacgcagagtgatcgggcccggacgtggcgctgatggtagcgccgcaggctctgctgatagcgcgcggctcggagggccgcgcgccgccttcgctcttccaagtagtcgaggtcgtctctgcgaagctgatcttgatcagcctcgcaatacatggtggcccgaggggacctcagggtgagctcagatgggaggaccgcctccacgccgtagacgaggaagaaaggcgtttccccggttgctcggcttggcgtggttcggttcgcccagagcaccgctggcagctcctcgatccacgagtcgccgtgcttcttgaggatgttgaaggtcttggttttgaggctcttgaggatttctgcgttggcacgctccacttggccattgcttctggggtgggcgggggaggcgaagcagagcttgatgcccatgtcttcgcagtagtcaccaaagagctcactagtgaactgggtgccgttatccgtaatgatacggttaggcaccccaaaccgagcagtaatgcccctgatgaatttaagcgcggagtgcttatcgatcttgatgaccgggtaagcctcgggccacttagtgaacttgtcgacagcgacatacagatactcgaacccgcccggggcctgcctaaacggacccaggatatcgagcccccagacagcaaacggccatgaaagaggtatggtctgcagggcctgggccagctgatggggttgcctggcgtggaactggcacgccttgcaccgccggaccaggtcgaccgcatcgttgagtgccgtcggccaatagaaaccctggcgaaaggcctttccgaccaaggtgcgtgaggcggagtgggctccgcactcgccttcatggatatcggcaagaagctcgacgccttgttcccgaggaatgcacttcaggaggactccgttagccgcgcgccgatagagggtcccttccaccagcacgtagcgcttggagatacactggacgcgttcactcccttcgcggtcctcgggtagagtcttatctgcgaggtacacctggatctcagtgatccaagcaatcaatctaggggagctgggagcgctcccctcgggtcccgaggcctggactccgacgggcctcgggggccgttcaggtgcatccgtctcccctagggggtcgggtcgcgccgacggctgggcaagcctttcttcaaaggcgcccggtggggtctgggctcgcgaggaagcgagccttgagagtccatcggcgaccgcgttatcccgtctgggcacgtgccgaagctctatcccgtcgaaatggcgttccatacgtcgcacctggcgcacgtaagcgtccatctgcgggtcggagcaccggtactccttacagacctggttaacaactagctgggagtcgcctaacaccaggaggcagcggatccccagtccagctgccaccctgagtcccgcaaggagtccctcgtattccgccatattattggtcgcccgaaagtcgaggcgaaccaagtatctgagaacgtctccgctcggcgaggtcaacgtgacccccgcaccggcgccctgaagagacagggagccgtcgaactgcatcacccagtaggcggtgtgaggcagatgcgaggggcccgagctggcctcggggacagagacgggctcgggagctggggtccactctgccacaaagtcggtgagggcctggctcttgatcgcgtggcgtggttcaaagtgcaaatcgaactcagagagttcgattgcccatttcaccacccgtccagtaccctctcggttatgcaagatttggccgagggggtaagacgtaaccaccgtgacccgatgcgcctggaaataatggcgcaatttcctcgaagccatcagaatagcgtaaagcatcttctgggcctgagggtatcgggtcttagcgtcccggagggcctcgctaacgaagtagacgggtcgttgcacctttcggcggggccaaccctcttcgctaggggccgcatctccagggcgctcttcgtccgagaggccgcagggggcgcactcggcttctgtgccaacgacctcggggtcggagggcgacaggcgcggccttcccgcagtggccccgaggccatcctgggggtcgggggtacctggcaccgtcggacaagcaggcggagggccatctccggccgtcgggggccttgggccaccgttcagctcgggggcctctcctccctgctctctcccgggtcgagttgatacaggattaacctcggggtcagagagcggcaggtgcggccttcccgcagtggccccggggccatcctgggggtcgggggcgcctgacaccgtctgacaagcaggcggagggccagctccggtcgtcgggggcctcgggccgccgttcggctcgggagcctctcctccctgctctctcccgggtcgagtcggcacagggtggggatgcgcggaatgagggttgtcctcatcgcgctccacaaccaacgccgcactgaccacctgcggggctgccgccaggtagagtagcaacggttcatctagctccggggcgaccaggactgggggagagctgagatacgccttcaactgagtgagggcccgctcagcttcctccgtccaggtaaacggcccggagcgtttgaggagcttaaataggggtagcgccttctctcccagcctcgatatgaaccgacttagggcggccatacagccggtgacgcattacatatccctaagcttgctgggggggcgcatccgctctatagctcgtatcttctcggggttggcctcgatgcctcgggcagagaccaagaacccgagaagcttgcccgcaggtacgccgaacacgcacttgtcggggttcagctttatgcgggcggagcggagactttcgaaagtttccgctagatccgagagtaaggtctcttggttgcgcgtcttcacaaccaagtcatcaacataggcctcaacattacgtcctatttggctacccaaagaaattcgagtagtacgttgaaaagtaggacctgcattctttaacccgaaaggcattgtcgtataacaataagttcctacaggggtaatgaatgcagttttttcctcatcctccctagccatgcgaatctgatgataaccagagtatgcatctaaaaaacacaaaaggtcgcaccccgcggtggagttgacaatctgatctatgcgtggcagggggtaagggtccttaggacatgccttgttaaggtcggtgtagtcgatgcacatccgaagcttgccgttcgccttgggaacgacgaccggattcgccagccactccggatggatgacctcacggatgaatccggcctccagaagtcgcgccacctcctcgcggatgaaggcttgacgttccggggcctgccgccgcactttctgccggactggccttgcgcccggccgcacggcgagacagtgctcaatcacctccctggggaccccgggcatgtccgctggtctccatgcgaagacgtcagcgtttgcccgcaggaaggagacgagcgcgtcttcctatttgccgtccagaagaccaccgattcgtgtggtcttggacgggccgtcgcccagggctacctgcttgatcgggacctcgtcgcatgtgatcattcgctgcctcggggcggctgggacggaagcgctgaacctctcgtcgccaccctcgggctttgatgccgcggcgaggtggtccgcgcgctgctcatgcaagcaagcgcgactttgagctcgccatggacggtgatggggccaccggggcccggcatcttcatctggagataggcgtagtggaccgccgccatgaacttcaccaacgcgggcctccccaggaccgcgttgtagggcagactgaggtccgccacatcgaagttcacccgctccgtgcggaagttggcggatccaccgaaggtgaccgggaggtcgatatgacctaacggccaagtgtgccccggcgtcacaccgatgatcggctgggacggccggagcaccatccccggggccttgatggcatcaaaggctgcgggggaaaggatgttgagggctgcgcccccgtctatgaggacgcgccccaacttcacattgcaaacggtgggggaaaccaccatcgcgatctgtcctccccgggcaacgcacggcgggtggtcggtctggtcgaaagtgagggcaacctccgaccaccgcgcccgccgcgtcgcctcatgggtaggggccacggccagaagctctcgcttcatggccttgaggctccggcgagaaacgtgagcgcacgctcccccatcgacggtggcgacgatggccccgggctcctggaacccaggtcaatngtcgccatcgtcgacatcaccggtggtggccttctgcttggcctcacctcgccggttgccggcgggagccgccggggccttgccctcacggcgctcctgcctcctctcctcctcccacttcctcgtccgctcagccaaacttttgaccgcgcggcaatccgcgaggtcgtggagggaggtgttgtgcacggaacaccacttgccaaacttttgaccggcctccttctttttgtcgctcgcaggcctcccctttcgggtggcccgcgaagcgccctcgacggcgaggacgtgaccctcgtcgtcggaatgggccgacctcttcttcttcctcctgtcccgccgccctgaccgagcggcggtcccggaggcggccggagctgccacaccggaaccggaggagttccaggtccaggcctcctccttgcgagccacacggtccgcgagctgaaaaagctccgcggtggtctggggctccttggaggcgatcttctcgagcatgcggttgtgccgcacgccccccctgaacgcgtagatcaccgcgtgtgcagggatgcatggtatggtgttgcggacttgacagaaccgctgaacatacgagcgaagagactcatcgtcccttcgctgcaccgcatgcaagtccgctttttcgcctgggcgcggatatgtgccctggaagttcgtggtgaactgctggcacagatcctcccaagagtggaccgacgcgggtggcaagttcattagccaaccccgcgcctgacctttcagggccatgggaaagaaattcgccatgaccctatcgtcacccccggcggcctcgatcccagtcgtatagatctgaagaaactcggcggggttgacgcttccgtcgtatttttcggtgatggtgggccggaaccttgggggccaacggacgttccgaaggctcgccacaaaggctcgacagccggcaccgccaaccggggacacggggggctggcccctgtgcccgaaccgaagtggcgctccggacgaggaggcgccctccattgcgtgggcagcacgacgaccattgcgccggcgctcgatactggggcgggtatccggccccccacgcacatcttcttgggtcggaggcgttgacgagggaatggcggacgaacggcgggaaacggccgccgctcgccgcgccctccgcctcgacgacacggagccggtggtagcagcaccagaggtcttggtggcggaggaccgcccaccggcgcctaggcgctgctgcgccgtcatgaccaagtcggccacgtcatccagccaacgtcgggctggagtctctggatcggggacgatgggcgggtgacgtaggagcgcgcccgcagcctggagcgcgccctggggcgtgctaccatcgccgtagacgaggaggcgacgctccccgtctcgccgtccttctccatcgcccgcgggcggtgaagtcgcggatctttcgaccccttcgaacgcctcctcccgcccaagacttcggcgagagggggacggtggagtacgaactcgacggcgcgggttctgctccccgtcgtcaccgctagcgctcggagagaggttgtgcgccactgcccgttcggccattgggccgagcgggagaagcttggcgcacacgaaagaggatgagggcttagaaagacacacgcgccccctacctggcgcgccagatgacggagcttggggctcctcaccgggagaccgcgcaggcccccctttgccggttcggccgggggcgctcagtgaggttctttgccctcggtctggggaaagttcgcgagagagagaatgcacaagacacgggcgatgtagacaggttcgggccgctgagaagcgtaataccctactcctgtgttctggtggatctgtgtatggagaagttacaaagagctggggagcaagagagttcaggctctagaacccctctattccccccctggctctcgatctgatcccatccccttcttcggtgggtaaggtcttccttttatatctcaaggggaaaccacatgcaccacttctacctactcttcttttgggtggggacccaccctatcttgaccaaaacttggctcgcatcttcgcctggaagctaaatcatagcttgtccttgagtgaggcccagcgccgtcactcgcctgacataggggatcaccctgtcattccttcattaatgggcggagattgcaatggctgcagtccgaatgacccttcgatgggatgggtcatacctacctccactccgccggatgcagatgcaacgtgggagcacagtttgtcttccgatgacgtgaccggcatcagaccagtcacagaccggtcattcttgtccaccacgtgtcagtttagcatgccgcacgtctgctcttctttatacaattacttccttgtaatggttgcgatgaagcctggcatgaacctagccgggactgacgtgccaactgcaggagttagcacgccggccccggctagggacgagttccaggaggctctcatcattccgacgggacggggcgaggcgtgtgacaggccgcctgttgccacctaacccgcgatctgaccggtctgtgaccggtcacacactgcgaccggtcacggaccggataagcgagcgcgctgcgctgcattaaatgcggcgtggcgcgctcgtccaaactgtaataaatgcggttaggtgagccccgctgtgttcacctaacccatacacgtggcgccagaaccacagagggtcggggcgccccagccctcggggtcgaaacgggagcggcccgacccctcggggagacggaggaaggggtggccacgtcaccctcgggcccgaccccccccaagggggtcaggccacgtgggtgaccgcggctgcccaagcctctagtcatgatactcccggtctcatgtcaccgacaactgtggtaggtagtggaaatatttaaaagtttgaaatttttgttcaagtttttgtaaacttggttgggttacggggctccagtgacaaactccaccttttgatccaggcacaaccacacagcctggtagctccaacatatccaaccccttttctctctcaccattttttttggaaattgtttgttattatttattttttttaactcaccacatttccacataactctgccgcatgctcttgcacataccatgttttgctaaaatgctaatacaatcaactagaaggcattttctaacataacacgtctcttgagttctacttggataaagtgacacctagagagtatgtaagacatcacctcctagaaagagaggggaaaatctttcgaatgatgaaacagataagtcatcccaagttgacactaggagaaataccgagtcatttccacattgctaagagtcattgctaggagtcccgttgacttagactatactagattagggtcttcaccttatactattgagtatttatagtagatcaatacatataaacacgatagattgctattacccattaggaggctcgatttgtataaaaaccattacctcctacttcatagctcaccttcgcgagcatccttgtactgatcaatccttatatctgtataaaccattgtctcctacttccttattatatcttgatgagcatcctttactgtccgactatacaaaatcaatactatagtcatgccctaacatgttagcaaaggtatcatgtgagcatctctatgacatgccacatcaaatattggattgatgctaatacatttaactagtttatggggggtataatatgtattttttttaagtttgtggacaaacataactcatgtttatttactcatagaactttgcatccacgattcacccatccataaatcacactatggatatgacccttggagtcaaaatgcccttgtttcttgagaggaataagtctatttcgcatccctcatcttttatccttgatcgaatcgcctcctccaaccgcaaaatcgggtataacacatcccccatctttgaaaaccggtgcaaatcaactcattcggtggtgtcggaagtagttttcataggtggggctcacatgacaatgaggtatggcaaaaatatatggccccacctacaaaaaccaatttcgaaaccattaaaggagtcgatttgcactagtttttaaatatgaaggaggtgttatacctggttttgcggtttgggggatgggattgatcaagggtacgagatgagggagttaaaatagacttatttctttttgagaaacatcaacaggagaggaagaattatacttgggccggaaaaagtacatctaaggtccctcatcttgtcatcggattacaaaattatcccccaatcgcaaaaccagatatatgggatccctcaacttataaaaccgggtcactttgggtccctagacggttttgacccggttttatccgacgtggcagctgagtcagcatgggtcccgtatgtcagtgtgtccactttatcactccctctttttcccatctctcttcatcctctcttctctcccttaggtcccgttcttttctccaacaaagagttggatgaagattaagattttcgtggcacgcttttcaaactgctaaattgtgcgtttcgtgtgaaaactttctatatgaaatttgctctaaaatatcatattaatctatttttcaagtttgtaataattaaaactcaatcaatcatacgttaatgccacctcttttgcgtaaaaaacttaatcttcatctattcatcttcgggagaaaagaacaccacctactcggttactctctctctctctctcaatattctttgggcaggccgacccgcgggtgcgaggtgggagagagggagggcggccgatgctggggcggcgacggccaatgcgggagaaggggagacggtgtctcgtcctaccgccacaacgacgccgtccattccttcctccttgctaaggcctctggctctgatttcgtcttctcccttctccgccgcatcctctcgttctccccacccgccgactccctcttccgccaacgccgtccactcctaccctcctccgccacatcctcataacctcgccagcggatggttgaagatgaagtggctggggtcggatgccccgcggtcatcccgcgcggcggtacctggtaccgcccgagctcctccagcatcgcctccaccgtgaccaacgcacgcgccgcggcaactccgcgagacacatggaggaggtgatgctcgccacaccaatgcctcctgcgagtttagcatcatcctcgacgcccgtctccctcccctcccccactaccgccgcaaccccacccggacgacgcgcgaccattagaattttcgtggaccacccattgtgcagtgccagactttgaagtacaacatgaagtcgagggctgggagaggctttatccttgaggtgctgaaggtgatgtccttgttgtaccactatatttgagtagcccttatcaatctagtgtatcttttggaccctgggggtgtttagatccaggggtgtaagagtttttgtgtgtcacatcgagtattatatagggtgtaaaaaaaactaattacagaatccgtcagtaaactgcgactctacgagacgaatttattaagcctaattaatccgttattagcaaatatttactgtagcaacacattgtcaaatcatggagcaattggcttaaaacgtctcgcaaattagtcacaatatgtgcaattagttatttttatagcctatatttaatacttcatgaaggtgtttaaacgctcgatatgatagggtgaaaaattttgatgtgtgatctgatcagggcctctgtttggttaaatctgaactgtttgcttgtagataatagataagtaactttgtcttgtcagtagattagaaacccccttccccttctctaagtgttgaatgccatttaaatttggattaagattctagtttcattgtctaatgctttgagtgtgttccggccatgattagagcaggtacaatagcatgctataagcgagttataaacatattttaaagagataaaggaagagagagaagagcagcggactacggatctatagccagctgcagcacggactctaagacttaatgtgtgtatgacaagtaggactatgtattaatagtatagtaagcaactattgtatgaattggctattatattggctatagataatttggagctagtagttgactatactattaaacttgctcttatctgtagaaaaaaaatacatttgcatatgtaaatttatatttgtgttgatggtgttctcctataatcataggctgcgaacatcccgaagaagtatactccgaccattggaatttccgtggaccaccgccgcaagaaccgctcacttgagggctccaggctaatgtctagaggtttaagacataggccttgtttagttcacgaaaagaaaatttttgagtgtcaatgtttaacggatatcggaatgggttttcggatacgaatgaaaaaaataatttaataacttgcatgaaaaccgtgagatgaatcttttgagcctaaactaattcgtcattagcgcatgtaggttactgtagcatttatggctaatcatggactaattagacttaaaatattcgtctcacgatttctccctaaatgtacaattagtttttatttttatctatatttaatactccattgtccagagattcaatatgatgtaaaaatttctggggactaaacaagggcaaggtatggctgcagtttgttgtccctgactccttgtatatgtttatcgaaggtattgtcttctagatctggttttgagcttgattgtgctagctcttgtgtcaggctggtgattccactgccgaggagcttgccactgccacccaggtccagggtgattaattacatgcctattgctcgcggtgagaagcgctcggttgaggctgtgaaggtcaccgatgagatgaaggcgttcaaggcctacgctaattaagctccgtgttgagaggatgaaccagcgccatgttggtgcccgccagaaggaagagaagtgaagtgaccggacatagtatctgtttcgttatattcagcagctagtggatgctatcaggcactaaatctaaattttgtttttgtgctggaaatagagaccagcttatcatcattttggtgtcatcatacccttctgtttgatactccctccgtttctaaatgtttgacaccgttaacttttcagtacatatttaactattcgtcttattaaaaaaatttatgaaatatgcaaaactatatatatacatgaaagtatttcaacaataaatcaaatgatagaaaaagaattaataattacttaaattttttgaataagacgaatgattaaacatgtttaaaaaaatcaacggcgccaaatatttaggaatggagggagtatttggtactgatttgcatgctctgctatcgaatgagattcaatagatgtgttgtgtcagattactttgcgctgtgtgtggaccttcatcaatgttgggtaagatgcattatgcatgtagtagaacatatacatgctgtgtgcatagtgatgtaatgtgagtatagatcattctactagtgcacagtagcatatgctctgtgactactgtgaaaaaccttgtgctttgtctgcaagtgatatcaactgagattagtagtttctatctgaccttgactggactttttgacaagccttgcatggtgcatggtttgagttgactgctgtaatttgtgcagattatgcaatcattaggtgctatcctgtttgagtggaatttcattgtttctatttggctggtagctttgtgggaataagttgtttttagaaaaggaggattgctaggttcagtgtgtggattgtggaccttggaatcgattgttgcttgatgctctaaaaaagaaaaaaaaacataaatgcactgaattgtagccactgctgggctggcaatcttgcattgtggtaatgtggcatggcatcttcggatctgatctaatcttgtagagattgaaaggggatgatattctgtgcccactcttgcaccacttgggaaaaaaatgactgatggatttcctgccgttcttttcggctggactgctgcattctcttgctagaatatgttttcaattgtaaaattgatcaaaaagttttttttgtctgattttgcccatcatatgatctgatctctttgggcaacgtactcgaatcatacatcatatgtatttatcagttcacgagcttatcatacaacctggatatatatatgtcttggaaagggatcctctgacttaactgctgtgcagttgagtcactgacatatgggccatagcaaagtgggactcacatgtcagtgactcaactgcatgtgcagttaagttagaggatctactttcatatgtcttacggtgaccaagatagacatgtaggatgtagctagctttgcccatacaacaatgacttacaaaatgaataaaataaagaacgaaaaacagagaaaatgaatataagaacaggttgcgtcaatcattgaatggagcataagttagtgactgagtaatttattcagtaggatacatttagtggtataatccattgtaggcagagtgctttggctaagacagcagttggcctagatcagcttaactcctgcttgcatgttactgctattagtagagtgtagaagcagttggtgtaggttatattagctgctgctcttcaatacataatgccaaaacagttggctacagtctgcattacactaatgctgcttacaagataattgcatcagtgctgaatataaaatgagaaaacagaacatctacaaacttttgctgaagatctctacgacagttaggtttttatttgaagttttctcatatcattttaaattaatccagcacataaaatttcagttctggtacaagaacagcaacatttatctctctcttaaaaaaaaaaaagaaatcacgctgagggctttcctgaaaaaaaaaataaaattgtgcttcaggctaaggacttgttcataagtagaataaaaatcagggattttggtgctatgctacacattcccagacctcgctataaaacagatccgatcactctcctgatcggcgccggcgttaattccaagaaaagaagaagagaagaatctgaaaaactttaagccgctatgggtctgcaggtatgcagatcactctctcaatccaccagcatcatcgtttctacgcttaataccgctataaagatgaagaaatctttaccatcgtctgctccctcgtttgtttgattgattttattctgtgtgtaaaatgtattgtaccttagatttagcctagaacaattcttgttcttccccttccctttgtggcgtaaaagaaattcttaatctcccgtctcctccgctccttgcgccgccaagacgagtcgctgctgaccaggggaggggcggcgagcagagcaggggagaggatcatgatgagcatcacatcctctttctgattcatctctctctcccatcgggtctggaatttgcttgtgttcgttcgttaaccctagcttctcttctagatctggaagaagctcttcccttaatttcagagccttaaccttaatacaggtaacagtttgtttgttccccgaaaagttagttgatccgcccctggccgtagagactagatctgactcttccctgctattacacatctctcatctctttgtctgattcgttcagtgagtcttgtcaaaagatctatgagatgcaatcttcttgtttaagatgctgcaattgttccgtttgaattgtaattttccattgctttgcggcttaacattacaacttctgaagaaagatttagtgtgacagtgtgactgaagcatgatccgattacaatttgtgactgatatccaattgcaggaggattttgagcagtacgccgagaaggcgaagaccttgccggagagcactagcaacgagaacaagcttatcctctatggactctacaagcaggccaccgttggagatgtcaatactggtatgtatactgaatatttggtattattcagttgttacttctgttttgccaggcatgttctggatgtgtaacacaattcttgagttaatgacttgctgtgtttgattacattcagagacatgggtacagttttacatgccatggattatgatcctaacacaagatctcatagatcaccatgattttttttatcactcccccaaaaaatctgtctgatttgaaacaagaccattctttcccatcaaaatttttgggatgtagtattgagtacttccccatttttgtagagttgtaatttacaagtgcaaccattgatattgacctgcacactacaacatagaaatttgctgcatctagcttctgagttctgatagctgtccatattcagtcttctagtgtgattatgtcctttcacaacatgtttgtgaaatgtcatggtttttatctatatttttggttttgtgctgaaaagtagtagaagttactacatgctagatgtgttttgactatctatttctttgtcaaacttgtaaaatctcactgctacttccaaatttttaactatctattgccctcatgtcccttttgtaatcaattagtcaattcttatatgaatctgatctaccttgccaacagttctttatattaacttgttactgtgttttgtgttaacgaagatatttcacgatgacgttgctaactatttctttttctataatcttctgaagctcgtcctggcatattcgcccagagggacagggcgaaatgggatgcatggaaagctgttgaaggtccatatacttctctctgtccttacataaatatgttttcctgtctgtccattctaatactgttgggctgtttcgccgtgctactgaactgaactttttgcaatcttcgcaggcaaatcgaaggaggaagcaatgagcgactacatcaccaaggtgaagcagctcctggaggaggctgctgctgcagcctcttaagaagttatgaactctatgctacatggcttctgtcagctgaacaactctatgctaatctggttgctgacaacttaccattctatcaattcgggatgtgaactatgtacctctttgtgtactgttgcataatttatccatctatttatgaagactattagtcctatgaatcatattatcttgtaatctttcatctctctggctgtgtactgcacaatagaaaaataatggttgtcaagccagttacatgccccaatttcaagtaaccataagcagtaataaccatcatatcctggatcatattccaatctcagaagacaacacaatctaaagagaaaaaagatctattgatcagaaggccaaaaacatatctatatgaaaaatgaaaatgcttaattgttcatagttagatagatcaacaacaccgcactgcacacatatatactgtttactcatcatgttcattcattctacacatgcatatgatctcatctggcaatggcaagaagccaagaactcctgaaaaaaaaaggatgaaatcttcagagatgtccatagcctaagacctgaccacctgagaagaggttgaggcagagcagggaagcagccagcagcgtccctggaatccaccacctgacaccctcgtcggcgaacatggcgcacagcaccaggcacagcagcagcagcatgtagaaccccagcccggaccagaatccgccgccgccgcaccactcgccgccggcggtgacgccgtacttggcggcgtccgccgggtagtagtatattccggcgaagtaggcgaccaccagcagcaggaccaagaacgccatgatgttctgcagcagcatcacggatagcacgatcgccaccggcacgaccaccacctcgctccggcggctgaggagcacggcggcgagcagcaggagcccgccggcggcgaccagggtgacggcattgtcggccaccgtccccggcaggttcgccgccttgtcgtaccactccgtcagggtctcgttgtagttgacccagaccagggccaccacgatgaggagtggcaccaccggagacggcccaccaccgccgccgcggcggcccagcccccacgccggcgaggtaccccggtagtagctcatgatcacctcttcttctttgagctctttctgcttcttatgctacttctgttcttgctgcttttaagcacactacttagtactactcagttgtaagtagcattagcagtgaaaaagtccaggtttgataatatttagtttctgaaatgtggattagtgttcatcttgttccaactaattttaactacctgcttgtgtcctgatgtcaattgtcttggaatttagttgaggtagggacctgcttaaagctggtagatgaactgattttagagaaagatggcatagaggatagtgatttgtaggtcttgtcattttcatgtatgtgtcattctttgtttttgtttggtttggctggggttattaactggaacaaaatcttctattgcctccatgtagacttgggaggtacttagcttagcaacagaaaatgatggctgatatcattaagtttaccatgggctgcttcaaccatacaaagtaaactgattaaactcagtagttgtggactcagtacaactgcttttattctaatggttatctaagaagattgtaaaaagcttatgcaatcaattggattcatttcagagtttcagattagaaatttcagttcattagcaaattccttgattagtttcagattaggagccatactgacaaaagaaggcattagtacatggcaagatgaaccaaacaaagccaacatatccggtttttt

SEQ ID NO: 3916 - DNA, 1458 bp, Oryza sativa
actgattctctgtgaaagaattgaagtgaatcttacctgttcttcgaaaggcttgggaaggaagtatatgtatccacaatcaaggcaaatgtgtgttgctctagcctgtgacaattcacaactttgcaggttgaggcttaaaagttggaaagagcagacgattgcaggcagcataagctctgagaagcagacagaactatcttgagcttaccttttgtgattccgtcaatttccggccaaatctcggaggcgccggccttttcggaagtcgcttcacatcaacttgtgcacccctgagatggcgcgaaatgacagcaggagatgaaatgtaaggaacttgaaggatccaaagtacttaccatgaaaagtacatatttctactagtattactgtctgaattttgaatataactgcataatgagtgcatgtacaggatttcaaagttacgaaaaaattgtaatgctggggaggataagtccttacctgctaaccacaaagtagacagagtctggctttgcctggatggctgtcttggtgaaccccagcttatctgcaggccatagttcatctccaaagaagctacttgtgtagagcacctggtcacctgatttcaggcctgctcttgccgcgttccctccagaatccacagcctaaagcaaatgccaaatgaactattactagtcactaattataacactttctgcatctccagctctaaggcaagctgtacatactgaaggcaaacagatatttttagcaggaaaagagtttggagttgcatttttaaccgtcgtagtagttcctagcttcaagtcccccccccccccccctttaggcataagccagtctggctgattgctttgtgtaacaaaaactcttttcctgctaatatattgacgtgcaatccttttgcacgttcaaaaaaaaaaacagatattcttgataagtcctaactcatgtagaagttgattcaacaggttgttatagttttctgagaaattaatccactaatggcaaagaactagttttatgaattaggacttgttgaagatattcctaataagtcctaactcatttttcctgaagaaattcttctaaaaatgtaagaatttcttcaggaaatatagtgatcttgagacagcaattcaatgctgccccttttttttctctgttaatggatcatgaagataaaacaagagcagggaatatacagtgaatagcaatctagtatgttcttgatgagacagcaatcaagtggtgaaaatttccattggttgatcatgcagagaaagaagaacaggtggcatcatgcatggaagtatggaagcaagctgtgttatatactgacggtgatgacgacgccgccgccggtcttctggccgagggtgaggccgagcggcttgtcaacctccacctcgatgttcttcgccgcccggccgtcctcgcgttcacctgaag

SEQ ID NO: 3917 - DNA, 1615 bp, Oryza sativa
  unsure (1)..(1615): unsure at all n locations
tgtgtgtcttatttgctctatatctctctcccacatatcaaggagacaacggaaagctctagaacatcatcttttatccaatgactaagatttattttacctgttttgtttgtttattgatttaacggctattattcattagatgatgtggcacattcttgttctgttttgggattgtcttttcaagagttaaaataagacttgaaagatttatttatgtgacactgatattgcctatataatcacaatttaacataatgcccaaccaaataagataatcacatatttttacataatgtctgatcacataagctaccttcaagttactacttgggagccatcgtttcttttattcgtggaataagcggaatggcaaatttacaaacgaaaagtgatttataaataaaacttttatataagtgttcttaattaatgatctaaaagcaaacgctgaaaaataaacttcgatgagaaaacctcaaaatcagctctaaatttaatgttgaaaattcaaattttggttgataaatataagcataagcgaaaagatgaggccccatgattacaccgaaaaaaaaacctctcgattaaccatgcgtcatgtccaaaaagaaaaaaagattaattctgcaagaaaatgcttgcaggttcttgaggaagtgaggaggctgatggagttgtacaaggacgaggtgacgagcatcaccgtcgtcgggcacagcctgggcgcgtcgctggcgaccctgaacgccgtnncatcgtggccaacggcgccaactgcccgccggcgagctcgtcgtcgtcgcagccgccgtgcccggtgacggcgatcgtgttcgcgagcccgcgcgtgggcgacggcttcttcaaggcagcgttcgcgtcgttccccgacctgagggcgctccacgtcaagaacgccggcgacgtggtgcccatgtacccgccgctgggctacgtggacgtggccgtgaagctgcgcatcagcaccagccggtcgccgtacctgcggtcgccggggaccatcgagacgctgcacaacctcgagtgctacctccacggcgtcgccggcgagcagggcagcgccggcgggttcaagctggaggtcgaccgcgacgtcgcgctggcgaacaagggcgtcgacgcgctcaaggacaagtaccccgtgccgccccggtggtgggtctccaagaacaggtgcatggtcaaggacgccgatgggcactgggcgctccacgatttcgagcaaatttaagctctcgatttcgaaaaatttgcaaaatggattacgtatagaagtgctcgttaatgggcttgacacgtcgaataaatgggatttccccctcatatcacataattcatttgtaaataaactcttgtccagtcaaatgcatgtgttgatttggacattgttacagatacaaaggtattgatttggacacgttgagatgtccagtaattatttcttgatgcatatgcgagttcatgctcatgcacattgatacactccatccaatcatttactctgcactatcctcatcttcctcgcggtccatcagagtccagcggccatcggcgcctctcaccatgcccctgttcgacgggatccaccacc

SEQ ID NO: 3918 - DNA, 682 bp, Oryza sativa
tttgcaccaaattggtgctagaacctccctcgatatttttgccccggttgtcctttgctctcgccttctcctcaacacccaaagagccaatgagattagtaacactgaactcttgcctcttgtgttttagagaagtagcaaagtctgaccaaaaaggtggcaatttggcaataatgccacccgccacaaacttgtccggcactcacagttgttgttctcaagttcctttgccagcatctgaatctcatgagcctgttccactacagaacggtcatcgaccatcttgtagtcatataactgctccatgacatacagctcactgccggcgtcagaaactccgaactggcctcaagtgcatcccacatgtccttccctgaaagcatgtgcatgtacatgtccactatattgtcagcgagtacactgatcaatgctccacggaacaggcaatccgaagcctcgaacttagcctcctcctcaggagagagaggcggttcacttcgtttgccccgtgaaacatagaagcattgcatccctgtcaaccacagtagtgcacgtgctttccatctcttataattagaaccatcaaaagcatgtggtttcagtgttgcagcaaagccaactaccgaaaatgacctagcaggtttttggattgttggaactttggtcataattcggcatattt

SEQ ID NO: 3919 - DNA, 668 bp, Oryza sativa
aatggaatcaagaatccagaatttaattgggcttgcagaatacaatcttataatttgggcatctatgattttaaatttatgaagttaaaagttttagattttcaatatctacatgaatcaatatttggaattgcagagaacattcatacaaaggcactatatatgtaatactatactaattgcactacctgctcacttgaaaaggccaatcggcgaagttaaggaaataatctgttgtcagatgcaactcataacaggttattactaagtacagtgtagctacttacggttcaggtacataagtgatagcgagaataacacgttgaacagaatggtgaaccctagaagggcgccagttgcaatccagtaccattccttattggtgaagacacctgaattttctagaactgccactcccaatctctttccatcaggtaccttgatacacaatcagaaagtcaagaagacaagaaccactattacctgcaggaacagaataataagatgatcaagagtcaacttacaaatttgtccatccaccttggagaatgcatttcattggaagaaaaggcaatgtatgcataagtaaggggtgaacaccagtaagcccacacccaccatttagggattgcatctgtaacaatcataatttgaatggttcaaattca

SEQ ID NO: 3920 - DNA, 1287 bp, Oryza sativa
tacatgtgaactgcaacacacagcaatacatggcaggattttctatctctgctggaaatttaaggttctgatggagtaagcatatgtaaaagcgaagaagacagtaaagccagccagcactgcagccacgacgcccatgaagtccgggtcatagccaaaatagtccttgatgaaaggtctgacttgctgatcagattgtccagggaccgtgataaaatcctccacatctccgtactgtgacacaataaggccgtatactgtccatgccactggacaaagccaatagtaccaaacccaccattttgggattttctgcagaaacatacaaaaccagatcaacctacagaaattgtacagaaaaaggtttagagcttaaatatagacaattaagggacttaccggtcttgggatgaagaatcctgaaaagagattgaaaagggtgtaaaaggcagcacccaatatggaagcaacctgaaggtttggtgatacggagacgttcatcatgccatagtaagtgaaatagaggaaggtgaagaatgaaacatagaagaaccagaagaattttgctggtgtccattggaacgacatcattgggtagacaataagtgtgtaaatgacagtctcaacgaacacatacggtatctccacaacaacctgacaaaaattcaacagattgattataaaaagttacttatatattgaaatgaatttatatctcatttctactacatgattgtgaccttctgttgcaaagtttccataatattccattggtctgacatttttaaggtgttctgggttcagttgagatacaaagtaatatcactgacctgagctagagcatatggtatagccgagtacattccagctgcccgctctctgtaaaatacagtcctttccacagcaacaacgggttgaacagttacagaattctcaaaaccaacaaacaagacggcagcatacattgatccaatgatgaccaagagatcttttgaactctccctgcatcaaataagaaacatttaaggaaccagtgataggtattcatgaaaatattcaatgactctgcggataataacttagcctgataaaagtacatacatcttgtgaccaaccctccaaaatatagtccccaacattaaagcagtaaataatgcaaagaaaatcctgacaaggttataatcagggcttctccagtaagtccaccattgtttccagaggcagagcttgaactgattaaaggtgctctgcgagtattgactagggaagtagaggtcatcggaacca

SEQ ID NO: 3921 - DNA, 19405 bp, Oryza sativa
aatttctttctgcacaacaactgtaattacatcagcagtcagtaggtctgaaggatgatttcggatgattccctgaacatgtgagatggtcttcatgaaattgtctcgttggatatcaagtaaaactttctcaagagggttgacatgttcagcgggcttccatgtcaaagataactcgtttattctcaaacatgctggcacctcacaactggctggcgatgacttgatgcaacctctccttgtgaatgactcagaggtctccaccgcatttctttctatttgctcttcatcagtttctttattattgacttgatctaaattcccttcattttctccttgattatgttgaggctcttcacataaatccacctcaccatgtgctggtttaactttcttagagtcttgaaataatgaacctgaaatgaaacaaacagatttaactacaaactacaatatcaatcattacaccatacttctaacaagaggagcctaagaataccactgtctgttttatcgtggcataaacatgcttgctctgatctgctctctgcctgatctatcatgctgtctggtgatggttgtcgctcttcggatctttctttcaatgtattctctgcactgtcatgagaattattctggcgtgccagtcttggtgatcttcgtggagtttcaggactacaaaatgaacctcgcttccttctctttttctgagaaaaattacataaatcatgctcatcaactagcctacacttctctgttgtcaagtcacattgcagtggttggttagacaacttaggttcctcaaggctgcacttcctactctcaagtattggagaagaataataatcatctggagggaagaactttcgtagtttcctctttacaatatcaactgaaatacagaaggatgtgttgtcaatgctagcagtgcaagaatgacagaagacgaggcgataaaaacttacattgaaaatgaagtttgtgcttcagaaacaggttctgaatttgcggtttgcccctacatatgtcaaagtcttctgccaccgcatccacattccatttatagaaaacaagcattgcacagaataattcaactgtcactttgtcaacatccaatatgctcattacttcagctatcgcattagctttatcatcctccattggcccgttcagtgataagtgttcatctaacccatctttcgagccgcatacttcatgttgatcagggaaactttgtggtgaaataagctcatggccttgagttgtcctttgcaatacctaaaagttgtataaaattttcagttcaaggagacaacatcactactaaggtacaaaccaacaattttataattcatatcctgcctgttcccaaggtggaacttattaaacggaaaaaatcaagttaggaatagttatttcaaaacgtcaaacctcctaaagttacttgaaataattgttctgcaccttaagattcccaagtgaacagtagttttattgtgtttttagagatagtcaggtattctggtattccatattgattctaacagacttgaaaaatcaaatgtaaagctattttcaaacaaagtgattccatatgaactgtgtataggcaaaaaaaatagtttaaaaaaaatacaggcaaaaaaaacgacctgtatgaaactgatttaattatttgagattacactataatattacctcataacggatccatttgttatctcaacctacctgtgaatgactaggcgtgagactgttggctgcctctgttagtctatcaccatcccgacccctcttagtacagcagaatatatcacatggaagttttccttgtggacttcctgaagaccgaattactttctcacaagcattcagaccaaatggcaaaaccatgaatgcatgttatcatcatatctgaagagaaggaactcatattccctcaaagaattgtcctccacaaacttcgcccatccagtggtcagaaatacatggccatcaagtttctctagctcaacaggccaagtcttcccttctgaattctgaagcgtgcctttggcagatgatggtaatgaagcatcaaaagtactgtggtccacctctggaatgtgaataaggaagccttgaggtatctcctacatatagaggctttaggagttagggcatattttgagccgtttctgcatgattcgagatagcaccttggccgtcaaagccattgctgagaggagatgaaatgcaaatgcaagatgcaactctgtgtgctttcagtaaattgttcacatatagtaggggtacttgtataatacgcacagtcgcacaagcataatatcaatgctcgtaatctgaaactcgaattgcattatcagaccacatgcatcatgcatgcacaaggaaatgaatgttagtatgccaccaacaatttatttttcttgcctaatactcatccgtttcaaggtataagatgttttgactttggtcaaagtcaaactacttaagtttgactaatttggtagaaaaaagttgtaatttttttaacccaagacaaatatattatgaaaatttattcaattataaatttaatgaaactatgttggtgttgtaaatattactatttttttctacagagttagtcaaacttagagtagtttgactttgatcaaaatcaaaacgtcttataacctgaaacggaacggagggagtacaacagttagtatacaaatataatcatgttatcagacactacaaaactatttccccctttatatatttaccaatatccatctcgtctattagaacaaagaccacaaatatatgacaccaaatgcatcatccattatcaatgagcatagcatatggttggctaaaaatagatgcatgtatatgttaattaatgcatcatccattatcaatctccgccagataagatgccacaatttttgcaaccatactagtactccatatgtcaatgtttggggggcccctacgggtaggcaggagagagggagagagagcactcacgaggcggcgggcgaactcgccgaccatgaccttgatgaagtgatgatgcctcctcacctcctccattgagaccgcgggcgaatacagatctcttccctcggttcggttcctgagaagaggaaagtagaggagacgagagggggggaggcggcgacggccagtggtggttggatggggggtgcgttgatggcggagtgaatgaggggggaggcggagcgagcggctctctcctcggcctcctcggcttgtcgtcgtgtgcggccgcctaaatgcaaggcgcgcggaatcggcgcccgccccgcagccgtttctccctccgcttgtcgagcgagagagcgagggagagggggcggtccttctttatcggcacgtggcggcgcgcggcgcggcgcctgcgcctacttggggggaagtggggagcgctcgatgctgggcgtctgttgcgtccagggcggatgcgacttgtcacggttaaaaagtagtccacggaggaggacaacacgcttcccttcacacgtccgctttccgctggcgttgcgctcgatcgtttcgatggtacagcgcaagagttgtaggggtttttggttgatggtgataaagaggatcaccaaaagtgcacctctctattcctaaaactgatttagaggtattatatgaccttatttttttcgtttatgtttatcggttaaaatttaattttttcagctttaaatttgaagctgatttgaggtttttcttaaagcttatttttcagcctttgcttttagattgctaaaaacgagtatgtaaaaattttatttacaaattattttttatttgaaaatatgtcgtttcgcttattccgtgaatagcaacgaagcaaagaagcccttacattgccgattgtccaatcgcattgggcatcaagggaaagagggtgagtgaatgacagcatttcaactatcaatgtgtggtcgacctgacagaccacaagaaacagtacgttcaactagccaaggcacaccgcacattaccagcggttcaaaaaaacaaggcggcacatcacttggcgacagtagcaggcacaactacacaactacagtgataaaatatggcacaggctgagaaaaaaaatgcaagagaaaactcagcagaaagtttattggacagttttatttatagaacatagctcgactcgttgacttcttttcagtcagattattaagcaaactatcctatgaatatccttgccgtttaaccaattcatggaattttcacctgaggtttcaataaacattaagaacatatcctttctagaaagagaaaaaaatccaagagcctgaaaatgtgggggaagaatgaactaaacaatatcccggttggccaagcaaacatagtgaatttgctaaatctgaagagcagaagcaataggtcctgccagactgagaatttcaaacggctgcctgtccttgaccgcattgacagtgagagggcatgaatcagtaatccagaagtggcttagcccatgacccggaccctctgaaattttacaatacacaatgtagttagtaactatatcagtcgaataaacaacagatttttcaacaactataggtgctacaatagccaaaaacaaacaaaaaaaaaacagaaattcattggtctcaaaaagaaaagaagaacaacattcgaccagagcatgattatgttcttgtttatgttgtgttagaagttgaagcctcctacgcaactagcaaagtatcaacaaataccaaatactccatccttcccagaatataagaagtactaaagttggacacggttattaagaaagtaggtaaaagtgagtggtggagggttgtgattggatgagtagtagaggtaggtgggaaaagtgaatggtggagggttgtgattggttgggaagagaatgttgatggagaagttgttatattttgagacaaatcctgaggactaaaagttgttatattttgggacggagggagtaggatttttgcatgatgttcccatacaaaactgtatgatgattaatgagggttatgactcagtgactgcattattaaggtatttgatgaaaatctatttggttttcacttaagaagtccttatgcatctctcactgcagtattattacaatggtctatatttgatgtcccaaagttttattccgtacaaacagctaaaagtttggcaaatttgcaggtagaaactagaagctatcttaataaaaacataaatatgacctaggtttccaagatgaagggtagtctctcttgattggaaaacgttacttgatcaataaaaagtacagtagcaggcaggtgaattggtaaaagaacaaatggttaattattaaacaaagaaaaacaattcaacctaccaactctaccagggatctatgccattcattggaaaacatataagttccaatgaatttacggaaaggtgtcaaatgagaaacaaacaactttgtttgcattaacgcctctagattcaaaaaattcttaacaaggaatcatataaaatatataagaaacttgctacaatgctaatattaaaactttgtgtacatacctccattatcaggctgaaatttctcccacgacttgttggggaaaatgccatgtgtcacgtatgcactaacctttgctgctccatgctctgccaatactttctggaaagaaaattgaataagttagcaatcgaaggaagacaggagaactacatagttacaaacagttatgaagtacactaaaaggttaactgctgtgaaataaacttcctcaatgacaagaccagatgagctgatgatttatcaacaaatttaattacctggcattcaatcaatgtaccacctgactgtaccaagtcatcaactataacaacatggcggcctctaggatccccctcttttatccgtactattctctgttccccttctctaactttgttgcatacaacctaccgagacacgtttaatgaaatcagagggtcaatattcagtacataggaacaccatttcttgttgggatttgaaagtggtcagacaaaaataactaccattgggaaatgttgaagttgcttatagaaccgtttccatgcaccgtcatcaggaaaagctatggttatctgataaaagtataaaggagtatatcagtctacgtttcatcaacgctgtcaagaaaaatgaaagctttaattatgtagtcagagaactcacattgtcagaatcaggtagttcctgaagcctacttttgagtaggggaatgccactctcaaaacatggcaagactgagtctccaaagtagaatctctcctgatatgttgttaagtacaagttattttcatgttgccgtctaaaaaggacaagtgcatttgatatggaagaattttacttacttgcaaagcatgaatatcaaagatcactagacttgaaggaccgcctcttgatattggtatatttgacaaaattctagcaagtgtgaaggctgtggcaacatctccttcatcttccatccgctcagacgtcccagtagggaaaaatgggagtataagagtgaatgacgaaataaacagctttggcagagcatatataattgatagttgctcaaatatgacacttggcgaactaaatgatgctaagaaagcaacatgttgtccgcggattgtgtgggcattcgagatgaataaatttggaaacccatcggcaaatgtcctgaaaaatggtaccaaagtaaatgtaagagataagtttggactaattttgataaagtataataagtttctctgagatagattttaggaaataaaaagattgttcctacctgcaaaattaccagtcagaacatcctaatgagttatcattccaattctaggtcccttgatagaggtacgacagaattaaagtattgacctttaagtcaatttcgataatgtatactcgttttgcttatatgctgatcaatcaggaatggaggtagtacaatggaactaaattttgaatgcaaaaatgtaaatatcagtgcgctgactgcagcaaatttgtgttttcccacaggtcccaagcccccaataaaacacaacaggcggctaccagatcatattagagctgcagatatatatagcttcacttttcatattgacctttccctgttccattaagggccaaggttaaaggtagagctttgtaatcccgacgaactaattgtgaaacaaagcaaaaattgttcagcgccgatgtatcgattcgggaaacattcaagaaaactccttccagttcagatatcctttcccactgagcgctctttcatccatgtagcgggaaagattcccattatgtaccaaacgaattaaggagcggttgagatacttggttggccagatgcaaaattcgggcaacaattaatggtaaacaatcgcaacattaaggactccaggggaaaaaaaaaacaacgagatggtagtaacaaagggcgggtaagaatcggacctccatgagatggagcgcagctcgatgtcgtcgttccgggcgaccacctgctcggcgagctcccgcatctcctcgcagtggaagagcaggacgttcttgtgcgccccgacggcgccggtcatcttcggcacggccaacggcgcgagcacgggggccgccaggtggatgccgctggcgttgctgacgatgctgctgcccgtggcgctcgcgccgccgaggtggaggcttgcgtggagcctgccggcggccgaggcgcggggggaaggcctcgcgaatgcggatgcggggctcgggctggggctggggctggggcccgggcgtcgggttttggcgccgaacgccgcggcgggggaggcggaggcggaggcggaggcggccgttgccatccctgcccgcgccgctgccgaggcccgggggggggggggggtcgttgggactgatgtggtcgagccgcgcgagtccccgcggtgcgttgcgttacatacgcgtgtggcgcgtgccggggagatgatgcgtttttttttttgcgagatttcgcgtgatttatagcctgcttcacggagcggcgtacgcgcaccggcggtgtgcgggtgccgggcgggtgggcgcggtggatgacaaggcggggtggcgtatgcccgaactggtcagccgataaggatgcgaatcgcccgagttttgttgggacgcatgacgctcgccggctcgccgctcgcgtcacacgtgtttaggtgcgcgtcgctttttagggtgtttgctttgtgaattttgtccgaaactcggactaaattaaaatggtctccacaggtgttgggactagatatagtaagtattgcattattgctagtactactactaaacttttaatttaggtggcacaaggagctaaagtgagaacccataaacgcagaatgatgtaagcatttagaaaatgagtattgctatatgtttaactcaattttatagtcgtagatcaattaaataagagaatgttcatatgcattgcagtatttatagtcgttgattaaattcgtacatgagtcggatgactgagttatatgcatagcaattgtcttagaaattttagtgggctgatgttgcagtatttgacggataggaccctaattaaacaacacaaatgatcacaaaccggcatctgtcgtcatccaagagaaaaggaaaaaagctttggttttgttaaattgcccaatggttaagaatcaatttggacaaaataatgccctctaaacagtaaacagtcaacatcaacgtggggaaatggcctctgagatgttctaaagccatctaataccactctctagcttccaccaatgccgtagtaatatgccgtcaagactgatgggtgagagtgagactgccagcgttggcgcccgttctatacaagaatgtctactacctgacgagttttctaagttagaaacgagagaaatgaggtagagaaatcagaaattactttggccgcggacacccgatcaaactttccgggaagcgaagttggcctccggcgggggcacggtgtttgggggtttggtgggatggactaaacggtactcgaattgtccacatgatgacgtacacatcgcttccatcaggcatcatcgtctagtagcagcaaatttccagtcaggctgcggtcagtctgctgcacgattttgcgacgaacggcgtcgatttccacgtgccggcaaagcacctgtcgccgttatccacgcgaagattaagctaattaactactactagtaagctgcacgctggtagtagcaaatctgtcgatacgcgaagtcgcgagagctccgttgttccaaatctccagtacggttggggtctgcggccaggggtacgtgttggaccaaccatctgcagtcctgcacgctgacaaacacgaccacacgcccacaccaacccgaacaaacagagcaataccgaagacagcgatccagcttattttgccctgttctgaatcctgaattattaagtttcattcatagggcttgccaatccaaattgctctgtttttcttccccaactacgtggggccgcggccacaggtgacggtgactctccggagcctgaccgctggcacggccggctcgaccacccggaagatgtggacccggaactcggccgcggcgacgagctcgaacacgcagtagtcgccttcctcgaggcagttcccgcgcgcgaacgcgcaccacccgcgcgacagccggtcccgcgtgttcgggatgtacagcaccgaccacaccttcccccccgggtctcgcagcaccacgtccgtcctctcccgcggcaggtgctgcctcgagaaccccgtcggaaacctctgcatattaacacacacacacacacacacacacacacacacacacaaaatctgctcatcaggctgtcacacgattcaggtgttgtgtgtgtacatacgatcgatcgagtagagttgttcgcgcaccatcatgaaggagtagtagacgtgcatggtgctcatgcggatgacgcagtaggggagcggggaccggaacgcgtgggcgatctccgtggcgcgctgccgctcggcggtggcgacggcgcggcggcgggacacgtaccccttgtagcgccggatggacggcgggatgctggcgagggccaggtcgtcctggaggctccgcgtcttcgccgcgccacgcctcgccgcgccgccgtcggcgtccagagccccctcgggcacgtgcctcggcggagacgccgacgatgcggggagctcgcacactgggagctcgtcggcgtcttcctcgttcttgaccgccgttgatcctgcagaagagtacttaggagcttttgagtaacgtatagttgtgtaatactaacaacaaattaaaacagttggcaacgaaatcgcacaagctatatatatatatatatatatatatatatatatatatatatatatgggctgtgtttagatccaaagtttcgatccaaatttcagtcctttttcatcatatcaatctgtcatacacacaaattttcagtcacatcattttcaatttcaaacaaactttgcgctgaactaaacacagtcatggttcaatataattttgtcatgtcactgtcagcgcaaacccgggcctttctgcagcattaggctgcgtgcctaacatatactcccttcgtcccaaaaaaaacccaggattgagttttttttttttgggacggagggagtagtgacgtgatgtgcgacatcggtaaatttgtccagggatttgatgatttgatatcgtcgaaagtggagtacgtaccaatcacgggccggtgggagtgggagtgggcctgggatgtttctctttgtggggtttagtagttggaccctcatataggctgttcccttcaccttcgttcttcaagcccatctttcaaatggagtcttggcaggaaattcagtgatgttgcgactttggaagtggaaccgtatgaaaaacttgtcttgtacatgatggtcaagttacccacttgccctaaacgttaagggcttgtttagttcgcgaaaagaaaatttttaggtgttacatcggacgtttgaccggatgtcggaaggggttttcggacacaaatgaaaaaactaatttcataactcgcctagaaactgcgagacgaatcttttgagccaaattaatccgtcattagcacatgtgggttactgtagcacttatggctaatcatggactaattaggctcaaaagattcgtctcgcgatttcctcctagctgtgcaattagttttttaatttatctatatttaatatttcatgcatgtatccaaagatttgatgtgatgtttctggaaaaaagtttttggaactaaacagggcctaaatatttataactgaagggaatatatgaattcattgtaccaaattatctaatggtacgatttatttaacacaaattcttgatacaattcgtggttatgataatatggtattcttaatcatctttgtagcgcaagaactttcttaagtgcccaattagctcaactcgcgccttgtaatccctccgtcctagaatataagaagttttaaagtttgacacagttattaagaaagtaattagaagtgaatggtggaaagttgtgattggatgagtagtggaggtgagtgataaaagtgaatagtgaatggttgtgattggttgggaagagaatgttgatagagaagttgttatattttggaacaaatcctgggggctaaaagtagttatattttgaaacggagagagtacatattattaatgtttattttttgttgtaaccagagtatgcactccatgactatgcacatacactacacgcatgtccataagggcgccctcctattagcaaactcttagacagacgggtctaagtggcaaatcactggcctcgttgaatttctattactagcgtattatccacgtgttgcaaaggggttctaattaataaaaaaaatatcattaactagttattaccattatttttatatacattatcttttaatttctatataaattgttaccgacatgtgaatttttgacctcacactatcatttttccattcccataagtagagaattggtggttgtcatgtgggtcctctagccccacatgtcatttctttattctaaaataatagggaggtggtggttggggtggtggcagattcatcactcaccaccacatacaactactactactttttgaagaagtatagattttgaaagccaactcatatggtttaaatcgtctcttcttccttctctcgtaaaaccatacaatcttaatgatttttaggtcaaaattcattagtatcaattaaacataaaatatattcacctcgcactatatatgcaaccatatgcaaactatataaaacacaggaagccttttttgttctattaaacatattacatcttatttatacatagtgtaacttaattttccgcattaacacgatagagtcttcatgcagtttacaatatttgtcatcatcaacatctgatgatgatcaatgaccatatcttttttgtggttaacgggagagtttcttttggaggctagctagctatagatagattaatggatgtacactattatctatatctatatatcttatatagttcatccccactaacaacattaattactatttctctgcactatgagttagccacgtcattacatttagctacagtcgttggattacaattaaacgccattcatttgcacgagcaaagttgctatctatcccccactgttcatgtatgtagctggcgccattactacgttgttctaaaacggcagaatatgtccataaatccaagaagctaagaggccatatgcatgaaacttaattatcagacaattagaaggcttaattatcagacaattgctatcattttttttctccccactaaagccactatatagcactctgccatttaggcactcttttctttgtgttgtgtatgtcgtccaaaacttccctagcaacaagatagaatatttgatccttcctgccacgcctggattattgacaccactgcagcaatttgggatctccgagaaaaggaaaaagaaagtttcccttcaccgatttgaattgttaatattggtcattctcaaatcttctacaaggtatgattgtcgttctaaagccctttatgtttgaagcttagctatatagcagcactgccagcacaagtactgaacatttcttctttggatagtaattatttgttagttctgaaatataagttcctatcctgaatcctgcgtttcttttcctttaattagagatggtctttacgatccacatttcctccaagttaaaccttcttattttgatttgatgttgtattctgcttgtggtgcaaaatacatatattatttttgttctacgatatgtgataaatatcatacttatcttactgctaaaatttccgctacaacgcgcggggaatcttatagtataataaatagatcactactcctcccatttcatatcttgtcattttggatctaaatcaaacttctttaaatttagttaactttataaagtttacaggaggattcagcaacacttttaagacgaaacgaatatttactagtagaatttataaattattaattcagtgttgcatatattactatacttttatatttgtcaaccgagttacacaaaccaaaacattctgtaccgcgagacggatggagtaaattaatactacctccgtcccatattactcgtcgctttaaccttttgcttgtaacatttaaccattcattttatttaaaaaattagtgcaaatataaaaatagataaatcatacttaaagtatttttgataataaaacaagtcacgaacaaaataaataataattccaatttttttgaataagacgaatgatcaaacattataaaaaaaactcaaagcgacaagtaatatgtgacggagacagtatatactccctccgtaccccgtaaaggaaatcgttttggacagcgacacggtctccaaaacagaactttaacttcttgtttctatgaaaatatttattaaaaaatgatatatgtatattttgatgaaagtatttttcaagacaaatctattcatgtaatttttacattttcaaactcaacaacttgagagttatttatgatttatatttttaaggtttgatttaaacattgttccaaatgattttttttactagcatggagggagtatactgtataatagtggttcttttcttacctggttccggtgtccaactggagtccacgatttgcaacggctggccaccactaggcgacgcgcggtacgtcaccatctccttcccaaccgaatccttcttgggccgcgcggcatcacgcgaggcggcggccgtcctagggcgaccccgtttcttgcgcggccggtcgccgccgccgcctcccatcaggtcctcccgctcgcacgccgtcctgtcgaacaccatcgcggtgaagcgcgtgttgccgtcgtagcggaacacgacgaactcgagttcgcgcagcgcctggtcctgcacgaacttgggccagccggaggtgaagaaggtgccctcggccgtccggcggatgacgaccagccacgtccggccgctgggcccctccagggtggccgccatggacgcctccttcaggcccttggccttcctcgactcctcccaggggatgtgcttgcagaagtttggcgggattttctgcattattcacacatgcatgcatgatgcatatatatatacacaaatgacattatttcgagacttgcatggtgcatataacagattgtttcgagactacgcaacgcatgcaaagctcgctttgcagaaaatgcatgcatgcatgctagcgtgacgaattctctctgcgcaaagtattggctagccatcgtcccgatccaaaattgtgatcgccatatttcgcacgatggcaacaagtgtaagctaagtgcacatatgccagacaaaagctggctaaccggcactcgtgcactcaccaggcgctgcttgaagtcgccgacgagcaccttgaagaagtgcggccgcctctcccccgacgcccacggcgacttcttcttccctcccgcccccggcatcgatccctcctaataaagcttctccaactctcactgctcgtgcgccgatcgatcatgcacggatgctcacgcagcagcagcagcggtgcgcgcgccgcctacgcgctcactctcacggcgaggagagcgagaagcttggcgcgcgccgcggggcgcggggggccgggagaagagaaaggaaaagagacgcgagagctcggcttttgaggcgggggcctgccagttttttggctgtcgcgatcgatcacacattcgcacactcatcactcactcagcagcgtcgcgtccgcccgccgcggcgccgcgccgagtggagggatgtatcaagcgtcggtctcctactctcccctccccctctcgtggctaaatatcgcctaaacccccggatatcgcggggggcggtggacgctcggtgcgcccgtggaacggagggacagagggggcaggtcgctgccatgtggggccatcagcgcgttagcgttaagctgggcccacatgtctgtgacaggtagctggtaccgcccgttccgtggggccggtggatattgctgcatacacacgctgtgtttctaatctaatttgatagtatcacacggaggcgcggctgctcatgaaaaccatgctacatggttgatgcatgggttgataaatgataaacatgtgcgatggctatttatacgtgctaattatatagtaataatgtgtgatattctttatgtacaaaatatgctctgatatctagtgaaatattggatactgttatcgcgagaggacatgtacatgacaccaaaataatggatacgatgcgtccacaatatataagccataacatatactgttgtcacatgaaagcgtgcctgaggcatcatgatatcactgtgtaagagctcacctttttttggatggaagtgtatatttcaatttgttgtcacatcaaaagcataccacctatcattggtggtaaaaaaaattgatcagagcaaaagtgcccaataatggaggttatgcggtggttttcccagagttgaataaaggttaggttaaacaggttgtccacttattgttcatagtagatcgttgatgcttaattcttcatagaccattttttctcaactaagattttcattttcagtgccctctaagtctaaataaaacttttacactattttctaccaagtaacttgatcacaacatgacaaaagaccatctatttgaagaatgaccacatatgtcgtcgtaccaatatgcatgtagtactagtacctttctttttccaatgttagaaatagtgtagtacattcgtacgggtggccgaaattgcaacagttccatttctgtctcctttatctcactttatctaatctaatttgatgtagctgtagctaggtccctgttcaatcaaaatggaatttgctcttcagatcttctcggtgattgttctcaactttagaagctacagtaaagtgaagaatcggggccagcagcccagcaccagcacagtgtcaatcggatggacgtaattttaacaccctccaaagagaacctggtcatgtactataaaatcacattggatctttgcttttggaaacatatgctgtggccaaagccatttcaagcaatgcccccctactatgaatgccagcttttcccaatggttcctgtctgggcatcgcactcacgacccccgggagaatcttttctggtgtctgcaccaaagaaccaaacatgcatacggccaagtacgtacagaaaacaatagcaaatgtagcaagagcatcgaggtgaacatagaaacagtaccgagaaaggaactgtagaaactttattccagatttatcatttattacccatccctaggacggtaacattcttgtgatgaaaatacatatgcccatgcttaaggtaactggatacaaggaacttcacatcacgtcgaaaaggaaatattacaatacaggcatgaacgacacggggaaaaaaaggcttgaagtaactccggtagactcatcagaattacagcgtgcagtactgaacaagtagtaagattttgcaggaaacagttcatagatatacatgactggaatagatccggataccggatgaccagattcaccggtagttgcggtaaagtgggctgtacatgcagctctctgcatacttaaccaggtcctttggccgagggcgcctgcttgccaaacctacagtcaggaagaacaagtgataagcaagctgtaaaaaggaaccatggacttatctttgaggaagtgaagataaattaggatgctgaccaagttcatatgcctttgctgcaacgttggctgcaatgtgggcagagatctttctgatgtttgagaagggaggataagtaaggccctgtcgaaattctcttgtgtgacctgctgagccagtgcttccgctgtaccaggatcagaatgtatcatcagtgttaacttgccagttcaacatatatgccaaagaagatctaaggatgaatcaatccgcggaattacgctagaaggaattcattcaaataattcattacagcttgcttatcacttgttcttcctgactgtaggatcagaatgaattatttgaatgaattccttctctactcttaccacctcattttgtgactgatttggactaatgcaaatagtactgcatcgagaacaatgtaatctcggtaaaaagaaaaggtacttgtggctttagttatatagtatggactatggagcacttacaagctgcaagaagcatgtcatcatgaacacggattgcaccagacatcaccacaccaaggccaaaccctgggaagatgtaggcgttgtttgcctgtatgacagaccatgatcgtatttttagtccagaacagttgcaactgataaaatctttgcaataaagtcaatggtgtttattgttaagacctggccaggcacgtatattttgccatcatactccaccggatcaaatggacttccacttgcaaacaccgcgcggccctgttatttcagattgttataacaaaactattgcccatgacaacattgtagtaagcactagggataacaaattccgagaaaagaaaaaaagcaaggtcattactgatagcgatcataccttgctccatgtgtacgcttgttcagcggtgcactcagactgagatgttgggttggacaaggcaaaaatgacaggcctctaggaatttgtgcaaaaaaaaaaaaacatcagctgctaacttcagtggttcaacagactcaaaaatattaaattgacatggtgaaatttacctcattaaatgaggaaatggcttcaacaacctcctgagtgaaagtttgcccctttccagatgtgccaatcaatactgttggtttgatagtctggaagatgcatttgagttagaatagagcctttcatagttattcatagtaaatgcaatgaatttttacatgggtgtattcatactttgactgcatctaagagatttccaacaggttcatgctcatgggcccatggtttcttgaagtgttgaagggtctcctttcgtgaactgacaatcaagccctgtcaatttattaatatccacagttagcaagtaggaacaaataaagttctgaacccaaacagtgaaattaagcaaggagatctggttcttttcaacctttgaatcaacaagccatattttcttgcggcactcctcaattggtgctttggtctgcatgtgcaaataattattaggtcatatagatatgtgtacaagccagcaaatgacccccccccccccccaaaaaaaaaaaaaaaagatgcatcacctgtcttgatatctcgagagctataagttctgcaatgcctgtcccagcctgcaagcacaagaatgaagatattgtttgggagaaaatgtaagtcaaatctatatcgatgaatacacagtcaattaaatgccattgagaagtacatgccacaaatatattgtgtaatatctatatagctcataatgagaaaatatatatagttagaaaaatggaagaacttatcctgatagaataagcataatacagtattttaaatacaaaattgcaaataactgtcgcacgaaggatgcaccagcaccaacttataaaatagatgaaaatggtcagtaaagaagcagataactacactaagatagactctgaattgtacaattgatggcatttggagttcttttcagttaatctagcaagtccacttcagatattgcagctccacaa

SEQ ID NO: 3922 - DNA, 2229 bp, Oryza sativa
agcccgtctagctcagtcggtagagcgcaaggctcttaaccttgtggtcgtgggttcgagccccacggtgggcgaattctgtttttttatcactcttttttttatctgaaattaatctgacaaatttttacatcagattgtttaccaatcaccatagctatttaggaaaaaaattaacgaaaaatttaaaaaaaataagataattggaataagagcatcactcttttttatctgaaattagtctgacaaattttacatctgattgtttaccaatcaccatagctatttaggaaaaaataacgacaaattaaaataaaaaaaaaagatatctggaataagagtctagagtccatgtggaaatgtggaaatttagaactaactaaaattcgaaaatagaaaacaataaaattaagggatttaaaagtagagtcaggagtaaatacaattttgaaattactaaaattaatttttttttaaaaaaaaagaatattggaggaagattctagagtccatataagaattcaacttagaaataatgaaaaattagaattgaaaaataatgaatattaaaagaagagtctaaagttcatagaaataaatttaaaaataatggaaatttgaaattagaagataaggaatattgaaataagagtccaaagtccatatacgagtacaatatataattaactggaattcataatttaaaataataaatattgaatgaagaatttagagtctaagtatgaataaaatttataaataacaaaaattcggaattaagaaacacataatattggaagaggtgtctatggttcacatagaaatataatttaaaaataacttgaattaaaatataattaatgactatcacgtatatacaattcaatttggttagtttggttaggtaagcacaaaatttagaatcatgttaccatttcaatatattttaataatgaaatatagaaaaataatatgatatttgtaagagagaaaataaagatagtagccgcacaatctgcgccatgctagttagtggaaaagaaatttgtccataattagttgacccgttgacataaaaactagaacaaatcacagtaataccatggaataaacattattcttacttggtcaaactagaacgggcatgatttgtttatgcgtaatgattggtctattttagttcaattagatgaaatagcttttatttttaggtttaaagtgatttttagtttattttttgttaactaggatagacaaaaattacgtgaaccaaacaagttacgcattctggcatgcacatggcaatatgcctttttgttttttcctacgcccggaagcagccaaaatcagagcaggaaagttcaacgtggcgtccattgattcctcttccctgctggaaagcataacatcacattacatgtgcctgcctgagtgccccaatcgccgttagggtatccacaatgtgagacacttatagaataccctcactaactaagggtactctaagagaactcacctttacattgcagggtagcctaatgagtgtcccaacaaaaaaacccatttctctcctcttcatctctttcctattctacccttctcttccccctcccccctctcactgtctttctcacacgcacgcacgcgagagcgcaccgagtcgccgtcgccgctctctctcccaccactctctccctctctctctctctcccccgtggaaggtggcagcggcgacccccggagacggtagatccggcgccgctgtggccggatctggccccccggcggatggagcggcgtcagccgtgccgcattgaggtggcggacggtgagcgcgcggcgagcttgaggcggcggacggcaagccctcgcgctcgaggcggcggatggtgagcttgaggcggcggactcgacgagctcgaggcgaacggacgaagctccgtcggcaagggagacgagagccgcctactttgctgcagatccgtcgccctcgccgcggatttggcatcccagcaccgtcccaggtcgtcgccgcctctcgcctctccctctccttctcccgccacgcctccctctccttctcgccgccaccgccggagccacacctctctcccgtcgctggcgaccgtgactgagcgcgacgaggagctccatcggtatcgccaaggaggagaggggagaggggtggaagaggaaatcctcgcggggggcggggggggggggggggag

SEQ ID NO: 3923 - DNA, 1958 bp, Oryza sativa
aaaatacgaattataaaaaaaattcatataagacggacagttaaagtttgacatagaaacttagggtttgtcttttttcgaaacggagggagtagtatagaaagcactcacgggtgcatcatagaggatagtataacatgggttcttacgcatacatcttgttatcactagaatcctccaacttccccttctgttgcatccccatgctaaaataagaacagcctagccaaaaccctctattaggaacaacagaaagccttaaccaggagcaacactgatgggctccattggcaacggccggaatggctcggaggttggcatacagatcccagcgatggggaacaaggaagtgctggagcgacctgccataccaagatggccacggctaggcgtcgtcatggtggcaactagagctgttgccctggtgatggcagtgctctcaatggctctaatgatctctgccaagcagcggggtagtctcaagatcttcggcatcgagatcccgctttatgccaattggtctttctctgattccctagagtaagtatcaaagctgctctatttcgaaatgtgttaagctcatacagagtactgagtcgttctgattttctgatggtgttgttcgggatttcagatacttggttgggatgtctgcagtttcagctgcctactgtctcgctcaacttttattgactgcacacaaggccgtgaagaatgcccctgtggttcaatccaggaactatgcctggcttctgtttactggtgatcaggttcgtcaatgcttgtccatttggcttgatcttaactctctgaaatcaccggcgcttgccacggccgcaggatgggggggtcgccggcaccggtagagtagggggtgttcgctggcaccggtagagtaggtatgggggttggcctacttcgcccaattggtgggtctgctcctgcccattttgatctgattttgcaatgacgaataggttgccttggttttttatgctgtgatgcttgctagattgcatattttatactctttattttcatgtttcttgtggtacatcaatgacccgttcaggattcctctttgtattttatggaacagtcagtaaccagtactagtataggcagtattgattgggtgtttggggttagttctataaaagatgagcaagttcttgctggcaagtggtatcttggaacagtttatttaatcttcttgttgtcaacttgccacgtccatatgcatgctacatcaaaatactttctgcaacttggtttagatttactgtttttccccaagccataagaaatcattggaatttttctgattcttgtgcatctggttgtggacttacatatggaattgcaatcctttctagatgattgaacttgataacctaatatatgcaagaaatatgcggaatataatcacttcatttaggataaattatttcttgtgtttttgtgggattcgtatttgaaacagacttgcaatatttgaacaatacttctacagatatataatatgtggttttgttgtgatagagccaaaaccaagcaaatccctaagcaccaaaagagctgggatttgcaagaacagaatactgtcgggaacttcttaagcaaactccatacctaacaagcaactaagcaaagagaaaaacaaccatatttgtgcaagatagtggtcctaacctcttatagaaaatgttcttgggatttttttttttggttctacacagtttgtgcaaaaataaaaagtttgatgcacaacaatggtcttttgttccaaaacctcgtagcagttgtcagttgatagctgatgagagtgatggcacttgagcctgagtacacagagctcaagcattttacacaatttcttgagggcacctccacttaatgtttttgtgaatggattttccatggtaaaatgcataaatgtgacgtagatctttcaggat

SEQ ID NO: 3924 - DNA, 2401 bp, Oryza sativa
aggattacaaaaggagcaacctccacccttgcatccatctctctatttatagcctaagacccctaagacattgtctcaaatacccatagggcgaaaccctaccctggacttatcttaaccatccgctgttccttagactcaaaggaagtagtgcagattgctgccacgtagtcgatccgagctccccacgctgtgcggatccgcgtgctcatcacttgcaccaacaggaaaccgccacgcggccacgcaagaccgtgccttgccccgcgcgcgctcgcgaaaccgcgtgggtcccacgtgggactcctccgcatcgaaccagtaagcgccacgtcgtcttggagagcaccctcaccaattcccgcgcgcgccttctcctcccttgcgcgtcgtccgaatttggcgtgggtcacgcgagtagtcgatctcccgcgtgagagcgcgcggtcgagtccgcgcctgccacgtgtccctcacgcgcgccgtcgccgaaacctcctgccttgacgcccttgcttgccgagctgggccgtcgttgcttggatcatgctgtcctgctccatcttggactgggccagtccggtccagccgtgtggcatcctggccgagcccatgatcacgatggattggtggcctccctgccaaccaatcacagcacacatgcacatcacctcgtgcatgcatgcactgctcaagctaatgcacacacacgcacagctcgcatgctagcttgcttgaccaagtcttccaaccaagtgcatgcacgtgcactttcctcattggctgcatgctacagtaccatatgtactgtagcactgcttgctcctttcctctgtcggctttcttcgcgaatcccggcacttgcacttttgcacttgaccttgcgaagtccgttgcaaagacctcctcacacggtgtccgtccaccctgtgcaaccttgtatccaatcttgtcacccggcatccttgatcgttctggacctcaactcctccctgagtctagtcccgatctgccgttgaccaagattgacatcgatcacctgcacacacataaaccaaacaaccgttgtcttggcacagatattgcaacctggccaatgttagtccacgcacacacttcttgcacttccggtacttgtcaatttcccatcacaaaagaactataaccacacatggtttcacagtatgccaagtggatcttgcaagaagagtattctgagtgtatgcttgtcggaatgcctcattgtggacaaccatgattactgtgattgctacacatggtgaggagcacgatgcagtgaacatgtttgatgaaatgccgagggaagggtgccaccaaatagtgacaatgatgaccgtgctctttgcttgtatgcatggagggttggtggatacggggatgagtttgttgaagcggatggaacccggggatatcagagttgtactaactgttgaacactatggttgtgtcatgtgtgatggatatgcttggtaaagttgggcaggtggatgaggcacatgctttgatggagcaaagaatgctaatggaggcaaatgtggtgatatggggaacattgcttggtgcatgtgaaagacatgagaatgttagagttgggcagtgagcggcagagagtacctagaggccgagcgatggaacgatggggtttatgtggtgctttcaaacgtataggctgttgccaggatctggtgtggtgtggagagggtgaggaggaggatgacaatgaggaaaatggcgaagtctgtcagctgtagcctataaatctacaaagggattgcagttgaagtttgttctgtctcattgattcatttgcagtaactagtagacaaatgttattttatgaaatcaataagtaattaatcttatgcctattgtcgttatggtgccattttcaattgctgatagtatagatggcgcatcaaaattatgatagtctaatttactggcataagatgtgtggtaggttaaattgattagttcctttggataatatagacatagtcatgatatagctggtttttatggaatgaaaattagttacatgaataatacttttaactagtggcagataacagttatccttcattaggcgcttgctgcttgtttcaaatgctgtatatgacagctatatcattttttacaattctttcaacacttgatttactcaaattagattaatatgttatgtttctgtccactgctagagatatgttccatcaaattctagtactaatagaatattctgcagtgtgtgagatattaaatcttttagtaaaatgtccacattgaataaatcttaggttccccgcaaaaaaaaaaagaataaatcttaggttaagatttggacaagcatattttacctcagagaacaaaccacatctga

SEQ ID NO: 3925 - DNA, 4661 bp, Oryza sativa
aaaccgggactaaagatcctatgcgcctgacacagtctgacatggaaccaaccgggactaaaaatactaaagatgatttttaatacaaaccggaaataaagattatctagtcctatttttcttataaaccgtgactaaaaattatttttagtcccggtttttaatgaaaccggcactattatagattttggtcgatcaatcaaaaatggtttctccacaagtgcaggttgcccccagggcaagacgatgctgtagatggccccgagagcgccgccgatcccagcgtatccgacgttgtcgatggcctcatgcaggggcgccggcgtgagcggcaggaacagggtcgtgtacgtctggacggaggagaccagcgacatgtagacggcccacgagatcagcagcggcagccgccacgggacggcgaggaagaaacgagggtcggggagcacaaggcccaagcagcagattattatcatgcatggcacaacaccgaagcgcaaccacagcatgtcggaggacacgtccggccacgcctccccgactgtcagcagcggcggcggcgccgttgtcgccatggtaactggtggagaaaccatctttactcggtcacctaaaatttataatagtcccggttcgaatagaaaccggaactaaagatgtttttagtcccagttaaaaactttttgacctttagtcccggttggtaacattaaccgggactaaagatcatttttagtcccggttcaaaaaagttgtcgggtcgagttaggtcccagctcatttttagtcccggttggtataaacaaccgggaccaaaaatcaactgagccgcgcgcaccagtccaccatcctctcccctctcattaattatcccttatcccttcgatcccaccgtcctctccatcccttcgctagctagcttatccctctcagcctcaacctcctccatccattctcctctcaccttcctcccccttctcttcctcctcctcctcctaccacgtgaggccgagcggcagcggcagggaggcgggcagccgagcaggcggcaggcgaggccggcgaggcggcgggcggccgacgaggcgagtctagcgaggcccgcgaggcggcgggcagccgggcgggcgaggcccgcgaggcggcgcgcggccgggcgggcgagtccggcgaggcccgcgaggcggtaggcggccgggcaggcgggcggcgaggcccgcgaggcggcgctcctcgggcgggcggtgaggcggcgggtggcggtgctcccaatgcggcggcgctccccaggcggcggcggagcccgaggcggccggcgggaggccggtgaggcggcggacggtcggcgcccgatctctgtgatgtggttttttttcctgatctgtgtgatatgtgcagccgatttgtgcgatgtcgattttttttctgatctgtgtgatgtgtgatgtgtgaatgaatttgtagagatgtttttgtgattttgtgaatgatttgtgatgtatttggggataaaaatgcagcttgatgtatttggggattttgtgattgatctgtgatgtatttggggataaaaatgtagcttgatgtatttggggatttttcgaatgatctgtggtgttaaaatgattcgtggataatatgaatggtggtgctcgaaatcatgaaagcaggaaaaaaaagaaaaaaaaacattagtcccagttgttaattctaaccgggactaaatctttagtcccggtttttaacactaaccgggactaaaaatccatctttagtcccggttatttaactgggactaaaaatatgcatctttagtctcggattcgtagtcccggttgtataaccgggactatagggggttgtgaactggtattaaaaagggtttgtccaccagtgtgtgaagacgacgtaattaacaacacgtactgcagggtttgagctgtacttcgatttgactgatgatttgtatttacggcctacgtacaggcgcgcggtgcatgaagatcttttgtagcgaggcgagcgtgataaagttcgaatcggcaagcaacgtaatcacgtatccgattccgttgaaaaccaacgtgatgcggtccgtctggccgctggacagtggggccccaagttgccgaccggaacacgactgcagcagcatatcccttgccgctgttcgtcgggggctttcttcttggcgcgcgtctttcttggcaatgctgtattgctgtgcctgtgccctgtgagcctctgacctccgttcttgtttgagttgccaatcaggctgtattgaatcagccatggataagcttgaggctttagcccttgggagcagccatagcccaagtacgcgacgccaacctcgccgcggcatggctcgagtcctgctccgacgagagcctcctgcgatctgcgcctcggcctatcctccccttacacgctgccgccgcaaaaagatccctcagttgcctcgaccgataaatcttagtgacattttggatgatctcgttcagtcattcgggcaaaaaaaagtttttgttgctcacagaaaatcacacttgaacattgaaattttcttcaagtcagaatgcattcttgatgatcgaactatctgaccacgagcagcagtggcagtagtacagtgctagctgcaattcataaccactgaaatgaccttcaacttgaagttcaatcttatccacaagttcaatcaaaaggtatgccccctgtgctgcacaaacgacgaatctaacacttcacctcctggccaaatgtaggttcactaagaggatttgggcggaaatccagatatggacgcacatggacctccaaatgggcaaatgaaatgattgcccctcgatcgaacatcggtggaatctcgttgtcgagtccactaacaccctaagagtccctctgcaaacactactgatgctagtcacttgagagatctgggggatcggaatgcaaggatctttcgaagcacagcctcaaccccggcctcaattcttgcaaagatcaaagaagaaggtagagcttgggtcaaagcgggagcgactaggctataggagtttggaattttaggagatatcacctaacgagctttccttcttgcgggctggttttcttagattggccctgtatatactttgtataatttttacccactctattaatatataagccaaagcttttgccctcctttcaaaataaaaaaaatcttatccacaagctttcaaactagtactccctccgtttcaggttataagacgttttaactttggtcaaaatcaaactgttttaagtttgactaagtttatagaaaaaataataacattttcaacccaagacaaatttattatgaaaatgtattcaattattgatttaatgaaactaatttggtatttataaatatattcaattatttgtctataaatattataaactaatttgactatatttcacatccgcagataaaaaattaagtattcggataactacacaacttatctgttataataaagggtacagaaaatacctatttccgtagtagaggtcgtggaacatgtctcgtattcagtttctttaccttcttcaacacagtactgaacatactcagaaatgtgaataatagcatcagaaatttgatcatgttctgtacttcattcaaagcagttaagccaacaggttatgtggaaggcataacaggaagatcaagctctatataatcgttaggagttccagtttgttgacctcttttctcttgaggttcaacaaacttctgcccagatagcaccactcatccaatagatcaataagttcggtaaccagagtatgacaggctattgtttttttttttttgaaatagcaagttttgacttttgaagggagaaagagagagggtacctctccgttcaaatttccaacgtgtatgctgtcctcaacagatttttcatcgtcccctgcgttcccatctgcagctaagcatttaaggcattctgatcactacaaaacaacttatactagtgtacaggaaacgcttcttttgctgaagggcagcaaaataaaacgtattaactaatggacacccgaagtattattttatgttataaaagatagtcgatataggagaacgacgactaccctttccgatcgcttcagtcattgatcactcaagacatgccagatgacgacataggaacacatgatatttgttaacgagtttcagccgaaacctacatccccggggctctgattatgggcgctcctccccaaccaatatagctcctggacttactagatgggatattatttgccaacccgaaaaccagaatggtttggggtacttaatctaaaaattcaaaataaatgccttttgagtaagtggttgtataagttaataaacgagaatggtgtttggcaagacttattgaagagaaaatatctttataataagtttataactcaagttgataggaaacaatgtgattctcatttttggtcaggacttatgaaagtaaaaatactttcttaagtatgcgttcttggattgtgaataatagagaacaaataagattttgggaagataaatggttaggaaacttggtctttagaaataaatatccatctttatatgctattgttagaaggagaagttcttctattgctag

SEQ ID NO: 3926 - DNA, 3359 bp, Oryza sativa
ggggagggggcgtcgcctcaagtacctgtaccaacgcaacgggttccttccaccagcgcctgtgcgaaaaggagctgggggagtgggaggtctcctagctgagggacacgctctctcgcagggggacgacgctgacggaaaaggagacggccatcgctaggggcacgggctgaagcaccgcattggtgatgaccttagccttgtacactccacacacacacacaatgatacaaaacgatcacatctctttggactgggtgacggctacaccacaaaagtacaaagcttctccccaagatctcgtctcgactctctcgatccagcgctgtcacagtgtcacgccaagcaaaacagtgcattcgacgacgaaatgcacacggatacacgtgtcacatatggcttcacgctaaacactcggtcaaggtcaagcataaagcaagaacagtcagaggtctccaatgtccaatctccattttccaccggcatgatgcaacaagcagcagcagcagccgaagcacacggctccggtcacccggcggcgtccatggctgacgacgggaaggaggaagcagtctcggcggcgtggcacgggtcggttcgcgccgcggtggaggggccgacgccggaccaggcgtgggcgctgctcggggacttctgctccctccaccggtgggtaccctcggtgcagacgtgccgaagggtggagggcgccgagggccagcccgggtgcgtccgctactgtgccggcccggtgaacaaggcggcggaggctgtggccgggtggtccaaggagaggctggtcgagttcgacccagtcgcgcggcggtacagctacgaggtggtggagaccaacaaggggttcggccggtacgcggccacgctccgggtggagcccgacccggccgggtgcgccgtcgcgtggtcgttcgaggccgacccggtgcggggctggtcgctggaagggttcgtggggttcctcgacgagctcgcgcgcggcgtcgccaggaggctcgaggaggagatcatgtcgcggaattagccggatgccaggatgacgctcttgctttgaaagattgcgagctctcctttgctgctttcgctgtgttctatgcacgtcgcacatccatcaccatgaaatagcaagaaaaaactcgtgcgatgggtttgatctccgtgaaaacggaatcgtccatttcccatttccccttccaaagtgttgccttcctctcgccacggaacaactttgtccacagcaagtcaactccgtttcgtccataacatccacccagggccgttcatggccatgtgccaattgatcaaccgtataggctcctcaaaattaagggtcccgaaattcccacatttcaatacaaaccaccgtgttttaatatattttcgattgtagttattgtatttttcaaaagttccacttttcttaacctactggatatttgttttctttgggttcgataaatgttagataataattatggtaaccataaataaatatagtttataacaacgatacaacacgtactcacatacttaaaaaaaacatactcacatactaaatattttatttttttacttggtaaagaaaattaaataaccagatcagaaagcacttattttttcctaccgacgccacaaccattgacgtaatttattatttagctgcaaaatttgctctcttgtttttaatattttctaaatatagagtatcattttatgtttcgcattgggcccgaattactatgttagcccagcatcctccacttttaactactcgcagcctcacaaagaaagatacgagctcgctagtgcatttctgctattctgggcaaaccataatgggatacacacagaagttagttgaatttttttaatttttaattttatttattaaaatatttacaaaaataattttttgtttaaaagttttaccaatctacacccctaactgcaatgggccgcacgccaatcagaatcctatttcaggccaacgataattggccatacgttgatcagaatacatgccaatggactcatatagtcatgtttatctgtttatatataatggacataattatgcaagatagtgtacctgttggcccaatggtaaaaaggcttgtgtcacttataacatctcatatgctgctcatatctgttgaaaagccgagaagagcgcggccaaaacctatacattctaggttatcttcagatggcttagaatcgagaatcatcatggaaaaaaaaactgtctgatgtcattggtggagaaatattttttactcctggttggtaatctcctttagtcccgggttttcaaccggaagtaggaatccagaacttaagatacccatctttagtcccggttgaaataaccggactaaagatcccggttggtaataaggtgttactaaccggaactaaagagagggtagcggtagtccagatggtctcattttctcttttttttcttttttattttctcccagcagtcctaatggtccattttctttttttttcttttctttttttattttctcccgaatcgagtggcatgcatatcccaaatcaaaccccaaatccccaaatcaaagtaacatcccaaatccatatcacaaatcttaaagttacttataaacacaactcaaatacatcacaaatcctaaaaaattacacacaaatcaaatacatcacagattatacatctcagatccatacaatgaatcacaaaattatacatctcagtgaatcacaaaatatcaaaaaaaaagagaaaacaacgccggctgccggctgccgccgcctgcggccccgccgggaggaaaggggaggatcgatctgtgtgaggaagtggttgcgattgtggaggagaggataagtgctagggattatatactacgtgttgaattttagttccggttggtaaataccaaccaagagcaaagatctagatgatctaaagtggtgatgtttagtcccagttgatcctcggcccgctgacatgcctgtgacagggaatgaaccgggactaaagatcatagaatggctgtggggttttcaaccggggctaaagatcatttttagtcccggttcgtttttgaaactgggactattgtggttttgggtcgacccagcaaagatcagttctccagcagtgtgtaaatatctgagaatagtacttatgtatacatatatatcttgtattaatctatcttgttatttttttaaaaaaaaagttgataactgacttataagaaacgggagatatctcctcgatcgaatgataatatatatatatatatatatatatatatatatatatatatatatatatatatatatatatatat

SEQ ID NO: 3927 - DNA, 1232 bp, Oryza sativa
  unsure (1)..(1232): unsure at all n locations
ccggcggcggacctcgacgccggcctctgcttcggcttgctggatcccgtctccaacgccatcgtcaacgccgccgtcttcgccgaagcggaagatgggaacgacaggacggggcgatctctcgacggcgcggtcaccttcctcaccacgttcttccctcacctcccggactgggaggccgtgcgctacctgctcgacgccgacgctgacgtcctcgtcgcggcgcgcctcgtcgtgcgggaccgtggactgaggagattcgggttcgcctcggacaccgccggcgccgccgtaaggttggccctcagatgcgccgcgctggccgtgaagcatccgcatcccgaccggctcgtccacgcgtggctgtccctgtctcgccgcctcgacgaggccgtgtccgcgctcgccaaccacgacgtgcgcggcctcgtcgnnntggtcgtcgacgaggcggaggcgccggcggcggccaacatggagagggcgtgggagctggcagcgtcccgatttctcggccgggacaacggcatcgccgcgccgccttaccggcacgccatgcctctccagaggacgctcctctacgcgatccaggggttctacctccgggcgctcgcccggctgccctccggcgagctgcggtctcactaccaccggagcctggtgaaggccggccattgctacggccccatggaccccgtctccaacatcatcctcaacgtcgtctggtacgacgccgcgcacccgccggcggaggagctcgagctggccatgatcccgcccatgagcatgttccgcgtcgccacgcgttcgttcctcggcctcgtctccttcctctgcacccgctaccccgacctcccgctccatgacgccatttggtgtttgcttgccgcggacggcgaccttggcgccgccgcaagagaagccgagcggcggcagcaccgtccctcctgccnntncaggaggcctacgccgccgccgctgccgcggcccggcaccccaaaccggacgaacaagtggagctcctcagctcgagcagggccatcacgacgacgacgacgacgtcgctgctcctgcagaacggcggccagctctcctcggaagacgttcgccgcctcgccgccggcttactgtccccgaatccctccgccgccgtctcaccaacgcagcgcaaaccaacgaaaccacggcagcgcgggaagctgaaactgcagtcgcagttcatccgtgatcag

SEQ ID NO: 3928 - DNA, 1760 bp, Oryza sativa
tcagttttatgtcagtgtacgatccgagaccacaaataaacgctagatctacacgatgggcaatgaagtgcaatccccaagccgtgaccagcgcaatcagcatgcttcacaaccagatccatgaacctcactgcatatctaaactctacagtgtaaatcaaagttagggtgcttacgttggggcagtacttggagatggcagtgcagaggcccttaacaatgccggcgttgatgttgaagaggtcgtccctggtcatgccgggcttcctcggcacaccggccgggatgattacgacgtccgaaccctccaacgcctccccgagctgctcctccccgacgaagcctttcacctgcggaggagcagaatccaaaacccagcatcgtcacacggctagatccagccaggagagggatgcaggcgggtgggtggagacgtaccagcgccggcgagttgatgtgggagacatcggcggcgacgccgggggttccggcgatatcgtagagggagagggacgagacgagcgggttgagcttcatgaggagcgcgagcggctggccgatcccgcccgccgccccgaggatggccaccttccgctcagcggccgcggcggcggaggagtagtcgcggcggcggagcgcctgcgcggcgtatctcagcagcgacggcctcatctcggcgttggattcgtgcgtgcttcggctcaggtgtgcgtgtgtgtgtcgcggcggtgggtgggagtgagagcggcggatttaatagaggagaggtggaaggggtggatgggatctagagagagagagagagagagaggattcgtcgggggtatcgacgtctccgcccgccgcgccgaggcgattttttttttctgttgctgtgactgtgtggttatctggccgaggccacttgcgcactagagttcgtagtgacgcgcactacactggctggacctgccgcctgcaccaacgatggatttggcttgtgcctttcggaaggtgatttcggtgcagtatcttttcttcgagagagagtgacttctggagtgttccagaaacgttgctactttattgtactcgtattcatcatcgatgacgatctctctttggtttgctgttctttttctgccaggactaatacggtgtactcctatgttgtttgagcaatgttggcaaagtttgaaatgaggtcgattaatgctgtttgatgatttaatcaatgtcggaaacgtttggaattgggattaattaagtgatcacttaatcctgatttcctgtccatgtgcctccaggttcgttccccatcaaagctcttaatcataacttcacgcccggttcgttctccctttggattttaattttttagagttgcagtaagatgatgctacattttctatcgagcatatggtaagttggtaactggaagagcttactcattttcagttcagctttaccaggtcgaatgaaatggtgtattttagttgagcatacggtatagtgagtaagttggtagaggagctgtactactatactgccatcatactcactatatcagtatatcgccaccaacgacaacgaggaccagcagtcaaatgtgtccttgtttaccgatacagggacaccggacacccaccagtcaccacccctgttctcaagaacagttgagcctagctttcatcacagatatacaaaacttaatgcgatgcgaacattacataatcttgggcggtcagcactcgcagttagggcagtgaagaagaatattg

SEQ ID NO: 3929 - DNA, 683 bp, Oryza sativa
tttgctgcaatgaaaatcaaatgggcatgggaacagcaagaagttagaactgaattttgctgatatgttgctactgtttttttttaaagccagcgggcaatagtgcaataggcaaatatataccaactaacatctcatagatggagtaggatctataaagaatagaaaaaacaactccgcaacagtctggaagcaagtggacaggacttttaaaggaaaatatataaccagctaacatccaatggacagaaccaagcatatatgtactctgaagccaatatgttgaacctagaggcaatgtactttgaggcatgcatatctaaaggatggcaagaacatccaagggatcggttggttgcaaattatgagaactttttcctgatgttttatcaagaatatcacaaataggcatagtagcatactaatattgacagactaactagtaaactaaggatatagttggttaaggttgatatgaagacttacgccatagacaatgttgcagaaccctttccagcctttgcttcaacaacttccgtcccaccatcttgtgtcctcttggtcagagccttaatgtcctcatgcgacaatgcattacttgcaggggttgcctacatcacacaaaaaattactccgttaggaggtaggccacacgccataaatgcactttgattttttgaaaa

SEQ ID NO: 3930 - DNA, 1103 bp, Oryza sativa
cccatccataatcttggactaattcacgagacgaatctattgagcctaattaatccatgattagcctatgtgatgctacagtaaacattctttaattatagattaattaggcttaaaaaaaggggctgctatataacgggatcccgttttcgaacgggatgatcccgagtaggtatcaggtctgatacctatcaggtatcagacaattctacacaacaggatgatcccgagtaggtatcaggtgtgatacctatcaggtatcacacgattctacacacgtttcaggtgatacttgtaagtatcatgtgatacttatcaggtatcatgcgatttctaccacgtatcacgtgatactcgcgatgtatcatgtgaaacctatcaggtatcagatgatttcaactacgtatcgcgtgatactcacgaggtatcatgcgatacctgtcatgtatcagacgatttctaccacgtatcgtatcatgtgatacttgtcaggtatcagacgatttctaccatgtatcatgtgatacttgcgaggtatcgaatgatacctaccaggtatcaggtgattcctactagatatagctgggcattccgttaggggaggagcaccccgacacgtgcggtcggcccctgcagccgttccttgtagacgaggacagcgacggcggctgcaggggacgggtgcagcggcggcggcgggggacgggcacgatggcggcggggtacagcgacggcggtggtgggggatgggcgcggcgtcgatgggggacgggcgtggcggcggcaggggatagcgacggcggcggcgacggaggcgacgggggacgggcgcagcagcggcgggggacggcgacggcgacgagtgagcagtcctggtgcgtgtatggataagaattgcgttgtggagaaggagctatcctattgggggacggtatcccgtcccctagcattcccgtaaaaaaattgtctcacgaattagctttcatttatataattagttttgtaagtagtttatatttaatactctatattagtgtctaaatatagggatgcatccaaacaccaacttatagatatgcacaggaggaaatgggctgcaggaa

SEQ ID NO: 3931 - DNA, 1757 bp, Oryza sativa
ttggcaacgacgatgcggcggcgtcccacgacggcgaccacggcggtggagcccaccgtcctgaaccccgacggctcggtgccgtcgacgcggggggcggcggcggcgacgctcccgacgacctcgccgtccatcctcgcgaagctggccaacatcgcctccttccagcgcacgtcgccgcccgacgcgctctgcccccgcagccgccgcaggctcacctcctccgcgagcacaacgtgcatccgcttcctgcacgcctccgccacccgcgacccgccgtggccgtcgtacaccgcgaagaagtcctcctcgccctccccgccgcccctgatagcgcccgcaccatcccccgtcgaagccatgaacgtccgctcgatggccaccgcgtcctccatctccctccgccgcccgatcaccgacaccgagccgtgcgacacgcacgccggccagctccggggaacaacctccgtcgacgagtcatcagacgacgacccgtccttcaccgaccggattctcttcgccgccgcatcatcctccgccgccagcccgagccgccggagctcgagacgtcggcgccggcgtgccgccgcggccttgccgtcacctccggctactacaacttcgcacgcgtgcccctcatccgtcgcgcccgtctccctcatgtcccacgcgtagtagagagagcaacggaggaatcaaagggaaaggctcgccgaggagggcgaggcgggctttaatacaagcccacggcgaaaggtaggagaagcaacccgagccgtcggatcgcgcgcggacggccagatgcgcgccaccgccgcgtgggacgtggacggacgagatcgccggtggcgcgtggcgtggccgccgtctgggatcccgggccgggagagagaccacgctgcgcctggtccaccggtacgctctcgcgcgcggtccatgtgggcccatgttttcagtgacataggcttaggtggaatgggtccacgtagcgttgggatggttgggccattaggtaggggagtggggcccaggaaggggtttacgtggagggagagagtggaacgaggaagtgtgggggcgcccgctcccgctgcggcggggacaaatgttaaccagcggcaaggcaaaagggcgcggcttacgtgcaaggaaacgagattctacaggagcgagcaaaactgcaaaagccctctgtgtttttgacccaaaccgcgccaaaaccaaacccacgtctcacacacctggattccggaaaaacagtgttgggtcaaacaaaccacgccgcgaacagccggcggatgaacgaggtttcgtttcggcgtttcgaatggcggagatggtcgatggcgtacgcccgatttggagcgtggcgcgggggtgagggccgcgtggcgggcgaggtggacacgcgcggcggatccagaggcgcaagcgcgagagggagctcggctcatgccggggtggaagagccagcgccatggcgcggcctcgggctccgtttccggcgcagcgccactgctgctgctgagtgggggcgacgtggagacgacccgggccgtggtctccgcttcttcgtacgagcagtggtgacgtggtccgttgtggtcaggcactcggtgcaggcgcgggattcgaggggtgccacgacggcatgcgggcagcaaccatgggagggccatgccgttgctagctttcaacttttacggcaaagcttgttcattcatggtgatgcgttggatggcgcttttgtccggtcg

SEQ ID NO: 3932 - DNA, 546 bp, Oryza sativa
agagttcatatagaaatacaatttagaaatagctgaaattcgaaattaaaaaataaggaatatagaagaggagactagagtccatatagaaatacaattaggaaataactgaaattcggaattaaaaataaggaatattagaagtagagtatagagtccatatagaaatacaattaggaaataactgaaattcagaattaaaaatagggaatattagaagtagagtatagagtccatatagaaatacaattaggaaataataaaaatttggaattaaaaataagcaatattagaagtagagtatagagtccatatagaaatacaattaaaaaaaatagaaattcggaattaaaaaataaggaatattagaagtagagtatagagtccatataggaatttaaaactaactaaaatttggaataaacataataaaattaaaagtagagatataaagatacaatttgcaaataactaaaattccaaattaagaaaaacatgggaagaagagtttaaagtcaatataggaatacaatttagaattaactg

SEQ ID NO: 3933 - DNA, 679 bp, Oryza sativa
agtatgacttataagctccaacccgagggaatactaacggttgcctagtatcagttatggaattgagtgaaacctaactgcacaagactgacaattcaaggcatagtccattgttcagttgtggtcaggtgtagctccttttctaggtgaaagttcaacttaacagtcttcaccgaaatactggtatataaaagctgctatggaatagagagcattctcatgagccttgaaatttggtggggattgatagatttaattggataattgatccatttaaatcaattaaatcaaataaattccaaggctcattatgctaggaattcatgtgtattcatttttttatgggatatcaatgggatgaagagttttgagaattaatccatttgattagggaattggtaacttatatcaattagttctaattgatggatggttgatggttgtgtagtggaggatggttcatggctagttgatgacaattagttgctctattcctcttcctattccattggtaacttacatcaattactcttaattgattgttggttgatggttgtgtagtggaggatggtttatggctagttgatgataattagttgctctattcctcttcctattccatgactcttactcgtcatcttccattcctcttataaaatgagaatggatttgatctccc

SEQ ID NO: 3934 - DNA, 1012 bp, Oryza sativa
  unsure (1)..(1012): unsure at all n locations
gacccctcggggagacagagggaggggcggccacatcaccctcgggcccgacccccccgagggggtcaggccacgtgggtgactgcagctgccccaaacctctagtcaagatacccccggtcccatgtcaccgacagaagtattactagttagtgtgttttcgtcgaaagaaaaattcaaagttcgcagtagttagtttgtgcatagactttaacccgagcaattcgtagaagcgccgtagatcaaaatgtagttgaacgtgtgaaacgtggctagttatttggaaaacgtcggcgatcatgcgcccgatcagcggcagaaaaatcggggcctcccgcgcctccacgccgttgcaacaaatcacccgcatattacagaaacgctctattaagggaatccgcttcatttttagtttcaccaacaatgtttcagtaagtgtactcatgatgtttcattatgtatggatcaaatgttgcattgagttaaaacatcctttcgctatttgctgaaatattgtttttatataaggagaaacagcgcccgagttttttggaaaccgtttttcatacgttgtagcaaatgtttcacaaggtgatttggttgtgtttanctttttaaaatactgagacattttcgatctacttagtgaaacaattccgatctacttggtgaaacagtgcttgatatgtaggcgcctcctagtaatttgagctatataggctgaggtggcatgtgaaacgtacggcaaagtgtacgcgtgtgtgagatatatggcaattgtgcataggattagcaattggtatgcaaagaccagttcttcttcttggcacactgcacacacgtaaagatggccagatggcccgagacctgacagcccggcccaaggcacaacaatttggcccaacccaagcacggcacagcctgactagggtcatgcccgtgccaactcacgcctgatagccgtgccgtgcctgggttgctacctcggcacggtgggccagcacgacccgac

SEQ ID NO: 3935 - DNA, 823 bp, Oryza sativa
taagcgagaggacacacggccatgcatgcacgttactgcaattcaatgcacgctcaagaacaaaaaaaaaaaaagctagagtatcacaagctatggcactaccacttgtactagctggagtagtccagacttacagtttactggtagctagcctccaatgcatgcatgcacaattgtgcgccccggtcctgcaaaagttagccgccggtagccctgccttgcacctatataaactcctgcgtgactcgcgctcctcagggttattcgagtgatcgtgcccacatatctcccccttcttcctcggctgtgtgctctgcaagtgtagctgctgctagctagagcagagcagcaatggagttggggcggttggtgacggtggtgatggcggcggcggtgagctcggcgctggtgatggtggcgaggtgcgacccgcaggtgccgtgctacttcatcttcggcgactcgctcgtcgacaacggcaacaacaactacatcgtttcgctggcgcgcgccaactacccgccctacggcatcgacttcgccggcggcccgtccggccggttcaccaacggcctcaccaccgtcgacgtcatcggtaagacaccaacgttgtgctatctgctgctgctgctgcagcggcagctacgtgtaaagtgtatagtcatgcagattttagctagctgatctccaggggtttatggccgtcatggtgatgcacgtgctgagctcgttgaacgagcgatcgatcagctgatgtggaatagaaaattctgagcagatgttagttaggagaatggggagatggtagcttgttgctgtggta

SEQ ID NO: 3936 - DNA, 555 bp, Oryza sativa
tctgaggcagcagatagcttttgttccaactcagcgctattccggtcattcactcccgatgttgatgcctgtgctctatcctcatgaatttcttggaagttctcatcaagaggaggccacatcacaacacatggtatgtaactgtcagcagtctggtttctcccaagcacaccactgcggcctctgccccaagcccacatcctatacccatcaccagcaacaagaacagtgtgagcagctccacaagtgacctgcactgcaccaagaaatttgaacccatttgtctcaggagactgaactcttatcgggcgtagagcatcccctgaatcaactcctgaaaagctggcatcagggcacaacccaagacctctctccattccccagcaccaaacctctccatcagaagaaactacagttgtatggaacaatccacaatcaagagaaataaggaaggaaccagttggcaagccatcaacaggttgaggagagcaaatggtggcagtggtcccatggccaagctgcccattatcaccaaggccaaacgtccagcaacga

SEQ ID NO: 3937 - DNA, 780 bp, Oryza sativa
tgtgagtcgcacccatggcaattaaggaccggttcacgggaaaccctagaagacttacagcgcttgccacaagcgggagtgggtaactgcttgatctgaagtatagctcgaccctttcctaggcaccggtggcgagggtgggcgtgatggagttgggtaggccggggtgtccggttgtccagctgccggattcgccacggcacaagaggggaccacccactaccttttgaggggtgggggtgaaaccttagcgtggtgtggatggttaggggagggttatgcgaagggtctcgtcacaatcactcgacatggtgacgtgtgcatcatgggcacatgatgacgcggtgacatgtcggtgggttgtgtcttgtgggtatagttgtgcacctctggccagagtaaaactattcgaatagccgtgcccgcagttatgggcgatcgaccagattcaccgtgaatagtctcacacttaataaatcgagtcaatgcactgtagtacaggtgggttggttgggcctgttcaacgtggtgtagcgttgatcagtggagatctaatttacctttattattcaacagttttactgtttgctaaataaaatgttttacaaccgcctttatgcaaatagccacaaaccgtccttgtatccctttgcacgtttgcatcattggtgtggcttgctgagtacggtggttgtactcagccttgctattatttccccttttcagaagtgtagtgcttctaagctgaagacgaagttggaagaccaaggctcagaccct

SEQ ID NO: 3938 - DNA, 1134 bp, Oryza sativa
cggggctcgccacccagaggcagcaacagtccatgttggtgaggaaccacttgtgcgggttcatgctcaccgagtcggcgagctcggcgccgtcgaggtagccctggactctgggcagatcgccgcgctgccggcgtacgtggcgtcgacgtggagccacatgccgtggcggcgcgccacctcgccgagctcgcggacggggtcgacggcgccgatccccgtggtgcccacagtggcgcacaggtacagcgggaccagcccgcgcgccatgtcgccctccaccgcggcgcgcacggcggcgcccgtcagcgcgtaccccgacgccgccgccgtcgggacgacgcggaagttcgccggcgtgatgccgaccagccgcgcgcccttctggaacgtggcgtgcgtctggtcggaggcgtacacccccagcttcacgatgccctcgtgcccaatcctccccagcgcgcggtcccgcgcggcggcgagcgtgcacaccacggcctcgcaggtgctcccctgcagaacaccaccgccaccgccgccgcgccgccgccggagccggagaagaggaagcgatcaggcaagcccaccagcctagccatccagtccaccacgacggcctccagctccacggcagccggcgacgcaacccacatgaacggcacgacgttgagccccacggagagcatctcgccggcgaacccggcggcgctggcgttcatcgggaagtaggcgaagaagctggggctctgccagtgcgtgagccccgggagcacgtcgcggcgcacgtcagcgaggtccgctccgccggctccccgaactccggcgcggcctccgggaggagcctgcggaggcggccaggctcgaggtcggcggcgcggacggggtacttgtcgacgtcgcggtagtagccggcgaggaagtcgacgacggcggaggagtcggcggcgaaggtgtccgggtccagtggctggagcgcgtcgagtggcaagctacccatggcaaggtcacgtagcttgggcgagagtgagagacagctcaaatgttttgtgtggattttgtacttgagcaagacgcgcgggttcgggagctttatatagcgccaaaatttgctactacgagccataattcaatcag

SEQ ID NO: 3939 - DNA, 2534 bp, Oryza sativa
gctgctaatgttgatgcacatccatcaagagcaactgtgttgattgaactattaatttgcgctttgtatgctatttgtagtcttgcgctttattacacacaaatttttttttggggggagccttaaatcgcttcgtcaactatagcagagttggagaggatggccatggaatggactgcaactgcactaatactagtattatattgctattttcttaaaaaaatccttaatattttgtatttctaatatatataaaaatatataagcgtatccccgtatccttgttttttgaaaatgccgtatccctgtatcgacgtatcgcgtatccgtatccgtatcaccgtatcgaggtaacataggtcactagccctaatctccacccttcccaacgtcgagtgccttgcccgtgtcccccccgcctccctccctccgctccccgcggtctaccacagtccacagctttgccatgccccacctctgtcgcgcccacgcctacctccaccccctccctcctcgctctctccatcttcgaggacggttgcatcgtgcaagcactgctctaattcgacgcctccgtgcccatgatcgaggtcgccatgctgctgttgcccctgaccccgctgcattgcgacggcttctgttcatgcatgcccgcgcagtgtgataggccaggatgtcttcctcatcggccgcggggccgacgcgctcaccggcgtgactcgagagtgcgtgcccaccggagccggaagctgacgcgtggcacgtggtcggcgaggcgctgcggcggagggacgggtgcaccggtgcaagtgtgggaggggtgttgtacgtcgctaggggcatcgtggtgtctggcctagagatggccgagaaagagagagaagggagagagagagagagaggaggaagaaggagagagtgggccctacatttttttttgtgtgtataaatgacaaatgggtttcacatatatgttttcaatcctagcgccacgtcaacatcacatattaggtcacacactgtcatgtagatgtcacgttagcaaaactgtcctccaaaatcgtcaaggtagtcaaattgtaccggttgtaatagttgagggatcgagatatccgatattgtgatttaaggatacgaatcagattcgatcactagttaagggagtcaagatgaacttattccttcttcagatccacttacgaaggcggtaaggcccatgaaaagaatgggctagtagcttaacttccataattcttttctccagcccaaaacctccccttcggctcttcgcccctcgctacctccgatttccaatggccctagccggagcccctcgccgccggcgagctacacgttcgcgtctcccccccactctcctcctcatcgtcctcctcctcctcggcggggctcctcgtgcttccgcgctccgcgtcccgcttcgcgaggtcgccaccctcctcaacctctcccgctccctcctcaaccgcgtcgccgcagcccgcgcggccagtggagacgactttgcggcgtcccgcgcgcgcaggatcgcctcccatctctccctcttctcatcccgcggcgcgtgggcactctcttgggactacctccgccactacgccttctcgtcggctgccgggtgcggcctctcatgcgccaccgccgctgctcgcctcctcgctgctgctgcggaggtctcgcgcctgcattccgccaccgacgccgcccagtggctgcgccgcaattacggggacgtccgcgacgcggccgcgcagctcctcaacggtctccttgttgccttctccgagcaggtatatgacttgacttggtactcgtgattcatgaatcattggcatccaaattgcagcaatgttcagtttatggagatctgtgttgtggtttaggggcctttacgagaggtggtgatggatgtgaagtgggaagtggaggaaggggagctgctgaaggattgcctcaaggtgggagctaaggacttggaggggttgcttgtcattgccaaagatctcttatttggggccacaaggacttcttcgcgccacaacgaactttgaggtttggtacattggagactcgctgtgctcctgttctttcatttgaactaatgaaattaaacttaagttcagtattagaaatccagaacttcggttaacattacatcctgcagaccacctagtaactaccggtgtgatattatacccagcgtttcatacccgagaaaatttttgtgtgaagatgcatagttgaaatatactccctccgtcccaaaatacttgtcgttttgagtttttgtttgtaacgtttgacgactagtcgtattcaaaagattatggaattattatttattttgtttgtgacttgctttattattaaaagtactttaagtatgacatttttttttaatatttgcactaattttttaaataagacgaatggtcaaacgttgcaagcaaaaagtcaaaacaacatctaatttgggacggaggtagtatcttctagtggttagggctgcaggaatt

SEQ ID NO: 3940 - DNA, 1371 bp, Oryza sativa
agatagacctaaagtgaactttatttctcaaacaagaaggtgcgaataaaggccccccatcttttagcccaataacaacggggtcatcttttttcttatgggccgtgcaaagtttcagcccatgatgcccgtgggcccggtaaactcccgtttccgtgcatgccaagaagcctctccccctataaaaaaaaaacgcccccgacaaagagggggacccaaacgagtcacctctcgcaccaccaccgcgtcagtatacaaacggcggcgaccaaccaaattccggcgagtcgtcgtcgtcgtcgccgtcgtcgagagagagtcaaaccccccacacgcaaagagagcgaaaccccacccccctcctcttcctcatccaccccacgcacgcctcgtcgcggccgcgcgaggtgagctggagcgaacggcggcgatggcggcggcgaaggaggcggtggtgccggtggaggggcggaggaacgtgctggtgacgagcgcgctgccgtacgtgaacaacgtgccgcacctggggaacatcatcggctgcgtgctctccgcgagccttcgcgcgctactgccgcctccgggggcaaacgtgctctacgtctgcggcaccgacgagtacggcaccgccaccgagaccaaggccatggaggaaggctgctcccccagggagatctgcgacaagtcagcctctctctctctcctgcttgttcttgttgaggttttggttgctcttcttcttttcaagtgaaccactctgctccgattatttgatcgattgagcaaaattgtggcatggcatgaattttcccctaaattttgaggcgatttcatatcgaatattaggaacagacgagttgtgtaattttgtaatggggatccagttcgggttaggaacgaagggaattgtcagcttcagctgtcttatccttttggaagcaaattgtcaaattgcgcaactctcaattggtccaagtccccaacgaaacaaaaatcttcctgtcccactagttaatccttttttaaaaaaatttggattagcgcttactagtacagctttaacaactgagtcctctctcatgccatgtgcgtaatgaaggtaccatgccatccacaaggaagtgtacgagtggttcgacatcagcttcgacatcttcggtagaacatcgtcgccgcaacagaccgaggtctgccaagacatcttcctcaagctactggacaacaattggctgtcagagaacacaatgcagcaggtaaagttatagtgtcagtgcagggattattactttattggcatcttgtttcaatagaagttttaatttccattgtttcttctgtgatgtttttttgctaacaaagggctgcaggaat

SEQ ID NO: 3941 - DNA, 2393 bp, Oryza sativa
ccaactggagatcatatggccttaatataatacaacacaataccaaatgacaaaccaaattaaatcacattaattaatctccttcagacacatgactggtttcttagaatattgtcccatgtacccaacacgtgatgttctctcggactgaatcatgtattttgtcgatcggtttcaaattattttaggtttattttaaattaaatgtatctacttttagtcattaaattttaaaaatcggtatatagtttaataacatgtgaattatatgttatagaagtatttctaaaagtgaatcaaaatataaattttatgatactacactatataagttagtagaattaatagtcaaatattaaagtgtttgagacttaggacaaacttaggaaaattaaagtaatgtaaacgctggacacgtacgtctcaactgtctgtcattttctcgtgggctggtcggtcggcgggatcgtgatctacttaattggttctttcttggtaagaagtaattcacttttgctaatcagttctcgttaattaaatcgtgccctcttttcagctacggaaacacgaaagtttagacatcgacacgatctttaaatggcaactttggcccaacgatatgtattgtggtagttgtaggatcgacaacaactaagccaaccagagagggggtgaattgttagtatacctaaaaaccgaaaacttttagcggaaataaaagtttaccctcaaattcgacggattacggtttgaccgaagtttattgccggtctgaccacctgaagaacgtcggtctgaccgagatcaaactctggtcgaaccgctgatatcacctgctgtcgcctgcctgtcaccgccgtgtccccaccggtctgactgccgcgatgccgctggtctgaccgccggtgcgccgccggttagaccgccgaaacccggtgaaatacatatagaatcttcaccaaccacgtgtattgaactctagccttagtatcccgcatgatctctgactaccatggacgtcgtctcttatccccaagccgactcccgatccatcaccgcaaatactctcccgaggcatcgagtcacctacacatgaaataaacaaagaaacatattccgagaccaagctatctccaacttgactcattagtagcaaacaatagtattacatacgtatagtattcatctagaagtcataatcatgaaataatcacagatatccaaacaaacaacccgaaaccgaaaccgacacagtgtcggccggtcagaccgcgttctggccggtccgactgctcgatcaccgccggtctgaccggctaccagagcccggtctgaccggtcacatgaaataatgaatcctgcaatcacctgtaaatccaatcatctccaaaaccacttcgtaaataaattccaaataacaaaaccagtaatctccaatgcccaattgttcatcacagaataataataaaaaaacacctttgattttacataaacgacttaggccctgtttagttcccaaacaaaaatttttcaccctatcacattaaatatttggacatattcatggagtattaatatagacaaaaaaactaattacacagattccatgtaaattgcgagtcgaatcttttaagcctaattgcgtcatgatttgacaatgtggtgctacagtaaacatttgttaatgatggatcaattaggcttaacaaattcacgttgcagtttccaggtgtaatctgtaatttgttttgttattaatctatgtttaatactttaaatgtgtgtccgtatatccgatgtgatacggttaaaattttcgtttgcgaactaaacaggcccttataatatgaaacagagggagtacatataaagccatttggatgggcgtagattcttattgcttacttcctttattcctaaattcttctatcaccagacgctatttatatttaaaacttgaccaaatgaatttttataaaatatacttcctctgtcattttatgtttaacgttagttagttcaaaccgtcaaatatttgtggaagaaggtagaatatatataaaaagttaaaagaaattgtattatcaaagtgtgttttcaccctaaacagcattaaacttttatcaaagtgtgttgcatcctaaacataagcattatgcttttattcattgtagtctaaccatttaaaatgctttatattagtagtcaaagttgaaacaacatcgatcgatagtgatagtatttggaacagatggagtatgatctctgaagcccaaaccatcgtatcgggtgacttaatagtgacaaatattttggctaggccggcgtaaggtaagcccaacgcaaactaacagcctgagcttgttaagatgtcaaagaggaataagtttgct

SEQ ID NO: 3942 - DNA, 505 bp, Oryza sativa
gacccagccgatcctaatcgtagccgatctggactccagccgattcctgctctgtttctgaactcgatctccgcctccgacttcgctttgatcaaatcttctttcctgacacagatgttaccaaatttggtcgttaacacccgtgaacccaaaaaccagacatcgcttaccctaaactttcaataccggacgaattacccctccccccctcaatccaatctagagcggttttgtcctacgtggcgtgcacgtggcaggtccaatcagcattttctgttttttaatggtggggcctacatgtcatactctctcacctcctctttctcctcttcccctctctcaggcgtgggcacaggccgcgcgacagcgggcgttcaggtgagagaaagggagagagagaggggaagaggagaaagaggaggtgagagaatatgaaaggtgggcccaccattaaaaaagagaaaatgctgattgaacttgccacgtgtacgccggcactggaaac

SEQ ID NO: 3943 - DNA, 5820 bp, Oryza sativa
  unsure (1)..(5820): unsure at all n locations
gcaccgcctcggctccggctgcctcctcttgtacgtgctgcgggtcagccatgcttgcacggacgtgcatggattttggtcagtggccgccagtgtggtgtcaaacatgcgcgacaaaacccgcgtttggttacaacatgccggcaggttaaatagcctggagctagccatttgtctcctttgatgtggatggatcacaaggaattttgcaagggttagtttagtgtctggctctcctaactgaaatgcagtgccgaaactgagtgatatgttcaagaacatgaagttggcacatagttatttttggcatttttgcttgacagctctgatacaccagtgcacgcacggacgcacccagtgaactctgaagcttagaatacttgtgctgcgttcagtgagattcttcgaagggaacaaacgagtgcaagaaagccaaatggtaaggcctaagcatcttggcataatcgcggagaaatattccagagtctcatctcggtgtcatcactgaattcctggctgattggagcattccctctgaagctttcaacgcattggatgaaacatttagcatgtataagcggccggcatgcgtatgtaagcctgatcggcgacaaaagagaatcagatggagcagcctgaaacaatattccctatatctgttggagagtgcggactactaggtaagaagtgtggcaccgtgcttccctcctccctcctcgtcaatgctccggcgccggctgtgaacgccgtgcccgtgacgcctttctccatgatgccggcgacccgcgcttcgcgctgcacctccgatccgcgccaccccggccggatctggacggctggcgtcatggtggcggctggacggtggtggctggacgggggtgtccgtggcggtggcggtggcggtggcgatggtggctgacggtggcggctggcgacggtggtggctgtgatagtggcggtggtggctgtcgacgatggtacctatggcggcgatggttgaaggccatcatccggctgacggtgcgtcgtcgtcagcggcggtatgtggaggctgggaaggggtctggcggcggggaaggaggagtccaggtgcgggcacgccgtcgacggtgggaacaactgtgggcggtggccttggccgaatcgctgaagggacaatgttgttgaccgacgacgatccttcttgtgcggattggtggtgtaggtttggacagggaattgcgggcgaaagccttgccgagccatttggctggctgacaacggcgacgccgtttggcgtcgttcccctccttggaggagttgttttagcatacccctttcctttccctaccatattctccaggtgaaaaccttgcttcggttgtgaacgagcggtggcggcgatccacgtcgcatcctccttgggggcactgctttggagaaacctcttcgtgcaaggatattgtcattggtctatgcattggcttcgaacttcagtcctaggccttgacgaggccttctagctccacattttgttttacttttctcagtttgggtcctctcttctcttgtttggtgtgttcaacttgtcttgaactacactctcttctagagtggatttttgtaataattggctgtagttctttttgagcaaaggccaggatattatattccattatcttaaaagagaagtgtggcacagctgtggcatgataatgattttgatcgtgcattgaactaccccacaacagcacccctaccccacaaacagcacacacagttacaataatggataatttcgtttctacccctgttttaatgtcaaatattgattttgctcctactttttagggttttcgttttttcctcacttttttgaaccgaaagaggcgtttacccctagtttagatagaagtgagtgagaccgggcttatggaattaaataaatagagaaaaaaaggaaataaacatttttcatattgttgattgactcttttacccctaggaaatatccaataggggaaactattccagcctctcatgaaaaccccatccgacgacattcggtagcgcggtaggcaacggcgagtaggcgtcgacgggtggcggtgagcgggcatcggcaggtggtgcttcggcgcagacccctcccgccggcgagcaggagtggccctacgcgggataggtgactgggagagggcgcgacaacggggtgaggaggcttggaggcggcggtggggagggggttaggtggtgaccgagagggagcttgaaggcggcggcgggcagagagattagaggcggcggcaacggctctgcgtgagtgaggaggcgacgacagcagtcaggcgacagcggctcagcgcggagaggaggcgatggtggcgacaacggcggcggcaacggctcgacgttgggaggaggcggtggtggcgacgcggcgtggggaggaggcgacggcgacggcccagctagggggctacgacggcggctcaacacggggaggaggtggcggtggcgacttggcatggagagcaggtgacagcggcagcccgaccaggggtgacggcagcggtggccaagatgcagagaggaggaggcggtggcagcgaccaagaggcggcgacttgtagcaatatgacattttgttttgccaaattttgtttttttttcaacatttgtccagatttatcacatttgaatgtcaaattttgaaacaatatttttacatttgtccagatttatcaaattttggaacaatattttttttgatattatgtcaaaattgtcatatttgtaaaaaaaaattgatttacgaaaatcgccagatacgctatagggtaaatacagaactaatgaactaaaatagggaaaaatgtgtaacaacacagtgaggctatggatgtctttttgtcaaagatttaatatgtccatccaaagtagggggcaaaacttagtttcgtttttttttttaaaaaggcaaaaacgaaaatattaaaaagtagtggcaaaaccaatattagacatgaaagtaggggtaagaatgaaattgcccttacaataaagtgttgagttcgagttctcagcttcgcaataatgtccgtacctgagaaacaatgaatgaaaacgaaaaatacacctgagaatgaaaaatgtaaaattcatcgatcaattgcaaacctgagaaacaatgaatgaaaacgaaatatacacctcctgagaatggaaaacgtaaatttcagagattaattgcaaacctgagaatcttgtataaattcaaattcagagatcaattgcaaacctgagatggaaaacgtaaatttcagagattaataacctgatagtcttatgtaaattcaaattcagagatcaattgcaaacctgacagtgaaaattatataaattcagacagagatcaattgcaaacctgagatggaaaacgtaaatttcagagattaattgcaaacctgagtcttatgtaaattcaaattcagagatcaattgcaaacctgagagtgaaaattatataaattcagacatcaaatcgcaaaaaggaaataaagtgcggtgagcgtggatcgaacacgcgaccttcagatcttcagtctgacnnnnnnnnnnnnnnnnnnnnnnnnnnnntgttcaaaaggttcaaacacatttaatcaaaatggcgtgcaagcctactatttggcaaagttttgacatttttttcttgctcttcgaatacccgttaaactaatctaacaaaaaaatccattttattccttcaaaatatttatttggatcacttaggcccctttggactcagaatttggaccgagcttatcttcggcacgcaaaaaaagacatgtcattagcaagtgattaattaaagcattaacaacaataaacttaaaaacataatttatttgatttttaaagaaaattattttttttcataaaacgtaccattagcaattcaggaaacacgctaacggaaaatgaggaagttgttggtttgagttggtgaaaagaactcagtcttaacctgtattttttttgagtcattttactctttaaactattgaaattgtccactttttactccttcatactatctccgtcccaaaataagtgtagccgtagatatccgtgcccaatgtttgaccatccatcttatttaaaacatttgtgaaaaatttaaaaatatttagtcacgcataaattactattcatgttttatcatctaatagcaataaaaatactaatcataaaaaattttcaaataagacgaacggtcaaatgttgaacgtgaatagtgcaaaactgcacttattttgggacggagggagtagtatttcattccttttatttatacaagtcacattttaagatgatatttttttaagccgtggatgttaccattatcaaagttcaaaacggtttcttcctttttcatgaaggtttgcttaaactttaaaatctcgatgtttaagtcaatcttagatgctttcccaaacctacaatcagtgataaaaaaattcaaaaaatgttgagacataagctataattcatctaccagctataatcctagcaaattccaatgcaaactatgactaatatagaggaaaaaaagaactgaaataccattagggagttaagtaaaccttttaggtctaaaatgagtaaaaaatagtttagaggttaagggctccaacaaaatagtttgatggagtaacaagtgatttattttctaatctaaaacaattaaaataagaaatagaatttcgcttgaattcaatatcctgcaacggaaattttagggggaagcgtgaaaagcgtcatttctaaggggtcgtctagattaatatcatttcaaaccatatcatttttgataaagttaacaaagatatacatttatttagttttttatcaaactttaataaatatataaaaaaatcatgctaaaacttggtaattttgatattgtcaaaatttggtaaagcttattttggctagcagccttttaagtcagcaggatgctgaaggcctctgtgcaattcgaccgcagaagcacggcctacaaaaagcccaaaagaccgagagaccagaagacttcttcggttaatccactacatccggcccaacaattgccacggactcacactcacccgtccgccgaaagcctaatcctcgctcccgccgtcgcgcggcgtccgcttgacggcggttttaatttgcgcacgtaccacggcagccgccgcgcggccgcggcagatatccggggaccgtggccgtgtccttggccaccgggatcacgcgcggtctcgcggagatcgtcgcggactcgcggtgcgcggtgacgccgggatcgcgacgacaccgggccgcccgtagtacgcggcggcggctgaggcatgcagcgagggggacggcgccgtggcgtatgattcatcctcccgcaaacctgccacgcactacgcaaaaggtaaggagctctaaaccaatcgctattaacgcactgatggttctcgtgccttcgtgcgtgcgaacgtgccagttttatacattagttaaatttaatgtttacgcacgagtttaatctgcgccgatggggagatatctggtgtcttaaggctcatgtacctgtagtcaactagtcactctactgcttttctttttaatctacttcgagaaaggtggtctgaccccagatagtagctaggtagtatatttgtaagcagttttacctttattttgtttgaatgggtagggattagggagcatcaggggcactactcattcatccactttagttctatgaaaagtggggaaatgatatgatagtatcaaggtgga

SEQ ID NO: 3944 - DNA, 2696 bp, Oryza sativa
ctgatctttctttgatgtaacctgcataaattaccattttttatcagaataactgcattagtgcctaatagcatctctattggtcatatcttggacatttcagtttgttaaaaaaaatcatgaacatttacttataaaggaccattgctttgcaacaggcttaatatagtaggagttgggagtttgtactgacttcacaacaaataattttttgggaaaaaaaaacgaacctcctgcaagaagtcagcaacacctttcctctcggggcagcggaacccacacctctcgaagaactcaagcacatgctcccgggggccctggtacacgatctgcccctcggagagtagcatgacgtcgtcgaagagctcgaagatctccggcgcgggctgcagcagcgacaccaggacggtggcctcgcccatgtggacgatctgctggatgcacctgatgatctggaaggtggtggagctgtccaggccggtggatatctcgtccatgaacaagaccttggtcgggccgaccagcatctccgctgccatcatccacagccgatttcagccaaaggatcggaggggcgaacgacatcaaaagctgaggcggggtggaaggaggcaccccgcgcgcgcgagggcctacgtacctgtggtgaggcgcttcttctggccgccggagatgccgcgccgcagctcgtcgccgacgatgacgtcggcgcacatgtccagcccgaggatctgcacacaccggcgccatcagattcatccgatccagctgcgtcgcgatccgcaagggaagcgagacgagacgagcagcgagctctccccttcctctctgcggcaaacaatcgaacgcctcgcctgcaacttcctcactccctcctgtagaattcgcgctctgctctagctgaagcgtggaacggtggaataaaccaaacgccaacgctctagttcttctgtgtggctatcagctatgtaagatgggctttattaggccgtaagtgggctgctagctatccattagggccaaatatatgggctacgtaggtgaatgtggccttgtttccgttcactctcttatctcttctgagtttataggccaaccagttcatcgattaagcatatttagtatggagtaagaaaaaatttcacagaaaaaaaagagaggttaattcctgtaggaaaagaggatgggaacctgatacgtaccctgagaatgtaatctgtctggagagtgctcccctcaactgaagtagcctacacatcgagcaaaagaattccagacctcgtcacttcgtcggtatgaacgaaatacacaatataatcaggtagtccagggttgaaatatgaaaatggtgaattggtctgtgaaaaggatgaaacaaagaactgcacaccttcatgaacaggtcgacttctggatctgggtatatgcccagctgcctctccttcttcgcgagctccttgagcaactctgcacgcgcactcgtatgtacgggagacgggttacgtacgtacgaatatttccagtattttgccacgtcgaaagggcgatcgcgactcaccgtatctctggccaaccccctgacacttggcggagaagtcgagcgtctccttgacggtcatctcgccagcgtggacgtcgtgctggctgatgtacgccgccgtcttctgcggcacgaactcgtccagcccgtagccgttgtacgtcacctcaccgctcgtctgcatacgccgacgtcaccaggttagtattggaaagtcggctgtgttcttctctcaactttcccaacatctacactttcatttttcacacgcattttttctaaactactagatgatgtttttttaaaaatattctatagaaaagttggtttaaaaaatatattaatctatttataaaaaaattagctaatactactccgtcaaaaaaaaatccaattcaagcaatgaatctggtcacacatgttcagatttattactaggattggtctttttttttttaaacggatggagtatttaattaattatgtactaatcttttgctttattttttatgccgggaggcaaggttatcaagtcaatcgacataatggttgcatgggtcaaaagatcgatgacgagatcatgtatatattcacctcaagagttgggtcgagcttgccggccagggccagcaagagcgtcgtcttgccggaagaaggtgggcccagcagaagcgtcatcctgtgtgcgagtatacgattacaatttgtagctcagctcgtcgaacatgtggctgtgtcgaggcttgtagttcagctcgtcgatcgtaattcgtatgcgtgtaggtatacgtacctggacggcctgacgatgcccgagacgtccttgaggatgtggagggccttcctcttggcgaagttgaggccgacgaggcccagcagagactcgcccacgtcccgcgacacgttcgccagcgtcggcagcgcgcgcgtcccgacgtggcactccgcctgcacgttcacgttcctgaacctcacctccaccgtcggcatctggatccccgccctgccaacaacgatcgagcagaatcaatcaatcacaaggctcgagccgtggcgtccatggccattttcactcgatcgggtggttgttggttcgttttttttttcttttaccggtcgatgcgggcgcggagctttttgaggaagcgctcgttgt

SEQ ID NO: 3945 - DNA, 5946 bp, Oryza sativa
taaccttttcttttccaatgtgttttccgttaactttgcaatgtctaattataattgtcttaatttcctcaactgttttttgctgcttcggtgtttcattaattaccaatcccatatcgattactgaacttgtgaataacgccacaacctgaatattttgccttgttatctgctcccgtcagaattactaggatactattcgtatattattatgcaatcattttgtctttgcataaatatataagaaactcatcatgggctcaaggtgtccatattcttttacgttacgtttgtgagagaaaaaaacaaatgcatgtgatcctacaatttgtgtagtctataattgcattattgtcatgacagttgttgcaaataaaatagtatccctcatgatgctggattccaaatcaagtgaggtgtagatcaacaaattaagacttcttacagtttaattgttttcatgaccaggtatcattagtcaaactatttgattcactgctgattcagtgacgacctataaatctaggactagcatatctctcacaccggcacagggagacctgcatcgctctgcacgtgccatccccttcgtcttaaaaaaatagtggtagaagttctatactacagaaggaataaacttccaagtaagtactgtacttgtgtttacttatagactgaagcatagggtcgttgacaaacaaaacatatacaaattaaggcatggggtcagacagacaaaacgtaagtccgggtcaaatggggcttaagttactactgtgatggagattaattacttcctccgttcttaaatatagacacatttagaattaaaatttttacacgatataaacatttctgtgacactaatttcaatgcatggaaatcacagcattttcaaccaatcaggtatttaggcgaggaatccaagcaatttgaaatttaaaatttgaccactgagcttactgaaagaaaaaaaaattccccttacatcttaaaatttgcaaaacaacgtaaaaatccttatactaaggaacagatagagtaaagtgaaaggccggatcagagattaactaaccttctcactgagaacttcctgaatgagcgaggcgtccttggagatgctgttgatgatctccgaggtggtggcctcctgcgagtcgaagaagcccacctcctgccgcagtatggcctgcaggtacaggtacctgatcctcagcacctgcctctcgctcgtcctgctccagcaatacccctctgcaaaaacaaattaagccacatgatttaggtaaatgcatccgtacgtgtgattaattagcaggcagtaagtgatgttcttttctttttttttacccataaacgccactgccagcaccgcgaacgccaggtacacgaaattcaggcaagactgcacgcacaggacgtcaaaaaaagaaagagcagcaaaaagttagacagaaatgttgctcgatcgggcgagtgtacaaatatacatgcatgcgtgtgtgttctgtgcagacaaggtgatcgacgaattcactagaccgcgagtgtgactgtgtgacaacgaaccttctcgacctcgcgcatgaagtccacgccggtggcggcggcggcgccgccgtgggcgccggcgcgcgcgtacccgagcgagttcatcacgtcgctggcgaagatgaggagcaggttggtcgagcacccgtcgccgatggcacccagcgtgcccagcgccatgagcagcacgtccacccggtccgcgaacttgaacatgccacggaggctccgccgctcgccgccgccgccggtggtcgccgcggcactcatcctccttaatggtgcactcgggtagagagcgagagcgagagcgagatcgaggcaggttgaattgagaggagaattcgaagaagcagcaactacggatcacttgatttgtgctgctgctgctgcggcaatggcctttggcactctatgctaggggtttatatagtagtaacatatcactaacacacgcatgcttttttttttcttctccttgtcttgttggctttgcatgcatgatgagggtgcacactgcatcacattgcaacataagggtcgatgatgagttggaattcaaagcatgtgaccaaagttgagaggcaactagagatgccattggcttggccagtgaggcggctgatgactttgtttatgcgtataatattaacagcggtttttttaacttttaattttccattatgtgctccgtaatgctttgttagtagatatatgtgtaccttatctttaatcatgttagacttttgatgccaattggagctagcggccggtggtgtggtagtgtttttggctggtttttgtctatgataaaagtacagggttggtaactgatcagttaattagtgacgttgctttttgggaggtaaagttgacaagacaaaggagctgtgttttcaaccctatctattatttaattcctcggtgatttataattagtgtaacatatatacttcaattattgaccagttaggatatttttcttctgctactcctaaatgttaaattcattttctattcattatcactgatgtacaacttgagatcaaataatcattctaatacatcattttctacattctgtttctgcctactaaaaagtaaaaacatttgacttcttaaattttatattgctgtttatatctcatgggaagtatgctaaataccagattaaattttgtatatatatgttaggagatttatggaaaaacctaaaaatgtttgaccactaacacggaatttttggagattagtgtttgattgcacataattttaatctgcacaacttatactaaccttcaaagcatatacatgcatcatgcacacttaccatgaatgaagtgttgcgtgcagatagcttatcatttgcaagtgatgctgccgctaatcgagtagactaatcaagaaaagatagcgctagctagcttgtcatttggaaatagcaatgtaatcatgccggtcatcgagtagactaatcacaaaagggtgggacgtaaaagctagcacaaaatcttattgaaagcactttatgtttacaaaaataattttacttagctttaaacaatatttgcttctttacccaacccactgatgaattctccgatagcttgtagctgcaagtttcaacatgtacatgatgtacatcgaaagcaactggtatatagcttctttgtttgctagggcattagaaatgacggtggtctaagtcagtactacacatgtctattcatattatacgtccctgatgtctgaatttctgaatacacactagactggtcagtcaatctgaatcaatttcttctcactccagacacacaaaaacaatcccatgctaccacgttgctagatcgccaggaatcttagtgaagatgatgtgtccagttttatattttaggtacagtaaactttcgcagccatgcatgattaaaatagcaacgtgttagtatgttagtttgtcttctggattgcttaaggaatcaggacatagttatgcattaattattggctacattcactagctaatactgctagaggatgcagcttcaaggaagggtatgtagctgcattaagaaattaaaaccgtgtacactgtacaacactatggtctccagatgtcactggtcaaattatcaactactagtatgttctaatcacttaggctgtaggagtaataataacaagtaaactatactcttcgatgatttgcacgtgctgatttgtttattccatgataggatcagctgggtctccatgtaaatcaactaatcaagtggtagactggtagctagcattgctgaacttgcttccactgagaagagcctctgttcatggcttttttgtccgaccaaggtccaaattgtttataaacaaattgcatctggattcgacaggtgctcatcataattcatgacaacatgtagaagcacgcaaacgaagggcatatatcttcatcaaaagaattgttgagcctccaattgcacaaaagctaaccatttcattattctcatgttgttctttgttttgtcgtgtttttttagaacattgttttgtcgtgttaccaatcatctatctattcatctttgttatgaatattgttttgtacgagtgggtaacctgacaaataatatactactagatgatatatgctacaaagttttcaagccgtacaatcttcttttatctcactgtagatcgaaatgaaataaatgaggctacttttgtagtaaagattttttgaggatggtactaaaataatgcccatttaagagcatgagtacaatctaatgctaaacctattacgacgtgcacatgcagactacacaaagaaccatgctccctgcttccctgggttcaattgagcatgtgccataattaaactgaccgtagtttactttgtaatttatgcacatgcatactctagtccacaactagataccatgtacttaatcttttaaaaacgtcaaatttaatcaaattgttcatcatagactcgtcaatatatagctatatatttcgactcgtcaatatatagctatatatttctgcagagtgcaactgtgcaagtctataattctatataatgatggactgtaatagtacatggtggtaagtccgtttgacacatgcattctgtcaattggcatgataacctaattaaccacgtacaagaaagcaagaataagcaccatatatcacctcttggctattggaaataggttagtgatcaactaattaggtatgttggccaccatgagctaattattttgttgttgccgttgctgttatatgttgttgttggtggtgtgtgtgtgtgagcgtgtctgaattttgcggcaatctaatgtatttcgagataggctgtacactagcaactgtgacttctctcgagcctcaaaattcaaaagcaactaacatttgacagagcaagcgtgcagtgacatgctatgttaagagaaagacttgctttagctttttgtttcttttccatattctatattcttgaaaaggactgcaaagctcttctagtatatgcaattagctgctttggaaggcacttcaaaagggatgaaggaaagaaggctgtcatatcaattactcaatcatgaccagatcatcgatctgatgcagttaaaaatttcattaattttgccagtgcatccttcgaattaaagaagctacgaggtcgtggttcacatgcttaggtttttatcatatcatctatttactaatcgcattctttggataagaatttagtaatcaattacacgcatgctccgagatttgctaccgccatttttaatttacgaaaaagtctcaatgctgcccttacactataatcgaaagtccatcgatctagcaccattaacttttataccggacattcaacccctcaagccatacaatatcattcctccaacaccgtaagatggttttgaaaagtggtttttattaaatttgaatatatattggatgagttttactaggtggcgtattatttgtacatatatttattgaaatgtctacctaaaccttccatttttttacctttttaaaaattgaggatattattctagcatgacaaattaatatagagtataaattgatgactgatgattgacgatatataaacatgctataagagtaattataatcgcccatttaagtttcctaatatgtaaaaccaccgtccaaaatcacctgaggacgtaatacagtattgtaaagtttagagaattaaacatcggcttttaaagttagcgtgctagataaactttcagtcaaaatttaggggggctatataggcaattttccctttaatatatgaaacttttagttatgcatttgacaatttgtcttattatttttttcaaatatgaaaaaaaatatatcatgctt

SEQ ID NO: 3946 - DNA, 1558 bp, Oryza sativa
caatggatatcaccgacaatgagcagaaaatcaaggcatagcggctgataattgcattcatctctttgagatcttgaacaaaaaatgcagcaatcattcctccgatggttatagcatagatgggctgcaaggaaccatataccaaagcagagagacttcctatgactgcttgtctccactctggtgcattcatcgcaagaagcctggagaaagatggtgccgggggagaaacagaggaatcggtttcctttgaaatacctggtgtaagtggcattggacttgctctggacatactgagacggctggtactggtccttgccactgaagaggccctaaattggtcaccaccttcttgatcgatgtagctcaccatcttctgcagtttcacaagtcgtgaatatgggccacccttattaatcagttcatcgtgtgtgccaatttcagctatagtgcccccatcaaccactgcaatctgatcggcattcttcactgtggaaagcttatgagctactacctgatcaatttaaatgtataatcagcgccacggtgccaaacaattgtacaattaatcttagcattgtaaagtagggcagtggaggtggtgacgatgtttaccagtgttgttcttcccatagatgcttggtcaagtgcatgctgcaccagcttttctgattctgaatcaagtgcacttgtggcttcatcgagcaaaagtatagccgggttcttgatgactgcccgtgcaatggcaatacgttgcttctggccaccagatagcagtgctccacgctcgccaatctgcaagggcagggcatgcaaccatagagcatcagacacagggataggtgccataatacttgtttccttgtgatgcacataccttagtctcatattcctcaggaagcccccttatgaagttgtgagcatttgctgtcatggctgctgcatacagttcatccattgttgcatctggtttgccaaacaagatgttctcttttatggatgtaccgaagagtgcatgatcttggctgacaagccccatcttgctcctgatccacttgagctggagttctttaatgttgacaccgtcaaccttgacagttccttcagtggcatcatagaaccgttgaaccaatgctattgcggttgacttgccgctgccactggatccaaccaaggcaacagtttgcccagcaggaatctggaggttgaagtctttgaggaccgtcatgttaggcctcgatgggtaaacaaagcggacagactcaaactgaagctctccccggacttgatccaaaataagtcccttggggtcatcagcatttatctctggcacacggtttatccgatcgagaattcttgtggcagcaaccgacgcttctgtgaaatgcttcagttcagggagtgccattccaagggatctgcaaaattttagtagtatggtcatgtttaatcttctgtctaccaaatggattcatgagttcaaaagggaagagagaacagaagaacatacaggccgcctaaaacgaaggaaatccctgcagcatatatccttcctccg

SEQ ID NO: 3947 - DNA, 1535 bp, Oryza sativa
  unsure (1)..(1535): unsure at all n locations
tctccttggcatatagacaaaggctctctcccttattcccttgttgttttccggaccatggtttgaaatttcagtaattttggcccccaccggcaagcacaaatctccccaaaattttcggttttttgtcaaatatttataactttggtcaaattttgttcaaactcagtaaaaaaatatgttaaaaattcaaacaattttggtcaaaagaacctgaaaatcacgaaattttcaaattttaggcaaccaccaaaattgcaaaccctgttccggagcccagttgtgtttcttagttagcctagtgtgctctcccccgtctcacctctaacccccccatgaccagcttcagcgggctgtagttgtaaaaactcttttttttttccttgctaatatatcaatgcgtaaggctttttcgcgttcaggaaaaaagaaagaaagaaagataaattgaggtggcacttagataactaatgcactttatctaaaaagaagtaaactaatgcaaaacttgcaattgaactcctgacaattcaactgcgactatcatattaacgctgaccttgtgagacgtttagacctgacaatatgggaaacgatacaagtgtgaaagagcttgcatcatcatccataatttctgctgccattgcatatattatattcatgataaaaaatggatattgctggctgctgaaagtagagagagagagagagagagagagagagagagagagagagagaccaaagagttctgtaacttccagaagcttcaacacatatggtacttgaagtttaagagaagcgttacctgcatgcagaaatgtgacttccgcatagccatctcatgtgacaacaggcatttatattcttgccaccacagtccgatttttccataagctgatatatgtaaggtgtaacctcctacagttcaacattgatacaaggcccattaagaaagaggaaagggataatgcacagtttgaattctgtacctggaagcatatgaagtctgggttgtgaagttgaataagatctccaagagccgcccagccttctgtgcagttcnatatcctctctgatccagacattgtatgtcatgattttaaggtcttcttgtttaaattattctcaaatttttctgcatgacaagatttgtattttagtgtggccatagcgaagaagaagaataaagtacagctttgaaggaaaaataaacttctaattatctagatagataacataatcacacacatatgtaaaattaactaccagatttggtcatatgagaactgcggcaactccaagatatagatgcaaaatacccgagcaatttgcatatcaactagatcttacacaattgctcaaacaattaataggaagaagcaccgaaagaaaaatattgcatgcttatggcaatttagtagaaaacaaatgacagaatgaaccaggtgaatagtattctgtatcaagagaatattaaattcagatcacatagagcaaacaaagtatttgtctcatcatacatccatcaatactgc

SEQ ID NO: 3948 - DNA, 538 bp, Oryza sativa
acacatttcatcaaaagaaactaagaaagaaccacgagcaagttatcaacctggcttttatgaacagaggagttttatatatctgggaccatgaatttattatctttttctgcttagagcctcaaccttttctgttcaaaagcattactgactgtccctaatttcggttgcaacagtttttttcttctagacttctttcactaatctgattcaattgcaaacaaatgcagatgagcaaattaccggtgagcgaatcgaaccccatcccattttcgaaatcaataatgaagagggagctatgcgtagcggtcgtcaaaacgggagagatccatttggctgtgggcacaagtcacctagagagcccctgccctctacctcctctgtgggatctgaagtacagcgagaagcgagtagctcaggcaaagcagtctctggagattcttggacaattgcgcaatgcaatcttctgcggcgacatgaactgggaagacaaagtagatggtccattccctctacctgacggctggattgatgcttg

SEQ ID NO: 3949 - DNA, 5271 bp, Oryza sativa
cgaggcctaccgctgtggctaagcggcggcgtgtgccagcccaacccccgacgacgacgacgcgtggcgacggccgccgcgacacccgccgccacgtcgccccgccacgcgccgccccccggcgagctcctcctcctcttttataatcccagcctcgtctcccccgcgatgaccacccccctcgccgcgccacgtacgccgcatcgcatgcgcgcgctttccctcgccagagcaagtagcccgccgcctcttcttcttcacctccgacgagcccttgcacccgcgtcgtcgtcttctccggcgccggtgctgttgctgcgtcctgcggtttcttgttcttctttgtttgttagcgacagggcggcggcggctcgccggagcagcggcagcagcaggagaagcatggcgtcgcagcagttcccgccgcagaatcaggagacgcagccggggaaggagcacgccatggatccccgccccgaggccatcatccagagctacaagccagccaacaagctgaaggtcagtttactacttgatttgctgttcttctccgttcatgtcacgttcatgtcgtcgttcgtcggtgcaggacaaggtggcgatcgtgaccggcggcgactccggcatcgggcgggcggtgtgcctgtgcttcgcgctggagggcgcgacggtggcgttcacgtacgtgaaggggcaggaggagaaggacgcggaggagacgctccgcgcgctgcgcgacatcagggcgcgcaccggcgccaaggaccccatggcgatccccgccgacctcgggtacgacgacaactgccgcaaggtggtcgacgaggtcgccggcgcgtacggcggcgccatcgacatcctcgtcaacaacgccgccgagcagtacgagcgcccctccatcaccgacatcaccgaggacgacctggaacgcgtgttccgcaccaacatcttctcctacttcttcatgtcgaagcacgccgtgaagcggatgcgcgatcgccgcggcggcgccggcgccggcgggtgcagcatcatcaacacgtcgtcgatcaacgcgtacaaggggaacaagacgctgctggactacacggcgaccaagggcgccatcgtggcgttcacgagggcgctggcgctgcagctggcggaggaggggatccgggtgaacggcgtcgcgccggggccgatctggacgccgctgatcccggcgtcgttcgcggaggagaaggtgaggcagttcggctcccaggtgcccatgggccgcgccggccagccgtcggaggtggcgcccagcttcgtcttcctcgccagcgacgacgcctcctacatgtccggccagatgctgcacgtcaacggcggcgtcatcgtcaacggctagtttttcacttgtcccatctcgccgccggcgggcgagctcgccgtcgccggccgccgtgtctgtcttggcttttgctgtgggcatgtgcccacgtgtttgcagtgcgagtccaccacgtgtcagtcagtagtagcttgtgatcctgtgatactgtgatgagtagagttgcagttgttgtctgtgtactaagcttgcaactcaatctgcaaggaagaagatgaataaaaacgtcccatctcatcgctacctgtgatcttgcatttccttcctattttacacaaacttgatttgtactctaaaaaccctcacaaaaaaaggtgattaaatttatcctatttaagaaaatttcgcagcagtttcatggcaagtataaataaataatggtaatgtttgccacttaaatgttctacaagtgattttcctacaaaattgttattattaccaaaattgttctctcaataaaaatttgtcaaattgttaccaaaatacgtacttctctggatataattcgtccaaattcttgacttgaaatatattcatttactggcccagctggcgaattaaggccgtgtaatattgggccgattcagcattgaatcttgtattttgggccggtcttgtagtttcatctgggccatggaattaataaagagctaattaatcacgccgctttattacaaatacggatataaaaatacaaatcaaacggaagatcaaccgcatctctcgggtgtttcggtttccaaagcaggaggaaaccctagccgccagcctttaaatctaagagcaaaacctctcgccgatttgttcttcatttggcattgtcgtcgaaggagttcgttcgagtaggtgagtacctatgttttgtgttgatttctttggtttgttgttgatttattcaccttggttttgatttctttcggatgatgatttcctatatctatagttggcttggatctaatttatctagttttgagtgattttggtttttacaagatgaatacgtctggcctttgtaccaaagactgatttgttattcggaatctccaattgttggtgttgctttcttatgtagatatattgatttatcttcataggatcattgttttgtctttttatgttttctacgtaaaattttatacactttagataagattcaccaattttgaaagatcttcagatatattttccaaagctgatttgtctcgagccatcttattgggccacatggcggtgttaaattttgagataaatctaagaaaattatgcatcttattgggccacatggcggtgttaaattttgagataaatctaaagaaattatgcataagagaaaataaccaaaaggaaaagacacaaatccaatttctagatatttcccaatgagccacatggcagtgttaaattttgagataaatctaaggaattatgcataagagaaaataaaccaaaagaaaagaaaagacgcaaatctaatttctagagacttcccaatgatctatcatctttgagataaatccaatttctagatacttcccaatgatctatcctctttgagataaatctagagaatatccataataaaagaaattgagaaggaaacaaaaggcataaccgggaagcaaaccattccatactaaaagagaagcaaacaaaaggcataacattccatactaaaagaaattccatactaaaagaaatatcgagaagcaaacaaaaggcaaaacattctgattctatctcattatacattattatgatacattattcggacaaaaggcaaaacattcggattctatctcatgatacattcggattctatctcataatggttggattctatctcataatggatggtttcgtgccagctgattggctgctctcaacatcatttagttgagcgacacgtggcgagatacaagctcgaaaagagcgccagttaagaaaccctctataaaactagccaacgtgattgaaaaacgatggaagagtcgctccattaggttattaattctatctcatgatacattattcgaacaaaaggcaaaacattcggattctatctcatgatacattcggattctatctcataatggttggattctatctcataatggttggtttcagaggttggtttcatgccagctgattggctgctctcaacatcatttagttgagcgacacgtggcgagatacaagctcgaaaagagcgccggttaagaaaccctcactataaaactagccaacgtgattgaaaaacaatggaagagtcgctccattaggttattaatgaaaacggatggttgagatttcttatatgcatacattgatttatgataataggattattgttttgtgtttgtatgtgctaaaaaccaactttcttacaacgattttgctatatctcactcgaaagatttttttttctttatctctcactcgattttcttactcaaatttagagtgtattttcttgtaagttacagcataatttatgaaacttacattgcaacttttgtaagttaacagtgcaatttttgaatcttcgcatgtaagttttgaaatttagattggatttatggtgtttcttagttgctttttgccttttaccgtgtctattagatttaaattcaaagattaaaaaactgtgtgatatgatcaaaagatgcatagatactaattagaggtttattcgaggatgaaattttatcccgtaaccggtgcggggtgcgtactaccaccactacgtaccacaatttctcctttgctatgtaaaattctatactttagataagattaaccaaattttaaagattaaatcattaaatttgtatcaaaataaatttataaaatataataatattatgattaaattcgtcttatccatattcataggatatagagcatttagtaccgatgctagattcatcctttttggcctatcactactattgaatttgcacataatagccatacaacatatatatcaatatatatgatatcatactatatcatacgagagtcagtgtcggtcttggatttattgcctaaaagggtgtaggaaaaagtgccggtcttagatttattgcctaaaagggtgtaagagaaagagagaaacaaaatgggcacctgacgcctaattttcctaaatgttgttgcccgatattatccatgtaaaaggttgccatacatacctttatgaggctccaactttttgcagtgaagaacaacgtatcaagactttatgtacggtccaattcttcacagtgaagaacaacccagagaagaggaggagttcacagtacagaacaacccagataagaggaggacttcacagtacataacaagccagagaagagtacagaacaacctagagaagaggatggactaactctttatagtgaagaacaacccagaagagaagatgatggactttatctacgggtcgactttatcaacggatccaactcttcatagtgaagaacaacccgggtccaactcttcgtagtgaagaacaacccagagaagaggaggtacctattggctctattggcgtgtacatcaaatccctgatccctgatgtctcaaactcctagtttatgcatacgcaagcaataatgctctagctagtttctcaggaagattgtggagaaagagagacaaaatgacaaagccagtttctcgggaagattgtggagaaagagagagacaaagtttctcgggaagattgtgaagaaagagagagacacaatggtgtaggagagggtgggaagattatggagagggtgtttctcggaaagattgtggagaaagagagagacaaaatggtgtaggagagggtgggaagattatggagaaagagagttagggaaggggatgaaaattggagagtgtgg

SEQ ID NO: 3950 - DNA, 25194 bp, Oryza sativa
ttattgttgttcggtcggatgggggccttggtaaatctgtccataacattttttaaagttaaataaaaatgttgttcgaggcatctgtatataattcacggtggaataagaagcaaagcatgcaaggcttatggagccttaaagttagcaaacgcctttggttatttcttttctcgttgaagattagttattaatgaggctgggttgtgctttcttaaaagcagggctccaggccttttctcttaaaaaggaaaagaaaaagattgtctccttaacggcaccttgcttgcttacagtccgaggtactattctaaatagcttgcgaggaacaaaagatctactgggcatgcagcttgccggaaaaaaaattaagatagagattaaagattttctcttagtcacttcggtgatcaagttttaaatcgtttagatttccttccaagcaactcattggccaaagatatatagtttttcgtacattgatatcaatgctccaaaaattttatatcgtggtacaaattttaaatacaaaaaatacaaaatactattatgcatgagaatgacacgtggagcatagccgagcctccatatcaataaccggtactccctccatcacattttaaatgcaattgtgggtttccgtgtccgacgtttaaaataagacgaagggagtatagcacattcgatggctttttttcttccgatggtacgtaccaaagagattggcccctatatatatagtagtagattgctatcagctgacacagtcgtgtagtgtgtagcctgctagggtaattgaaagaaattacaccatggatgaatcaacatctgctttggatggtgatgagaagaggaggtcgaggaaggagagcccgctgccggaagagaagttcaacatcttcctactctgcactgctttcgtgtacagggtgatgaatggcctcgcacactggccactatctgggcgaccgtcgttctgctcggtggattctccaccctcgtcaagaagcaggatttctggtacgtcaccgtcatcgccttcgtccaatccatcgggtatgtatatatattttttcactcttccttcgatcgcttctaacttgtctgaattagacaaattttaaagtactgaccctaaagagtacttcttcagtcaaaaaaaaaaaaaaagctcaacctactttaaaatttgtacgaatctaggttgagtcttttttaggacggaaggaatacgtactttaagattgaaatagcacatcaattttttttggagacatgcctccctccccctgtattgcttgaatccataatacgtgctgttttgtatttttcatcccatgctccatttgtttggtttttgtgttctttaggcctctagtggttgaaatcgttccccccacccccaattttcttcaaactgagataaagaaatattgtctataaacaccatcacagtatccaaactttattctatacaacattaagatgcagttaagttcaaaaggtccacccaacgaaaatgccaagcagtatgtttcacatgtgaattataattcatcaaaactatcgagtccaacaggaaaatattatgcagtacattacctgaattgcatagaccacacagcattgatccaatagaaaaggcggcccaagcccatcatttgacattgcatgcgcctagtggaaaaaaaatatcagaaattagcaggtgcgaaaaaaaaaggcactggtcaatgaaatgtcacaagaaactacaaagcagtgaaagcacaagccaggctagcacctgacaataaatctcggcccagaatagaagcgaaattgcgtatgtccgtgaagaatgtgagcccaggcatatctacaagaacatttttgaagtatttgcggcagaacattgctcaagatcataacttgaatgaattctagcaccaatcaaatcatcaaattagccgcaattcagaaacctctggatgtagtggcaagctgatgtgtatgtgccgttgcatagaagagtctgcaatatgacgcttgttcatttaaggcctagaaccaaaacaaggtgacttcattaggacgctgaccaccaaaatacaaagcataactaaaaaaaggtcgttacacagataatccaaactgaattagcagcttgtacagtgacaaaaaaaaaatgtccaaaccaaaagtacacagccacactagatttctgaactaaaaagaaacctagagttatataagctctgatgaatctgtgccatgctgattcaaggaaatattcaattgtagtagtatgtctgaacttttctgcaagttccatcagtaaacagggcatactaatgctgtaactagagaaacacataggactaacattacaaaaaatgttagcgattaaattcagagattgtactagttcaccactcatacactaaaaacatctagtcttacaaaagttctggatgttacaaaagttctgacgagatgcacctaatagtacagtggcaaaaggtatgtggttttcaactctaaggtcccgtgttcaatccccatcacacataatttcttcttaaaaaaagtttggagggacgtctctccctccaaatctccttttcttttttttttccaaaattctgactaaaaatcatgtgatttgctccggtgaggtactggtatttcacgataccaaatcgtttccgttcattatctcaaaaatcatttctaggcttacaagcttctgtatgaaatgaaatatctaaccaaaaagaatggagcttcaatgattatgaaaaaaaaatcattgatcatgcaacacgatgcatcgcacaatctatgatgggctgattttaagagtaaattaccctgtcaccatcactgattttaagagtaatttactcttaaaatcagcacatcataggaaacaaactcttgattgccatagttttgatagttaccctgtgatggtgataaaatccatgaacacagtgatcacaatgacatgcagtgctttgctgctcagtttcacaattagtttgccaaatcactcctgtcaagcattggaatggaaacttagaattcacaactacgcacaagacacagaaacatagcataaaagtaaagggtgatggcatccataaaaaaacaacccaggatcgatgcctttcttcgatgcgaatggcaactgcaggtagtctaaggctttccagactcagcaccacattaccaatattatttcctccacagaacatatacaactaaaaaactaaatcaccgtgtgagagacaacaaataaccacaaaaaaaaagtgcaaatgtgatcatcaactctaagaaaattagctagtcattagtacaaacacaaatcatcatcatgttcagagaaaatctgaaaagttcttttgaaaaaagaagctctagatacataaacatgacagcaaaaaaacagcacattccaatcgacttgttaacttgtagaggcccccattcacttgtaggtatcgttagctcaaaagctgaaaatattactcagtaaattcaagtctagaaacagagaatgccagctccttgaaacaaaatttagaaaatctgaaatttctaagcaaacaaatggatatataatgtgcctattcagagacttgaacatctaggcatggtactgaatgcttcgtaaaagagaacttttaaaatttacattgctattagtaaatggaggtaaaatgaaattgttatcagtgaaattaacctcagagaagtcatccgaactaagtactataattgaacttaaataaaacactgcagtattcacatatgttacaaaaagaccatgctgtcaatcacacatgtattcagacagaacagaactagcagagtacacaagtgccaactctcaattatataccactcacaacctcactgatagcacaactaaacaccactagacaaacatatattggaaaaaatgcatatccgagaaaaaagtaagcttcatctaaataggaaaattggatgtgtacatccttttcacggatgttgaggccaggttttttaatccattatctaaaaaaatataaataggaacaaactaaatacataaatatgacatgaacaaaaccaaaagataaccacctatatgctttatgggtgaactccattggtcattatgtcacatagtaaaaacaaaatcaaagatcaacaaacataatgttgattatttgatgaaacaatatgtcttttggagcacatttgaataaaagggcatacatgtcatagagtagtactgactgagtcagatagttcagtatgaaaaatgtaaatatgtacagccaataacaaagaaagccatgttcacaggacaaagcaaattaagagatggatttctagccttctagattcttaccaaattctaacaaaacctcgggaattgcaagttcagacctacaaacagataatgccgcctttaaagttctgcatgcagtgaaatatcaaacataacaatatggtaggttgaaacaactaaattaatggaaactacatacaaaatggtaggcgaaattaatgaaaccatgcatacaaaactaacaaataatacttatatgctaatctatatcctcaaaccaagaattagctaactatgaactagcatataatacttgtatgctaatttatacataacttaaaaaactaggtactatctgctttctctatcaaaaatcaacccagggcttttacttgcagaaattatctagatgattgaagtttcctaacaaaactactcatgttccatgtgaacaaaacaattctaatttcctaaacaaaactgtccatgttcaatgtgaacaaaacatagtatacatagttgcttgttttgaaaaaaaattaaggacgaatgagaaagactgtaacaccttaaatgagagacatggggagagtggaaaggtggtttgggggcgggggtgggggggggggtaataaagtgagaaatttgaatgagagttgattggttggacaacaagtactctagaattccttacattgtaggacaaaattcaaatgcttggatcccttatattacgggatggaggcagtagatatcgagaatgcatataatattgcttctcatttaaggaaaggatattgctcaagtaaactgacacaggagatttctctgaacattcttaactaataaaagatatgttatcaagtaaaattgtcaattgatacaaaactagagcaaaatatatagtttccctagacaaaaaggagaccaacatgattttgctaaaaggagttatgagtaactggagcaaaatgtccttgtactatacaaaatatgaaactaaagttagactaaacttatcaaaatatgaaactgaaacttgtactgtacaaactaaatcatttttgtatcaaaatttatgtaaatttatccgctatgaatgatttgtacaatttaaaatattgttcatataaaaaatgtatataactttttccgctggaaattatataacttttatatcactatcggttcttgagaagaaccggtagggatttcaatggttctccttatgattaaaaccggtagtgatattatgggttcttcctatgaactggtagcttaagaaaggtcgggatgactcttttcctaacagtgatagtgatatgtgaagctcacagaagtatacattgcaatgcattgacaggattttgggtggttacgaggatcctgcacatcaaattttcttgcacgcaccagaagcactaataaagaacagggaggccgaagcttgggagcgacgaaagagttggtggaggcgcagaggaacacagcagcagcagcaacaacaacccagaggaaggcccagaagaagaaaacaagaggagaaagcacggaagtggtgcgacgacatctatgggttccaagccttccttgggattgccatctacgtcgccatgtggttgggcaaggtcgccgctgtggccacctgcatagctctatcctcgaagcgtctcgagaagcaagactatctggaatccggggacaatgagaaaggtgaccaccagaacatcaggtggtccctcaatatcttctacagtctggtgcttgcccagggaatcatcttcatctgcatgctactgaacccactgactgtttattttgtgcttaaggtccgaaggaagtacaagctatttgagccctctggtctcaagataatctaccgttacaagaagtacaattacctggggttcattgctggcaatgtacgtgccaccctcaacatgcacctggtcacctttgccaagaatttggcagtgtccaacacgatcgatgaccagttagctggtgttcgggccatggaccgcatcctcatgtcagtggagtttagaagcctggcccttaggaggcttcgagcttccatggaacccgacgatttggggaagctgatcgatatgctaggcttcgtcagtaccatggaggaggaacagaatatcatcagaggccatgctgcaagagttgtgctcaaattcagtcctgaccttatgcttcagagttatcctcaaatcctctacctcatttcctcttccctgctcagcacatccaacaagagggtgtgcaagtgcaacatggactctgacttagtctggtttggcctgcacatcctggacaagctcacggacaacccagaaaattgcaggaaagccaaagacgatgacagtgatctattattgcccatgattatagacctagccaacctttgtggacatggtcatggcaacagcgtaaggagtaacactaccatttctgactcttggattgaacaagagattattcctttgcttcaaaaagaagatgatattcctcttcctttcatcaacaagattgaccaagaaattattgttggcatggcactcaacatcttgagcaagctgatcgctgtgccgggtgaggctggggaaaaactaaggaaagaaacctcaaaagacttgcacttcctgacaaacactgggatgatcatggagcatgtcgaagcaacaagagtcatatcatgcttagctgtggataaggaagcacggcaagacattggcaagttgcctgagatcatcaagaaacttaaggattgtctactttccaagacaccatatgtaaatatgacgaaagtagctgccaagttgttgcttatggagtacaccagtgaggaattattaaaccgtgttctgcttttcatcgaggaaaatcgtactgtagaagatcaaagcttttcactaccaatttcagccttcatagaagaactttatcttgatcaacttccccagagcgtggtacagagacttgatctggaagatgtactttcctcgccacgggtgaatcactctgaagcagctgctaaagcattaattctgctcactacaggatgtgaaaacaatgttgaagctttcctaaaagggatcaatgaaaaggagttgaacaagatagtgaatgtgctctcttcagaagacagagataaagaaaagagaagggcgctggcacaatttgaaggacgacatcatctggacccagaaacattgcgcatagtcaaaaaaataatcttggctgagggtgaagaacaggaaacaagtatgcatgcaaaactcctgcagaatttgcgtgcctactcaggaccaaaagaatttgatgagtacatgaaattaatagatgcagcactgccaaaggtaattttgttttaattctagccatcatctttggatgtaatctactcaacatatatattttgtatgtatgcatcagctcagaataatgcctcatcaccattttactttatcacgacaatattcattgactaagcaatatggtgacaatgatcgatatatctatctgaaaatttaattatataggtgctcaaagcagtcgtagatgcagtggcgactttggaggatccatcatcatcagaaaatctgaaccatgtaagaaaatagtagctgttttcccttacctactgactacttcatttgcacctagtctaacttcccaattcacaaaagaaacaattttctttggatatatatgtaggtaaaggatgacctgtggatcaaacaaggcaaagtactagagagctttataggcctcgcagtgcagatttgtaggtccccgaacgcaacgagtgatttctccactgcactaaaagatgccaatcttactgtgcacacattcatcaagaagcttaagaagatattagaagtctacaggtctccaagtactgattttccatgcataagggtatccacacttgagttaattacttggatggtcgaagaaaacagcagctacagggaaatactcctaaaatgtggaatatatgaggaactgaatgaagtggcaaggactgctagaaaacttgagagcttcaagctgtttcactgcggtgttgggattcctacggatggtccaattgaatgcatctcttcccgcgcaactgaattacaagaaaagcttcagcaaagccccaattttgagaaaaggtactgtttatgcccttttagttaaaacatcagttcaaacatacttagactcctcttggagaattcgtaaacccaaacttaaatgtttgcctttaatctgccaattgtcaaggactctgccatgtactcccttcgtcacaaaatataaggtattttgaccggatggggcatatcctagtactacgaatctagatagagagtccgttccagatttttagtattagaatatgtctcattcggtcaaaataccttatattttgggatggagggagtagtaaacagttcccaagttggctgtgatttcatctaaaatgacttccttacttgttcttgcagatacatctgctatggagaacatgcaagcagcatatctgttttaattgcttagaacagtcatttgcttggttctttctgaccaccaacaccatcatcatccttttgtgtttgtgccaaccaaatttcgtgtttgagtgcttgtgttttcatttgcttggttatttctgaccaccaacatcatcaccatccttttgtgtttgtgccaaccaaaattcgtgtctgagtgcttgtgttttcatttggatagtgtgtcggaatggttgtgtttttaaacccagtgtcagaattttgtgagactataataatttccatggataccatcaaatcaccatggcatgctacaaggttgtgcaagtttcttgtatgttcgtatgatttttttttctgcaaaatatccatcacaaaacaccatatcaataacctcatatcatagatgaactcaccgacattgtaactagtgtgtctaccttgtttcatatcgaccatgttcaactgcgtgtgccctaaagaatgaggcgatcaagcaaattcgcagtataatattcaagcatgatccaaacagagccgtaaagctaatccgcaccagatattccctaaaccatgattaagccaccaaataaaccaaggagaccatcaaaaagttgatttacacgcatcgcattcatagcgcgcagaaatcctcagatagattttcccctcctccgctatttagaatttcatacattaggttagattaactaactacaaccaggcacaaactttccaacccagcagcatcctccaatctagcttggaaccaaatcggtaactcgcccaaaaataaaaagggggcaaaaatgcagcgaggaggagaggatgagagagcgtacgagctagtgcaggctccatccgcccggtcgccacgctcgtcggccgtcggccaccccgctttctccgccgtcgccgtcgccgtcgccgtcgcggcgccttcccatggcttggaggaactcgagcctgctccatttggattcgccgcagtagggaggggatttgggaggcccatgggccggtctgggtgttaattagtagcaggtaaggcccactttgatttaaaggaaggaattagttcactttaggtcccttactttgtcgccgagtccaaaattcgtccctggaccgaacgcatcccccaacttactgaaaaccaatgcaaacgagagctctcttagtagtattgtcgccagttttgactgacgtagctcatttgactaggccttcgccctatgtagtattgacatgacgtttacatgttaattcgatcctggaaaataataaaaattgttgggccacatgttagggcctgtttggcacagctccagctccagctccacccctcctgaagctggagctcagccaaacagtttcagctccaccaaaactgggagtggagttgggtggagctctctcacaaaatgtactagagttgtggagctgagtttaggcagctccacaactccactccagactcaactcctggagttatatttaggagttggagctgtaccaaacaggcccttagttacacacatagaatagtaaaaatggcagggcccatgtgttagatgtgcaactatttttttttatatcctacaataaatacacgttcttgcggtgtatatctatctcaaaataaaccactctagaattggatgggacattaccccgtaaaatgaatctggataagagcatgtccaaattcattgtatgaggtaacatcccgtctaattttagattgatttattttacaatggaggagtaaataaaagtccgagttgtgagccgctgaatggaatagttccatttcttagatgacaccctaatgatgtgctcctaacagctaattctcgctgtttggttggatggggaccgtggtaaatctgtccatattttctttatttttaaaagaaaagaaaaaaaaaaggcgtggaggcacctgcatatatcacgtcggaataagaactaaagcatgcaaggcttatggaaggcttaaagttaccaaactcctttggttatttctttaattttatcgttgaagatttaatgtctctgtatgtgtgctttattaaaagcagggctcttcggtcttttcttaaaagcaaaaaaaaatgtctgtctgtctccttgacaacaccttgctttcatattgtttttggtatattttttttacaattacacggtaaattcacacacgcacacaccactacacacgtaacaccatattcacacatccgtgaccgtgaatggggcttctaacacacgttcaaaaagaataaaaccaactatacatccctaacctcactaattaagtttccgctgaaaacacatgtttaaagagaatacacatcgatgatctaattaacggtcccattgtttcacttattcgtgaaataagccaaacgatagatttgtaagcgaaatgtaatctgtgaataaaatttttatatacgtgcttttagcgatctaaaagaaaaggctgaaaaataaacttcaataaaaaaaactttaaaatcagcttcaattttaaggttgaaaatttaaattttggctgataagtataagcgaaaagatgaggtctttcacgaccattgcatacgtttacgagcactgggaataaatatcaggatttaaattcagacgggttaaatcatacacccacaatttcatgaccgtaccacttgtgtttccttgttcctaggaactactccctccatattttaatatatgacaccgttgatttttcaaacaacgtttgatcattcgtcttattcaaatttttttgcaaatataaaaatatttatgttatacttaaagaatatttgatgataaattaagccacaataaaataaatgataattacattattttttgaataagatgaatggtcaaatgttgattaaaaagttaacggcgtcatacatattttaatatggagggagtacttattattctaaatagcttgtaagaaacaaaagatcgcctggccaagctttcattgccttaaaaaggctagcgacacacaaaactactggccattagtgcaacacaaacactgtgcctagtttagggtaatagccatagccaacgtacgatcgacgaccaatatggattcatctgctgcggatggtgagacgaaggaggagtcgtcgaaagtgaagatgttgctgccggaagatttcctcaacaccgtcctcctctgcactgctttcttgtacaaggcgatgaataccatcggcacgctggccaccatctgggcgaccgtcgtcctgctcggtggattctccaccctcatcaagaaggaggacttttggtacgtcaccgtcatcgccttcgtccaatccatcgggtaagcaccctaagatcctaagttaataggagcgaatttcagattgggttatttaacggctaagtccctagttggatatagaggccgggtaaaaaaaacccttctcttaaaaaaagtataattaattaagtacatcctcctccggagtattagcttgaataaaccaactttaatttcggtttagaatactggttaagcagtaattactccttccgttctttttttatttgacactgttaattaatattccctccatttcaaaatgtttgacaccgttgactttttagcacatgtttgatcattcgtcttattcaaaataatttgtgaaatatgtaaaactatatgtgtacatgaaagtatatttaacaatgaatcaaatgatatgaaaagaataaataattattttttgaataaaacgaatggtcaaatacatactgaaaagtcaacggtgtaaaatattttgaaacgaagggagggagtatataactagtgggatgactttatctcaatttgaccagtgggaacttttagttatgatgttttgatgaacttattagagatagtataatattatatctaagcatgtaaagtatactttgataatacatctttttaagtatatttcttaaaaaagtaagatgatcaatcaaagtttgtatattattaaactagcttataaaactctgtaacaaggtaaagggcaaaggagcgacgcaactaccaataggtgcccgatttttagaaaaaaaaatctgacactccgctcctctcctactagcctatgcgtcgtgactgtactatatctactgtttctactccagtaaattagcacatgtaagaaacctatatgcttgtgcacgcatggctgtatggttgtagcccttatctcaaccatacttttcatttctttaaatattttttcttctaaattaattatccgattttcaccattaaacttgttgcagttaaatctttataacaagatctcatacggttgtattttgatatggaaaatcaagcgttgtttcaccacttatagaaaattattttaccgtttgctaaatattccaactcactctataaaatgattcagagaaatatagcattcaaaaaatactaactgcaatacgaacaaccattatataaaacattgattctcgtgagacataaaaaatatataaaagatacaatatatttgtaaatatgtactattattaaaatatttttataacattgtataaaacattaagttgttacttttgacacattataaaatactaattggaacattcaaataacaacacgtgcaacatttacaaattaaatagcgaagcatagtataaatgctagttgaaacatttatataaaaccatgtgtaacatttaaaataataaaaaaagctaaaaaatcattggaatatagctacgtgtaatcttgttgtaaacatttaattgcaataaatttaatggtatgaccagattgtagattggagaagtaatttagggaaaaaatcatttaaatatatagagatgtatgcgtgcatggttagataagagcaaggataatagtaggctataagtaagctatatgcttatgtggaagagagagataaacaaaagtggggagtgttggctctcatgcaagagctaactgcacacaaactccaagaaatatgcattaaattcatggtgagagaaagagagaggatgaagaaaataaagataaccttatagccaatctactatatatgttagctttaatattgactaatagtaaatagtgagctctattattaaacttgctctaaagtgatatgcatggaggcaataaagtggacatgattatgcgcgtgatgatgagaatccgatattttgctagagcgtcaggcatccgacgcagagcattctcggaaaacaaggggtatataacacacgagaaactttttccgtttccatatcgaggccaatccagatgatgaggcttctctcactaacctcgttcagtttacggttatatcattaaattaatactatagttatgtcattgacatgtgggtcatagtaaaataagacgtacccacgtatcactaacacacggttagtgactccactgcaatctgcacaaagttactagatattcactttcgaccaatccatgtgacagtaaaagtcatagagaaagtgggatattggatcatggtacatccgttcagacgtctcgtgtcagtgacatgtggggttttcttggatcacatgtgggttaggagggtaagcctgtgtttagttcagtttaagcttccaaaaattccgtaacatcaaatatttaaacacatacatgaagcattaaatttggacgaaaaaaaaccaattacagtttgcatgtaaattacgagacgaatattttgagcctaattacgccatgatttgacaatatgatgctacagtaaacatttgctaatgacagattaattagacttaatagattcgtctcgcagtttataggcgaaatctataatttattttgttattagtctacatttaatactttaaatgttgtccgtatacttcaaaattttttctgaaaagtaactaaacacggcctaaatcctcaatttcaatccaataaatagagggtatatgatcaaattttgctataaaacccaacgatgtacaatgtttttttatgagatctcataaacattcgacgggcaaaagcgaagtagcacatataccaattgagattctcattgatgcaatgcaagtatattccaaacagcaaattatagtttaagctccttctcgacattgaattagctttatgttccatctcaacatcgaattatccaaactctgtatctatataaacttgtcctgcattttgatcaccatctccgctgctatcaccgtcgatcactgtaatcgttctcacggttagctgcacgggagtttgcagtactgactcgtcatcttctgatcctgaccatgctgatctcttctgttccatggcaaactgaggatgtccctagtccctacgtgcataaagagaaaatagatcagcaaatttacatgaaagtttctggaaatataggttggagaggctaaacacaatgaaagtagagggcaaaagctaaatataacaaggaaaatgtactgttagctatgttggtaaagaaaaaaaaatgtgtacaggctatgtaaaaatgagctataaaaatgttatagctaattttaacagaactcatgcatcttatataacgagtttgatcacaattaggcaataataggcatcacataatctatgctacttaaaaaatgcttgcgatgattatggataataatggatagatatatattctgtcaggagcaagaagattccctaaattttttcgcgaacgctagattccctaaatttaattgatccaccaatctttctaattcatttgtgggactggtcaaacaaaggaagccacattagcttctggataaacgttaaatttgctgacagaaactaattccaacttcgaataaaaaaggattagaaaaataatggaaactggcagctggcaagtgttgcaaggataatccaccaattaaataaacttgaagtcagttcatgcctgaactgagaagctaattagaccctatttattcctgcttctttgcaaattcagaatatacaaagatacctgaactgagcagcaggtagccgctcgctcggataatgcccgatctccatatatagctctcctctcccactccccgttgggcagcagggagttgcatggctgtaacatcaccttacctgtgtccctcgtgcaccattgccactgctttcggagtcggaggcaaggcaccctgcaacacaacagcaattttttagtcttatataaaggtagctagcttattggaaactgtgtgagtaaaacaaactctcatctatccagcctagctgaatccagacaattatttccggcacatgaattcattgtcatgccttattgttcctgtaatggaatacttcctccgtttcacaatgtaagtcattctagcattaacatcaatatgaatatgggaaatgttagaatgacttacattgtgaaacggagggagtatatggcatgagttttaaaactaataatttcagtactacttgtaacagagctagaaagagcatatacaaagcacgcaatgcagtagatcgatccacatgttcatgtgttgatgctacacaattgcacaagcagctatctaaattttggtagagtcatcttccgaaagaaacaaagaatcctctgaacccctagataattagtaatttaaaaagtggaaagcccaaaaggatgaaacaacatcgtcaagcgaactgcagaagacttcgcagcacatggtgggatggcagttgactgcatggtgatggacttcgatcatgagcgttagcacccccaaagattccctctacaatattataaatctaatcttgcaactctaatcagccgctgaagcaattagggaaatataactcatgttgtgatgccaaaaccactgaaacaaaatttcaagtgtattgcaatgccattggttgacgctagcaccatcagacatcaacacacaaactgtaaaagatgttgataatttccattttcgaataaattgatcgtttccccaaaatttaatgccgagaaatgtgaatgtcctgcatgccttgtgattgcttctcctgcatgtatagatggccaaaaggcctgggcccgacggcccggcccacagcacgggtttggcccggcccaggcacggcacgacccgactagtgtagagcccatgcctaggcctctgcctcggtacggaaggccggccggtgggctttcgtgccttggagccggcccagcacggcctgagtcttattaggccgtgcctgggccattgatgcagcccgtgggcgggcacggttcagcccggctgtaggtcgggtcgtgtcggcccgactgatctcgggcccaggcctggtcgtgctcgggccgagcggcccatttcactcactaatagctcttttcactcactaatcagcaaacctaaaaaatacatactagcactaatgtacagcattctcgagatgttcaacttgttaaaaaaaacttaaccaagtctatcactatgtcacgtggccaaaaccacctataaaaacacactatggggttatttgaacatgtttctatatttcaagggatagaataccctgtttcctactttatggggttaagtagaccaacattaatacttcaggggataaagtagaacttttcctagatagatttatacaaattaaaatattgtttatacaaaaggtttttattcaccgaaaaattgtatcacttttatatcactgtcaccagggttcttgagaaaataaaagcagtcagtacgtatttcagtggttttcctataaaacccggcagatagtgacattgcgggttctttgtatgaattggtagtttaatattaagaagggctaggatgactctttttgtagtagtgttatatgaagctcaccgcagtacaattcattgacaggtttttgggtggttacgaggatcctgcacagcaaattttcctgcgcgcaccagaagcactaatgaagtacaaaaggacctcaactttgaagggattaagttggtggaggcgcagaggaacacagcagcagcagcaagaacccacaagaaggaccagaggaggaagaaggcacaaagaggagaaaatatggtacctgtgcagcatctatgggtgccaagccttgctcgggatgaccatccttgccgccgtgtggttggccagggtggccgctgtggtcactgtcttagccctatcctggaagcgtctcaagaagcaagactacttgaatcccggggacatcatgaatgaccaaaaccagaacatcacgtggtccctcaacatcttctacagcttggtgtttgcccagggaatcatgttcgtcaccatactgctcaacccactgagctattattttctgttcaatgccgggatcaagtacaaactatttgacccctccggtctcaagataattttgaattacaagaggtgcaattacctggaattcattgccgggaatgtgaaagcaaccttgcaaatgcacctggtcaccttcgccaagaaactagcggtatccaacatggccgatgacaagttacttggtgtcggtgccatggaccgcatcctcaggtcgatggagttcagaagcctagctcttaggaagcttcgagctttcatggaacccgacgagctggggaagctggttaacatgctaggttacgacaagagccacaaaaacaagaccacggaggaggaggatatcagaggccataccgcaagagtggtgctgaaacttagtccagatcttctggttcagagttatcctcagatcctctatgccatatcttcttccctgctcagcacatccaagtccaacaacaagagggtgtgcaagtgcaacatggattctgacttggtctggtttggcctgcgtatcctagacaagctcacggacaacccagaaaactgtaggaaagccaccaacgacgagagcggtggtgatctattgtccaccatcatagacctcaccatcccatgttgtcatggtcatggtcatggccgcagcatgaggagtaacactagtaccatttctgattcttggattgaacaggagattatccctttgcttcaaacagaaaacgagattcctcttcctttcatcgacaagcttgaccaagaaattattgttggcatggcactcaacatcttgagcaagctggtcgctgcaccggatgaggctggggagaaactcagaaaagaaacatcaaagcatgtgcatttcctgaccaacactgggatgatcttggaccatgtccaggcaacaagagtcatatcatgcttagcagtggataaggaaggccgagaatatatcggcaagtttcctgagatcatcaagaaacttaaggattgtctactttccaagacaccatacgtaaatataactaaagtagctgccaagctgttggttctggagtgcactggtgatgagcaattgttaaaccaaatccagcttttcattgaggaaaatcgtaccgtggaagatcaaagcttttcactaccaatttcagccttcattgaagaacttgattttgatcaacttcaccagccatggatatggaattttgtacagagccttgatgtggaagatgcacttttcgcgccacgggtgaatcactctgacgcagctgctaaagcattaattttgctcaccacagaatgtgcgagcaatgttgaagctttcctacaagggatcaataaagaagagttgaacaagatagtgaatgcactctcttctgaagatggagacaaagagaagagaagggcgctggcacaatttgaaggacgacgtaatctggacccagaaacattgcgcagagtcaaaaaaataatattggctgagggtgaagaacaggcaacaggtatgcatgcaaaactcctgcagaatttgcgtgcctattcaggaccaaaagaatttgatgagtacatgaaattgatagatgcagcactgccaaaggtaatttcgttttagttctagccattctctttggatgtagtctactaaatatatatattatgtatatatgcataggctcagaattaacgcatcatcaccattttccttcaccgcaactatattcattgactaaagcaatatggtaacaacgaccaatatatctctctgaaaattgaattatataggtgctcaaagcagtcgtagatgcagtggcaactttggaggatccatcatcagcagaaaatctggaccatgtaagaaaatagtagttgttttcccttacctcctgactacttcatttgcacctagtctaacttcccaattcacaaacaattttctttggatatatatatgtaggtgaaggatgacatgtggatcaaacaaggcaaagtactagagagctttataggcctcgcagtgcagatttgtaggtccccgaacaaaagaagtgatttctccactgcactgaaatatgccaatcttactgcggacacattgatcaagaagcttaagaagatattagaagtgtacatgtctccaagtactgattttccatgcataagggtatccacacttgagttaattacttggatggtcgaagaaaacaacagctactgggaaatactcctacaatgtggagtatatgaggaactgaatgaagtggcaaggactgctagaaaacttgagagcttcaagctgtttcactgcggtatcgggattcctacggaaagaactatcgaatgcatctcttccctcgcaactaaattacaagaaaagcttaagaaaatccccgatttcgaaagaaggtattgtttttgcccttttaggcaaaatgtcagttcaaacatacttagactcctcaaggagaattcgtaaatccaaacttaaatgtttgtctttaatctgccaattgtcaagggctctgccatgtactccctccgtttcacaatgtaagtcattctagcatttcccacattcatattgatgttaatgaatctagacatatatatctatctagattcattaacaacaatatgaatgtgggaaatgttagaatgacttacattatgaaacggaggaagtagtaaacagtaaaagacttaatatgatgtgtcaaatttcccaagctggctatgatttcatctaaaatgactttcttacttgttcttacagataccgctatggagaacatgcaagccgcatatctgttttaattgcttaaaacagtcatctgcttggtactttttgaccaccaatataggcatcatctttttgtgtttgtcccaaccaaaattcatgtctgagtgcttgagttttcatttgcttggttctttctaaccaccaacattatcatcatcctttcgtgtttgtgccaaccaaaatccatgtctgagtgcttgtgttttcattgggataatgtgtcagaatggttgtgtttttaaacccagtgtaacaattttgtatgactacaataatttccccactagctgcgtcattgccccaagcgcaaagataccatcagatcaccatgggatgctacaagtgttgtgcaaggtagtgcatgtatcatgtgtttcttgtatgctcgtatgatttgtctgttaaatatgcatcacatcacactactacagaatgtcatgtccataacctcataacatagaccatatccataacctcgtaacatagaccgactcaccgctatctataaagataccatagacggtttctcaaagtggcttatgttggtacatggttcgtaactagtggcttttagggataaattaaacactaaaggcaacatggtaaataagaactgggacaacaaccctcactgtgacatctgctctgcccagcaatagaaacataagaccatattattctatgatgcaaggctgctacagtcttatgggagaaattaggacttctagacctagctaattcgtcagagtcggcctcaattttcttagaagcagttattgacagccatcacaacattcagggtatagaacccatttggtttgcagcttgtgcacacacaattttggaaagcaagaaacattaggaattttgaagggcaacaagccagactttcaaacacaactcaataaatggttcataagtagtgcgtctaccttatttcatatcgaccatatttagcacttatatgaactataggatcatatggatactataattttcaggaactccagactaccatcccaactgcgtgtgcccaaaagaagaagggtgatggcattcttttgcataaagggaaagaaccaaatgaaaaaatataaatggataatcagaagagtgacaaaaatgagaaactactacttaaataaaactgaatctttataaaagcacaggacaggagcctgtgggtaatcaaattagcttagttgcatgaagctcgtagctttttgaaaattgtatgtattcttctctaagaatcagaaaccttggccgctgactcatatcgacaatattattggttaatgaaaaaggaacaaatcaattgagacacaacatgcattacaagcgaagatgaagctttttgctactgttgtgataaagatattcgcttgaatggaatttaattggtaaggaagagcatacacaatcagattgaaatcacaatgggataaatcagaacatatataggagaggctttgctaccatgaaacaggctctctctagctcaagatctagatggaaaagatttagcgagggtttaaaggtaggtcgtaattttggtgtacctcctcccaatatagtattcaacgcattctgtaaacagatctctaaagcaaattcgcaccagatactccctaaaccagctactaatcgacctaataaaccaacgagaccatcccaaaagttgatttacacgtatcgcattcggattcatagcagaaatcctcagatggattcccactctcgcgctatttagaattcatacattaggttagattaactaactccaaccaggcacacacacaaaataataaaaaagaaaaaggcaaaaatgcagcgaggagggggagagggatggaggatgagagagcgtacgaaatcatctgattgaatcggagcgccatgcgggctccggctcgaggcagcgagctccctccgcccgccaccctcatccgccgtcggccaccccgctttctcggccgccgccgccgccaccgcgctgtcttgcgatgactcgtcctccctcccatggcgacctcgagtcttctccatttggatttttggattcgccgccatggcaccgcaatagggacggtttttcttttcctttttttttgatttgggggcgacggacttgctatggtcccgacggatttggggttgggcgaagattaaaatttgtgtgccatgtttgttactctgtcaaacggtctacttcgtatgaatactttctatacgacatatcgtcttacgtaaaaaagattaatcttgtctttatcttcagaagaaagaaacaccacctatatttgctactacagtgctatatttcatttcttttcttttgatgaggatacgtgctcagtagaggaaagaagattgcagttaagataaattttaaatgtttgaagttattgtattttgtggatttttgattatatgagaatgtggttgtgccatagccaataaaaataaggccttattcggatcggagggaaaaatgaaggacatgtgatcattcgtttcatactccctccatccaaaaaaaaagccaacttagatggggatgggacaccatctaggacaatgaatctggacatgtctagattcgttgtctcgttgttctaggtggtgacccatccgcatctaagttagctttttttaaggacagggggagtatgaagtagtcacatgaatgcccaaggaattaggaatttttcccgtgctacagattttaagtgagaaacacatgaatttttccattcactctgaacttatttttctattcatttgcgtaggatccagacaaacatgcagctaatccaaacaccttcatatgtttttcaattatctgttttgcatttatattcttatcatatttctatgtttttttatgtttctgtattttttttttcaatgatgcgttccgaataagccctctgcaagcagcaggtaacaatgggttgcaacagtcactgtcatagctgaagcctcggcgagcgacatgttcggaacggagcagaatgaatagtgtgctacctaatgattacattattcgagtagcaccttaagatcttaaatttaaccgatttggctatatctcactcgaaagatttttttcttatctcactcgattttctcactcaaatttacagggtattttcttgtaaattacagtgtaacttatgaaacttacattgtaatttttgtaagttgcagtgtaattttttaatctttgcatgtaagttttaaaatttatattggatttggtctttttcttgaagatatggtaatttattgtccattatggtgtttcttagttgctttttatcttttactgtgtctattggattttaatccaaaaattaaaaatctgtgtgatatggtcataaaaatcttttgaaagatgcataggtactcccaatttaattcttcatccgagcgaattttaaggcttagttaaagaaaaaaaaacttactaataaaggcccaccaataaaaccacgcgcgatcggaataagttcacttcgtcacccttaactgtgatcgaaatctaatccatgaccctaaaccacaaaaccagatatatcgacccccaaacttatgggcgccggcaactagcaaggagaggatggcacggaggaaggcccgcccgccgccgtcgtcgccgcctccgctcgggcctccctggcgcccatcgctatcgcctctgctcgatcctcctctggcaccaccgccgctcgagtcgggtggccgccgccgtttgggatgccccgtcgcccggcgtcgtcgcctctgctcgagccgagcggcctccgcccatgaggcgcgcggcgaggctaggtgtgcgcggcgtgttggcctcggagggtggcgcggacggcctgggccgcgcgagagcgccagaggccggctcgatctggacgccgatctggatgtcgccgcggaggaggttggcgtcgaggtcgaggctgttgcgtggcgcctggaggcctccgtcgtttgtgccgccccgtcgcccgacgccgtcacctccgctcgacctgcctctagcgccgccgccgctctaccgggtggccgccgccgtttggcctccccgttgcccggcgccatcgcccatcaccgcctgtgggagacgtaggggaagaaggggggagaga

SEQ ID NO: 3951 - DNA, 1988 bp, Oryza sativa
ttaaaattttgaggatatggccccaactggcaagaaagataggccaaatagtagagaaacccagaaagcatcattgcacaagaagatagtattttgaacttttgaagtaccggaattacaaaactattccaaatattgagcatcaaagcttcattgcactgaggttgcttctaggtcaggaagatatatttacaaaccaagaactccgacataataataaatagtaaaggccaaactacacatcggatgattttttagattaatactccctcagtttcataatgtaaaactttatagcattgtccacattcatataaatgttaatgaatctaggcacacatatatatctagattcattaacatctatatgaatgtgggcaatgctagaaagtcttacattataaaacggagggagtagctcaaaactccagagaagttctagtacattaggaaatagaataaaaggggaatatcaaatttgatttgagcaacaaataaattccccaaaagaagattttggactagacatatggcatgcctttctgttactatatcccaagtatttccagaaaaacatgtttggcagagagagaatagattatttagacgaggaacatggaaacttgatattctacaattctacagaaaggtgaggttaaaagacaacaaaggaaatttaatgtgagtatttgttatttacatttgtttacattttgtttgactaacttgacctgtgttgcattaattgaaggatgtcaccttacctccaaagtgatgaagaacaatcgacgctgcaactgtaacattcaatgatgcggttccaccaccatactgagggatgtagacaaaaaagtcgcagatctcgcactccttctgcgagagtcctgtaccctactagatgcaataaaaaataggaaattataatataaagggcatgcaaattgctcttgtttattcaaaggaattacatcccacttcagttttatcctagtcatccattgaatatgatctacaaactggagaaaatgaatttaacagtataacaccatatatttaaatatagtacaatgaagtattgccctagcaagtaatggtcaccttgagttgaaacaaagcctgcagttcacacgtgtatcaagtctaaaaggtctcacactttcactattatgctagtgctagcaactcatgccaatctttcctcacccctcctgtactggcactggccttttttttcttttgagaaaactagaatagctatcacaaactgatgtttagaaaaaatacattggggacactggaacagtcccccatacagacagaaaagcctaaaaattatggaagacattgatgacattagatctgcattcattactcatcaggggtgaacaataatccacatccattgagcaacagctgaatagctcaaggcactgccgtcaatttgacattattgaaatttcctcacccaaatgccccgaaaagggtggaaccgtgacagcaacggtattttctgcggtatcaggtagtcaatcacatttgttatggtatttccataattttgtcattgtgacggcaccaatatacttctctcctctttttcactagcggtttttattgtgttttagtaaacattacgacgctcataaaactcaagtggagctaacatccactcaggattccaagggatcacaaaaaagggtcaaaattccaacagaatttggacgtgtaagtaaattggcaactgatacacatatctgcctgcaaactagtactaattccacagagtcaattgaatttgtgtcatacaagcagaagtactcaaaattaatgaggaatcatgagaaaatccgacccacccacctcattgccgaagaggaaggcggtgctccggcggaacggatgggccgtcaccggcagcgcgttgtgggtgatctccacgccgcaaatgtcacaccccctctcgttctgcacacacacgcgcgtatgtc

SEQ ID NO: 3952 - DNA, 1656 bp, Oryza sativa
ttcctgcagcccaaattactacgcataataattacgtgcatgaagatgcgttttccgtagaaattttgtgtgtgctgtgtgcaagtgtggtttcgtaggcgtactattttacccgatttcaagttaaacggtgtaaaatgtttatagaattagagttgatttttcaatatattgatgtgcaaagttggtgtattctatgctctgacttgtaagccttttacaagtttggcgaaaagttgatttttcatactccaataatataggagtatttgagagtcagagagtggaaggataataaaactaactttctccttattccaaaattcaatactccctccatccctaaatattaaacgccgttgacttttttaaatatgtttggccgttcgtcttattaaaaaaatttgtgaaatatgcaaaactatatatatacataaaaatatatttaacaatgaatcaaatgatagaaaaaaattaataattacttaatttttttaaataacacgaaaggtcaaatatgtttaaaaaagtcaacggcgtcaattatttagagacggagggagtatatttgagagccagaactttggagcaagtactatcactacttgtttgtagctaattaccaatattattgcaaacgctggccatggccatggagaagcagcagcttcgcttctccgtgcgccggcgagagcccgagctcgtcggccccgccgcgccgacacctcgcgagaccaagcggctgtccgacctcgacgaccacgagacgctgcgtgtccaggtcaagttcgctttcttctaccgcgccggcggcgagcacgacgcggcgggcgtcgtccggcgcgcgctcggcgaggcgctggtgccgtactacccactcgccgggcgcgtccgggaggtggaggagcggaagcttgtcgtcgactgcaccggcgagggcgtgctgttcgtcgaggccgacgccgacgtgcggctggaggagctggaggaggacggtgacggcggcggtgagctgaggccgccgttcccgtccatggaccagctgctgctcgacgtcgagggctccggcggcggcgtgctcggctcgccgttgctgctcgtgcaggtgacccggctgctctgcggcggcttcgtcctcgcggtccgcgtcaaccacaccatgtgcgacgccatcggcgccgcgcagttcctgctcgccgtcggcgagctcgcccgcgggctccccgccccgacggtgcggcctgcatggtgccgcgagctcctcgacgcgcgtagcccaccggcgccgtcgtttcctcaccgcgagttcgacgtcgtgccgccgccgccgccgcccggcgacctcgtgacacgcaccttcaccttcacggccgccgacgtcgccgcgatcagggaaggcctcccaccgcgcctccgcggcacggcgaagacgttcgaggcgctcacggcgttcctctggagagcccgcacggcggcgctggagctccccgacggcgaggacgcgcgcctggtggtgatcgcgaacctcaggggcgtcgccgagctgaacctccccggcggctactacggcaacgcgtgcgtcgccccgacggcgatcaccaccggcgaggcgctgctgccgcgcgggtcgctgggcgacgcggcggagatggtgcg

SEQ ID NO: 3953 - DNA, 1981 bp, Oryza sativa
acattcactaaaattataagaatgaaatttgttctgtgaatgtaatacattattagtttgttttgtgaatataatttgatatttagcacacctattttctttcgcacctcagtatttgtttgcttcatggctacttgcctactctcatgttagcaaattcttttacatttattcttcatccttctttttagtgattggacattattaacatattccttcaagcttagtgaaatgaatagttttgattttttaggataattttacattgatttttttgaattgacattttacactgacttacatttactatacttcatttgtagatatcaaatccgtcgccgattacttttgactggcactccaatccaaaatagcctacaagagctgtggtctttgctgaactttattcttcccaatatttttaattcatcacagaattttgaggaatggtttaatgcaccatttgcatgtgaagtcagccttaatgatgaggaacagctgctaattatacatcgtttgcatcaagtgagtgatggttgcccccaatccacctactcatgtcattcagtatttttaagttttaacttaaaatttgcaatagttagctttaactttctcttgcatatcaccttttcggttgaattcctgcagcatgcaaagtgtgtggctaaaacatgagttaggctaattattaatatatgtgaatatttatttaaataattccgttactctttgttctctgcacaggtgctgcgtccatttttgctgaggaggaagaaagatgaagtggaaaaatatcttcctgtgaaaacacaagtaatactcaagtgtgacatgtctgcttggcaaaaagcatactatgaacaagtcactagcaatggaagggttagtctaggatctggtatggatactaatccttttcatattgttaattgtttgtaatgtttgactggttcgaagagattggaataatgctcagaattaatgacttggctccactgcaaatatggatctgttttttcccctgttgttgctatatctaattcatagtctcatccttgcttttagtttttcactttcattctttttatgacctttctgtcttgcttaagaaaacaacaaacttattgtcatgtttgtatatgcaggactcaaatcaaaggctttgcaaaatctgtcgatgcaacttagaaaatgttgcaatcatccctatctattcgttgagcattataacatgtatcaacggcaggaaattgttagatcatcagggaagtttgaattgcttgaccggctacttccaaaattgcagagagctggtcacagggttctgcttttctctcagatgacaaaactgcttgatatcttagaagtatatttgcaaatgtaccagttcaagtacatgaggcttgatggatctacgaagactgaagagcgagggagattattggcagattttaacaagaaggactcagaatatttcttgtttcttctcagcacccgagctggaggccttgggttgaacttgcagactgcagacactgttattatttttgacagtgactggaatcctcaaatggatcagcaggctgaagaccgtgcccaccgtattggacaaaagaatgaagtgcgtgtattcgttcttgttagtgttggctcaattgaagaagagatcttggaccgtgcaaaacagaagatgggtattgatgcaaaagttatccaggctgggctgttcaacacaacctccacaggttagattaaatcctcgaacaaaattcatacttcctctgtttcatattataagactttctagcattgcccacattcacatatatgttaatgaatctagattcattagattcattaacatatatgtgaatgtgcaggctgggctgttcaacacaacctccacaggttagattaaatcctcgaacaaaattcatacttcctctatttcatattataagactttctagcattgccc

SEQ ID NO: 3954 - DNA, 3145 bp, Oryza sativa
ggcccggcccgtcaacgaaggcccatgggctttccgtggcatcaggtctcacgccacgtggcaagttatcactcgctcgcgcttcaggcacgtgtccatcaccttctccccacttgctgggacgcacacgtggcctctcctaccaccgtatgtcagtcaactggccccacccgtcagtggctcatcagtagatatggataaatcgcattttacataaacacccccacatcaaacggtatttgctaacaacacctcttctccatcctcttctgtcttctccatttccatttccttccaagaagaggttgcagcggcgcgcacccaaaccctctcggcatccagggaaaaccaaggtgcgaaatttttttttgtgggtttttttggctgcttccatttcgcaatccactgatggagtacgttgctagcagtcgttgcaatttctcagtaattttaccgatttactatttatgcaagcttacactggtgaatttttttcagggtaaattaggcctgcgtgattcaagaaccgcacctaaagtttgtatttttccaatggattctatgggggtttatgttgttttttcgtaaagatgatctgatccgtcatccgtgaatattttgttgtctgaacgagttatcctattagtaaacaaggaagttcctgtgttcttgatagagattttgactgatgattaggtagtagtgagctagtgatattcattccaaaggagcagtagaagtaatagcatcagcaagaatgcgagggagacggcggagagctcgggaagctgaccctgtgcctgagccattcaccattgacgatgaggtctcccatctcaccaggattagatcagagccaagtcaaaagactcttggtgctttttacgccggtcgcaagaggggcatctcaacgttcgggctgttgtccgggagggagtctggccgttcgggtgctggtggattctctagagccgattgcgcttacgctgcccggaaacacctgccaacaaaaggaccatggtgtgtggatgacatgactagtgaggcgtatgtgtcgcagttctctagtgatggttcactgcttgttgctgggtttcgggtaggtgattttgctgctgcagagaataatctaccttgatatgttttcttgtggttctattagtgaaagttgtgcatacagaagtttcagagctaattggtaatgtttctctccacaaaattttgatgataagggaagccgcatcagaatttacgatgccgataacgggtggaaggttcataaggatataagctgccgaagcctgcagtggacggtttcagatattgctctatcacctgatcagcaattacttgtaagtctgtctatgatgcatctaataaacaggactcgatctaagaccttagccctgttgtttggatgaaggaaaatatataggaactgatttgtaattgttacggggaatgataaccatagtggtaacatttatccaatctgaaaaactacttgctatctccatgtagatgctatatagaaaatagaagacatgttgaaaaactattttttctcttttgcatgctgatattggtgaagttcactttttttatgatttgttatttagtttaccattttaaaattcaatgatatatcaattgacaaacaatagccgttgttttatgaataaaattatctccgtggtgaacggtctgttttgcatcgaactgggtgctgacattaatcatttagcactctggatgtttcattttcatgtgtgtgcttgttttccctcaagtctatttgatcctttcacaggcatattccagtttgtcgcctactgttcacatagtgaatgtgcagagttctgcaaaggaatcacaagctaatgttactgtatgttctatactccgaagctttccctatattatactagcttttgaaagcatgagctgcctagctttgttgaattcataaaatgctagtaatgttcttgtaaccagccatgtttcaattgttcgttttctgcaggaaattcatgatggtttggagttttctaatgatgacgatgatgaatattcttttggaatattttctgtgaagttttcaaaggatggtcaagaaattgttgttggcaatagtgatagatctataaatgtttatgatcttagagcaaataaagtgtctgttcgcatccgtgctcatgcggtataaattagctgatttgccatatgctttttggttcaatcagttgtatgactggtttttgccttgttcattccatttcatgacctagctatctcatttataccaatcttctagttttttattttacgcaattgtataacacatttatttgctatcttattttcttctcaattggttctgtaaggctgatgtcaatgcagtcaccttcgctgatgaaagtggtaatctattgtactctggaagtgatgataatctctgtaaggttagtgttcttgttaattgttggaataatgccttcttaatcttgcttcaatatgaaaacgtactctatcaattggaaagaagaactatcacaaactatgtgtataatgagcataacaagagttgaataggtgatggtgaagggtagggtttacggtttggaaatggaataatacagctcctagcatctagatgctagaatgcatttgtgaaggaacagtagtaaatccaataaatagactcttaaaacatccaatcttgtagtcagtgcttgtcctaacaatattttatgatccttaggtgtgggataggcggtgccttgctagagaaaaaccagcaggtgttttgacaggacatttagatgggattacatttattgatagccgtggtgatggacgttatttcatatccaactgcaaggaccaaacgatcaaactttgggatgtgaggaaaatgtccgcttctattaaagggtatagtttttgctctacggccattcattactttcacttctttttcttgcgaggaattacatttacaatgttgatccccatatttattatatatatttctaagactctctatcgcctgttcttgcagccgtcaaccgagattttttgactgggattacagatggatgtcattcccgttggaagctcgacactgtaagcatccaaacgatca

SEQ ID NO: 3955 - DNA, 964 bp, Oryza sativa
tctgtgctcacggaaaacgaacagaggacgagtccttaccgtcagtcgtacacacggcaccttctgctgtagggaagagaagtcattttggtttcctgtaaggagttgtgatgttgctacatctgtaatcgcctgattgcaatgctcattgcaacagtgtataggactgggtgctgccaaactgcattttctgttgtagagaggccattggtcgcctgcaaagagttatatttgtgctctcctgattgcaacagtgtatatagggtgaaaacagtcgaaaacggtagcgtttctttgggcacaattctcagtcagtcaggaattgactatacttatcaatttaactattcagcgacaatatgatgttgaaaaaaaatagaaaacctaaattttataagttgctaaaaatggtaactgtccaaaacggtaacacttgtacggttggcagcattagcatttggtgcagtacaaattggcttgtagagctttgcaactgaggcatgtttagggaagcttctagcaatgcttttcacaaaatctccagttcctccaaatagaccaaattgtcatctagattctgaaaatctgtagttgtagaatatattcttagaaactggttaccaaccagtaaattcttagaatcttaagcttcttcgaacaaggcttgagaatgtgattataaatgatttgtgtcccaatggcagtgaaaattggttctgttgcatccaaaattcacgaatatgtctagtaatactgaattgatcatcaaatacttggctgtgtttgaagctgagggttggaaaacctatgaaacgacgaattactattagttgaaaaacttgaaaattaaaaatattaaaaagatcaacgtttaaaagttctgaaaacaagaaagcaaaagttaggaggaagtatagaacacacagacttgacctccaaaaataacccaggaatgctcaccgca

SEQ ID NO: 3956 - DNA, 10264 bp, Oryza sativa
gtgttagaggtggattcaatacggtggggccaggcgtcagcgacggtcgggttaaatggggtgtacgctttgccggagtcaatggtggcagctggcagcaacagctcagaggtgggggaaggacaccaccaccaccaccaccatcggaggagagagagagagacgaggaggacgaggcgggagtaaatgggaggcgcggccgccgccgccggccggagggtggtgggggcgccgtcgcagcagccagcagcgcagatgagcggagcagacgagtcctggttggccgggggctctaactggtgtgaattactactagtactattggtaggacaccgtacacggctcagattacaccaggaggggtttcttctccggggacagcaacaggaggaggtgtgtgggaacgccatggcgttctagaaaaaaaaaattctaggatgcttcctccagtgccgtgtgctgtgtgcgtgtcctaataccttctttttcttttctttcaaccgtgacatttgtcaacttttttttttggttagagatgacaaaattaagcgggttttcaaagatgactttgaggtattaggagaaatgtcgttgtttgatggtcatcggtttttgcgggtggtcatatggttgacgaatcagtttaaaagtatgtgtatggtctattagtagtcaaccgataaaattgatttgagttatatagagaaagtgagtgatccataaaacgactcaacaagatattagaaaacagtacagtatgcatggaacatgcaaaactaggctattaattgacctaagcgagtgctttggtgccacgattcaaaaacatgtaaaactacgttattaattgctctaagcaagtgttgtggcaccatgacttaatacacatttttaccgttgaacacttggaccacggcattaactgtcatgattggattataatttaattttctattttaagcttggttttagtggctttctctcccgcctccattgttcaaattttttttcatgatcacgacgaagacgattaaatatatattttataaacttatttttaaaaatcagtgaaacgaaataagctccatcttaaagcggaagctatgccaagtgggcacttaattattaagaaactagtactcactctgtttcataatgttttaacttttttctagtcaaacgtctttataattgaccaagtttaaagaaaaattttagcaacacatacaacaccattttgatttcaataaatataacattgaatgtattttagtatatattgttttgtgttatatagaaatgttgctatactttttagtaaacttggtaaaatataaaaaatgactaaaagaaatcgaaacaatccttataatataaaacatagggagtgatatctaagccatgtcgtagtgtggaaattggacattttatacatgcacaacataacaaacactaaagctattaggttttagaaataaagtgagtaatcatatataatcacaaaggcactagagatagtgattaaaaccaacacggaggcacaaagggcatgtagaaagtgggttgttgagataggaggtgtaaaggattgtgctttgaagacatgaagaaaatcatctcagctatttggacaggggcactaggtagtacatattgtgtcatcagggtgatatcgattgattgttaattaggttactataagagtttttttaattagtatgactataaaagaatacccaagaaccatccctttcattgacatcagaaacacgataagctaagcatgtaaactagggtatgtttctgttgacgtaaaacacgaggcctaagagatctgcttaactccagtgcaggtccaaaactcgccttcgggtatgctagcgtgccagttgatttgattttgcaatcaacaagaaacaaagacaatacaatcgtggttaaatacataaatgatagccgatcggctatgtgccgatgacgtatcatttatctttgagccaatgtcatatgtgagtcgatcggcggttataaatagataatgaagaactaaatctattcgatcggctgtagatgtcaatagaatataattcttatatcgacatatatttaaaccaagtgattgggatagatcggtcatcatgccgagacagtataaatcacttagattgaaatatatgctaataacagaactatatgtgtttacagcatagccgatcagatagatctagcatgtatcagctagtactccgatacaactctatgttaagaggttaaaacaagtagaatataacagaccgaagcttaatatacttaaatgcaataatatcttgacataaggggcagatctaatgtgtcaatgaagcatataaagtaaatatagttaaatcagataagatcggctgaaactccgatactaccctaatcagcaaccagaaggcatgctagagattgatattctaagcacgacttaataggtcaaactcaactgatgcagcattaagtatgaaaagaagaacaatatctagacaatcaaaccgctggaagtttcatagagtggtagatatcttatacaatctaaaccaacatcgatatttaacctaatcggctgccctatgttaacagatgttagccgattgtaggttagatggcgacattgctagagattatataagatatatgataattcaacgaattacataaacaagattagagtgtcataaagatagaagcactaatcccgagaacgcaagccgtcataacaagttttatctcttgttgaagatcgaaaccgatgcagctcaacccgaaagcaagaactcgtcgaaataaaactaaagcaaaaagggtggcgatgcgccgaaattgtattgaacgtgtgttaaaaattacatagggctcggggtctatttatacccgagaattacaagatatgtccataccggacacgactattatctctaacaaactctaatataccataagtcttttgcggcaaacttttgcccaagcatatctctaaggaaattacataaaatatcctaattaatagatacaattgccttctcaggactctatccatgtgcggcaatcatcttgaagtacatcaactcaaacccgatatcggatacaagtcgtattgtcagaatagactgtatcacttaacccagtccaactcggacttagccgattctaatcgtagccgatccgaacctcagccgattcttactctgtttccgctataatcctcatcttcgattccgcttcaatccaaccttcatcggaccttctttccgatgcagatattaccaaatttggtcgttaacagtttctaatcatttcacacaaaaaagagatacccatgtcccttttggcccaattttgagggtaaaccattatacaaacgtacaaactatttgatttagtgttctcatctatttatatataaatttacatataagacatcattctcgttatttataacttatagattatggagtatccatggcacactttctaagctaaatggcatgatctccaataacttttcttcttcggcatattttggaaaaccttttaactttgtaacgttcagttcattcgcgttttcccttgaataattattatgaacttagaatcaatcatcatttctcgctgggaatgacctatgagctcttttgagcatttgagcaggacctaaattattattattattttccttgaacaggaggaaaaatatattgtttatttgctaatagagatacttcactgaatgcctatatctatatggttaggacaaaaatacttgcaaaattattacttcttccattctaaaataaacaaagacgagtcttgatatattatagtacaataaatctagataataataaaagggatcacttatacatttatcaacaattttttttttcaaaaatttaacaaatataactatagtataattgtgatgtaattatattatagcttacgtgtaactataatgtaacttgtatgtagctttttaaaatctctacgtaacatgatatttcagtgaaacggagatcgtgggaatgaatcctctcacatgtatgcacactgtgatttttttccttcctcacttgcacaaatcttgaaacaaatctaacaattcaacatgtgaaagttacgtacaaattacatgcaagttacagtgtaattgcatgcaagtctcgatataattatattataattatactgtaattacatccgtcaaatttttaggaaaaaaattgttgataaatatataacaaaaattgtaataataaaatattgaacagagatactatcgatagcctatccagatttatttgggggagtacctatacatatttcgaaagatttttatgatcgtatcacacatatttttaatctttgcattaaaattcgatagatataataaaaagcaaaaagcaattaagaaacaccataatggacactaaattaccatatcctcaagaaaaagaccaaatccaatacaaaatttaaaatttacatgcaaagattcaaaaattacattgtaacttacaaaagttacagtgtaagtttcataaattacactgtaacttacaagaaaatgcactgtaaatttgagtgagaaaatcgagtgtgagataagaaaaaatctttcgagtgagatatagcaaaattgtttggttattttgaagtccgagggagtactgtaaacatatcgttatgggctgggccttgggttaagacaaatcggatccgacaggtccaccgacccgacccactacaaatatccccaacccgaacgccgtaaaaaaaacaaaaataaaaaaaccctaaaatttccccaccgaaagcccaagccaagccacacaggcgcggcgcctgcctcaccttccctcgccccggtcgatcgatcgaagccgacgaagcagcgggaaaacgagtcttcccccctcaaaagcgagcggaggaaggaaaccatcgaccgtttgccgcgccccgatttgaaccctcgccgcctcgcctcgcctcgcggccgtggaggcggagcgaaaccctagggaggcgatggctgcctcggtggaggcggcggcggcggcggtggtggccccgcccgcctccgtgggcggtgacgaggtcgtcgtcggcggcggcggcggcggggcgtcggagcaggccaggacgctcatcggcgcgctcaacctgctctcccgcaacctcccgctgccgcccgccgtcctgcacgccgtctcgtccatctaccacggcggcgacgcgtgggagggggaaggggaggaggggggtgaagaggaggtggcggcggcggcggcggctgtcggggatggatgcggcgagagcggggagggggaggaggaccgcgcggatgcttctcccggtgcggatgaggtgcgtgcgcgcccctgtgcttcatcaattttgctgtgcgttcccctttcggttgggtgtgcttcgagttgctcgattagtgctagctgttggattagctagcatgttcagtagaattggcgagatgtagttagggtttcccgtgctgctggattctagagtggtttacagttggggaatgtgggctgcacttgtagaacgctcctccggtgacattttttgatgaatgtctatacctagtatggttttgggtttcatcgggtggaggcattgcaaggcatacttacctgattaatctggagctagaactgctttgtggatcggatgcttgttccaccaaaaaaaaaaaagagatgtttagtgttttagggatttctgatgatgtggaaacatcatttttttttattttttacaaatgcatatatgtttgtggtgtgtaatattttagatgtcattaatcatttttttttacagttggtatgccaccatgtttgtgaagtgtgtactagcgtctaggattatattagtaaaagccttattgtctttaaggccttgttcggtttggagggggttgaaggggattggaggggtttgagggggaataattgcacaccacaataggtgtggaataaatcccctccaatccctcctcttggggattaaccgaacatagcctaaacgggatataagttccagagaacttggttaatactgggtctatacaaggatttgccctcagtagatgtatttacttacgtacattacctcatattgtttttatgtgattgaaacaaaattctggtccaaaagttagattcatactatttgggccttgttgagttgcgtgctgttgattttgttgttagggttgtagtttcaaagcaccatattgtcactgcgatgattgggtgtgtcattacctcttgttctcctttttgggttatggctgaggcatagtgcttatgagtaggcttttgaatggccttctcatttgcgttttaactgagaataaatcgattgccttatagggagtcaccttgattcaagagcttgaagatgctgtattgaagaatcaaggaccgtatatgtcatactcagagttgactgctttaaaagaagaccgcttcaacacttccattcagcataggctgactgaacttgaaggtctgctcatacatcacctatttttactttctgatttattctaagttaaattactttaacggcaagactcctctttggtgtttgtgattatcctgctttgattttcctgttcttacaaaactggatgggttgggatgtgttttcccggcctactacgttttggtcttacgaagttcccaggcctggccttggtgtaaactgcaaaccttttgcttttgggcctgtaagcttgcactgtgaaaaagttgaattataactggccttctgaaacggtgcaaaagctgatgttgttgtgtttgactttttaaagtctatacgtgttttattgtcaacagtttagttttttctgaaactattcttagcatatattccaccaataggatgctgcctactaatattatcatgcataagatatttttaatattcagcctctctaaaacctgctttgttgttgactactgtattagttatgtaccaccaccaaactcatttctgtttatgtgccaggattaccatctactaggggtgaagatttgcaaatgaagtgtttgcttgaattgtacgggcttaaggtaaatgtgatattagaagcaaatgttactttggaggcgttgatgttttctgctgttactgcttttcttagatggtgccttttgtgtacagtgatgtccctagtggtgtgaagtatacaaattaactttgtttggaaagcgacatttgtgcaaacatgcataatctattgcattttagacttctagtacattttatggacgggcagatttcagacgttactacccaataatgtactgcagtagtcttgtccagggaaaaactgttcgtcttttcttttgactgtaccaaaaaacttattgtctttaactagcagtttgcctaccaaatcttgatgcatgtgtgaagaaaaccataactgtactatcctaggcagttgttttagctcctagaacagaaaccaaggaaactattgatgtggcgatgattactatgtaaacgtcgggggcgcctaatgggcgagggagtgtgtggcacgcaatttgcgctcacgttatcacgcgtaacatgcgtagcattaggtacgagccatctaggaagttttgataacttcctatatgggtttaaatctttccattagaaaaatcactctacagatttttattctgagagaaaacttcccatagttattatggatacaaactttaatatggtaaaactgtcaatagagagaaaaaaatccaatgatccattggaaaaacttccttttcttgaaaattttatctactcaaagatttctttttgaaccaaaattgataaaacctaaaaagaagaaagctcatgtagccctctacctctaaagcccagcgctctgtcagtggaatgaccacacatacgttcgcgtaaacagattgttttatgcggaacagaaaacggatatcactcactgggagaacgctaaaatggaaagcgtgagaaccattcacactgaacgcgcttgcgaatcaggagttcaaatatatatgtggccggttgaggaattcagggatggaggtgtgaagctacatcaaccgcaatggtgattttgcaaatatctaataggccctctactcaatagataaataagcttcactactaaaaatgttcgaattggtgattgtgatggtgtgttctaaaccacattcctcctccccactccctcagtagtaactagtaaagatgtttgactgcatgctttctaaaatatcatatttctgaacggatagaatttgttcctaaatttgggtcttgaatgtacatgtaaataactcacgccttactgattttttttatttaatatgcctcagtacttctataaaaaaaccacaaaggatctctgtaatttctcaactgtacaatgatttgcataagtaattaagtattgtgcttttccacaaaaactgctatgcacctagctagatccaactccgttttgatcaaggcattgaaacaattaatcagttgagtagttggtatggaggacgtctttaggcagggagtactagtacaatagtagtatcatcatatgatctgtgcactatcctttagtgaggtgttaattctattttgttggacagtttggctatttgaaaattgaaactatctagtgcaaagctcaacaagtgtatgaattccataggtctatatcaagaagtacgatattagaagtgagttatcctatcaagctcgctgattattcatatacttgtgcagttattagacttgcagaagaaagtaaggactgatatcagtgcagaatactggctacacaaaaaatgtgcacaccctgataggcaattgtttgactgggggatgatgcgtatacggtatccttttaccatgtatggaattggagatagtttttcaatggatgctgatgatatcaaccgcaaaaagagattctcagaggttttgtatcatgtatcttttgattattatatgtttggttaatttatatacacttgaattaataaggactccctttttggtatttgggaacaacagaggatctcaagacttgaagaggaggaaaagaaccaggcagagatcaggaagaggaaatttttttcagaaattcttaatgctgctagggagtatcagctacaagtaccggcttcttacaaacgaaaaaaacagcgcaatgatggagttctggtacggtcaatataattttcattagagattaacagatagcttgagattggcctaattggttccttccctatggagaaactaactcaccatattttggaccaattattcccttttttttggttacaaagactaggttgcactggtaccagtaccttatgacagtgttgtttgccaatagtgcctataggtataagagaaaagaaactatttttgttttactatgccttggaataatattttatgccctatgcccctatctgtaatggtctcgcgcctataacttatgatatgccttggaataatattttatgctgttggtgattatggaagatgagaattttgatggcacacacattttggtgagaaaacaagtgaacaataccttatggatgatgacttaattgtgtaccctgcaaaaataatgaattaaagattgagtttttgtgtgatagtatggatcaagttctctataaagaatgtttaaattcttgattcttgtttgctacttcatcaatacattatcgagttatcattgtactgcatttcctttgttagagcatatgtacttgttcctagatatattccttttgtggattgttcaaatgtttgtgccctttttttttcctctaaatgtaggcatggcatgttcgtgcacgtcaacgtataaatcgcatggaaaagagtagattacaagttttaagggttggtgaccaagaagcttatttgcgtatggttgaggagagcaagaccgagcgcctgaaactgctccttggaaaaacaaatgagcttcttgaaggaatagggaaagctgtgcagagacaaaaagatgctgagcatgttagtcgccctgatggatctgaactgccaaaagggtcagaatctgatgattgttctcaaatatcaggcctcaaggttgaatcccctgatgaagagtccccatcagatgttgatgcagaccatcatagttctgctgatcatagtaaattta

SEQ ID NO: 3957 - DNA, 2740 bp, Oryza sativa
gctactaatatgcataaaaaaacatgaattctttgtttccaggattgcttttatgatttccttaagagcatccaactttgtgataaatagttgaagcttgcttgctcactaattgccttatctgggaggaaggttcaaggccactgatgccaataggcttcgtgctgaatacaacaggctggttgatggattggcacagaggggaaacctgccaagtgagtaccattttttctttcactaattctgtgtcttagactgctcattgtggttggtctttctgggtcagttaatagtttacgataaaatatttcttgttatgtagtatcggatgcttggctcgcgaacccggccttgcctgaggacattctgaaggaggctgtaccaggaaacatcaggagggctgagcattttcttgctgttttgcggaggcttgtcaggttcctagatggacgcctggaaacagagaatgttgagaatgaaatgcctgttgcctttgttgcttcaatccattcccaggctggaattgaccagaaaatgttaaggttttgttatgatcggctacactctctaatgcttaccttggagataaccgatacagatgagttcatgcacatccagacaatttgtgactttgccacattgattggaacttatacacggggcttttctataataatagaaccctatgatgagagaatgcctgatatccgtgatcctgtgattcaggtactcattcttctctatatgacaataatctctaatcttaactgtcatcaaaagtcgtcaaagtgcattattgatatcctaatcaatttctatgtgttgcagctcagttgccatgatgcatcgcttgcaatacagcctgtttttgagcgttttcaaacagtagtcataacttctggtactctcagcccaatagacctctaccctcgccttttgaactttaatcctgttataagcaggagcttcacaatgtctttaacaagggattgcatatgtcccatggtcttgacaagaggaaggtatggaccgggccttcaaaatttcatgtggcatatattattttgaaagcaagcaactaatttatccattgcatgttttaaatactagcatagcatctattgaatctttcttcatcctttagagcatcatcgcatgaacttagtttagtttttgtattgggttttggctctcaaaattctagtcttactggtgatattgcaaaatcttgatgtataacttcaaatattccatcacattttcagtgaccagctacctgtcagtacaaagtttgatatgcgtagcgatcctggcgttgtaaggaattatggtcggctcttgctggagatggcttctgctgtgccagatggcatagtttgtttttttgtcagttactcttatatggatggcattgtcaacagctggaatgagatgggtattttgcaggttagtttctttaccagtacattattctggtatcgagcagtctatagaatataaatctagtgcaaaactcttcatggattatgacattgaatctcgttatgtcaccatataaagtctaacaattgcacaaatgcattgtttcagttggaaaaacttgtagtactgctctggaacagtcacttgtagtactatatatggtgtctaagcctctaatgttcttattacatgtgcagtttattgtactgctaaaaagtgcattgtctgagctgatttcacatgattaatgcttttactgttctcatgaatacagcattcttggcaaagccttgataacacgcaatgcattagcacctaatatgaaaatcttatgacttcaatttgcaggacatcatgcagcataagttggtattcattgaaacaccagatgttgttgagacaacattggctcttgataattacagaaaggcatgtgattgtggaagaggtgctatattcttttccgttgccaggttggttcactttatattggttttgtcggaaagcacccttcaaatttagtgtcagtgttcagcttcgcaattgattggattgcttgagactattacagctattttaacatcgacccaagtaggtgataattatgtcaaaggtgatatataattactggttggccaatggtttctttattcctagtatatccgaaacaacgaagacagtattagtcaaaaataggtgtaattatgtgttaaccaaaataaatgaatgtcctagttggtacagcaattcagtaagtaatttcagaaaatgcttcaatcaggcatccaccaatatttcattgatgtgtaaacatgaggaactcatacgttgagtttttaagtttatttcttgcaaaaaaaattatcttgtccctgaatgctcaaataaattgctgccattagctcatcatctggctgatcaataggctacaataagcataacccagtaggcaccacgagctaatttaccatcattacagtatattgtagattggctacttctgttcaagtgttattattataaatgtttaagtggtcttgactcatggctacataatatgatggacatatgactcatagctaactaccactatgctcaatccaggggcaaagtagccgaaggtattgattttgatcgacactatggcagacttgtgatcatgtttggtgttcctttccagtacacactcagcaggtgaggacttattgtctgaacttaagatccatttttttgtgcaacccttgatctctatacctga

SEQ ID NO: 3958 - DNA, 6971 bp, Oryza sativa
tggatatcacatcctactttatgacaaacgacagttacttaaatatatcttgcaaatttgttttgggtattttggtcctgaggtcttctatgtttccatttgattctgtcaaaaaaaaaaaaagcaattctaatttgtcacacgcatcctgtccatttccctgccttactggtgaccaagctttcatactccaggattgttaatatcatggtatttctcacctgcagatacagtcgccatgataaacggtctaaactgcctgggtggatactgtcacacttacatgatgcgcacctaaatctgagcactgatatggctttgcatatagctcgtgaggtatgttccataacatttatttttctttgactggtgctatgtagtttgaattgcttcaagtactgtaacttgtaatcatttaaagagcaagtttatctctaaccgataatgaagctatgcttgcccgtgttattattttccaacacaagcacaatttgcatgataaacattcttgcataacaacctgtgcaagaaattgttcagacttgtcgcattctgtgctgaatatattctaacatctggtattaccatcttgtataacagttcctacggaggatggcgcagccttacgataagacggggagcggcggcaacaagactctcttaaccgaagaggatttgcagaatatggcgcaggacgccatggagatgtgaaaccatgaaagaaattgaaagagagggagggggagagagagttttctgctgtacaatacattcaaaattgaggtagaagtcactaatgtacaaaaaaattttggctactcatgtgaaccagcatgaattcgagctgcacggttcatgctaaattgctaacaaattggtccttccaagcacatgtgatattactctgcatctgatataggtatgtacaccttaaagtccttccggatacttatatctgaatatgatggcggcctctgaatttcagacgtgtcgttacattgcctacagccaaccgttctgttctttacaactttattcaccgtattattaccacggattatttgcttcacgtttttagacatacgatatctcaatattccttctgctgcttatatgatgtctacatgtactcttttgaactcttatgtaagattatatgatgtctacatcgtgaagtttatttccgtatgaattttactttactttctctgaacgttttggttactcgtatccattcagtttctctcggtttctctcctgctgctgtcccaatcagatcccaacacaagcatttgattgagaatccgattcaatttcgatcttgactcggtacggctctcgtccaattcccgtagattagattttgatgactctgtgattcctgagtcagggtttacaattccaaaatgtcctaccattccaggcactggcggtatgttgaattcacgaaatccggtggaaaactgacagattctgaacaaattttatgaaccaaaatttgaattcaaaatttctgagctaaccgatatgttcacgaaaatgaatcggctttggtgaaattccgacataaaccatcgaaattttactcgacaactagaagacaaggtattctaaaaaccattcggtttctagtgaaaactgatcggttttgtcaagaaacctacgagaaaaatcaaatttgtttttatcagtaaaatatagaaaaatgtcagataattgaaaaaaacgtaaaaatgtcaattcctataaatttgatagcctcccattggcatacatatgtaatacatattcataaaagtctataatttaaaacacacgtgacatcactcatcaaccattagccaaatagaatgcccatcacctaaatattaaagtcgattgcacacatagtttagagttcaatacatactcctcgcctccgccgtagccttcatggcccgcctgagctcaaactccttatgtatgtagattacttatggttccgttcgaattagattaagataaagatttttcggcgcacgtaaaacaaaacaaaccattaacatatatattgtacatcctgaaaattcccaataataaaaatcactaaaattttaaactttttaaaaacttttgcatcatgctagttgttatgattgctattgcttgccaaaccgtaagtgatcacaaagaaagtaaagaaaagatcgacatttaagcaatagatatataatttacgagaatatattattgttaaccctaccaatatttatgcacaaaatagtaaagtcaaatattaatttctatataaattacaaatcagatattaaatattcgaaccatgattgatagcttgatgtcacaattagctaaagaaatagtaagattgaatctaatccaatctcacatgaaatataagaacacatgaaatgaaatgatgatcaccactataatgatcgtgtttataaataagtaattcactagaatatatatagattgatacttagaacatttccccgagttcctcatgacatgaaaatcactcatataaaataatggtcatataaataaattaagctttatatataaataagaatatgtgagtgtttaactaaacaattagattaatgttgtactgagtctcaatctactatttataagataaatagattcaacctatccgtgtaaaatatattgctatgcaaataagatcaaccaatgtgctattgtgtcaatatggatcatattaaaatattttagttaattctataactatcaaagcctagaagttatataggataattctaggataaattaattgaaagcaaattcatttaggatgaaacaaacaaatgaataaataaaaattcaaataaaatatttgagttcccaaaaacaaaatgtatagattgcatctcaaataaaattctaatcccagccatttttcagtttggcccctccatctttcccttttttttccctttttttcccttttcttcttttttgtgattctcccagtcggctactgttcatgggccgccaggtgctcgaccagagcccaagccgaacacccagcgacccgcgtcccatcgccgccctccccctgccgggccgtgcctagctctgcgcacgccgcatcgcgtcgcgccccgtgtcgctgccgcgccacgcgccgtcacgccgcctcgcgccccgcgccgccatcgccgtcacgtctcgtcgccgctgccgcgctgcgcgccgtcgccgtcacatcccgtccccgctgccgcgccgcgcgccgtcgccgtcgcgtcgccatcgccgcgcgccgcgagccgtcgccgtcgcgctgccgcaccttcgagccccgagccccatgctgccacgtgccgtcccatcgccatcgcgtcgccgcccacatcgccgtcgccgtcgtcggtcgcatcgtctcgaacccctcccctccgcgcgcgctgtcgtcgtcgcccccgcgtcgcgccccgtgccgcgacgcctcgcgccctgcgccccgtgccgcgccgcgcgcgtcgctgtcacccgtcgccgtcaccctcgccgcgccacgccgcgccgttgccatcacccgtcgctgccgccgcgcgccgctcgcctgtcgccgtcccgcccgtcctgtcgcgccgagccccgtgccgagccccgcgctgcgccgcccgcccgtcgcgtcgccactccgagccccgcgtcgccgcgcgtcacagtcgccacgcgccccgcgcaccgcgccatcccatcgccattagggccggccacccctccccgcgccctataaatccccccccagtcgccattccaccccacaccaccccacatcctctttccccattttccccttctcctccaccgcgccgctgctttcgtgccgccgcgcagccgccttcgcgccgtcgcgccgccgcctcggtgccgccgcgccgcgccgtgcgacgttccgccttacaccgtcgtcgccgccgccaccgtcggtaagccgccgccctccccctcgttcggtcgccgttgccgccccgagtaggcagagagccgagagagagagaaaaagaaaaagaaagaagaagagaggagcgaaaagaaagagagaaaaagaaagaaaagaaaataggaagaccccacctgtcagtcactatagcttgtatagcttgtagataaggttgtattataaataaatgaattaggaacagtaccatttcgcaattattagaattaattcaaatttgaatctttacactagcataacttattcattttagctccgatttgagtgaaacttgaacctaaatttatctaaattcataagctttccaatggtatataattcactatttgataaaatacatttataattattaaataattaatactaagataatgcataatagtcaacttaaaaatgtgctaataaatagatttgatattgtgcagtagagtagatgtaataatattggtccttaacatgttttgtcactgtagaaaccacataaattaatcataatcaatgtttcagattaatggatgtataggaaaataatagtgccatttattaatctatgtccaaatataattaaacccatgactgataggttatttaaataaagtttagcctcatatttgtaactaaaaatataaacacgtatagatcattccttagcttatttgtgaggaacaataacagacctattataaatagactactaaaaggaagttgatcagtagcatagggaatagcatatagttaacttggttagcatccaatagttactccaacagtaaaatcacttgtcaacccacttagatcacatatactatacaatccatttaaattcatacataaggacaatcttttgtatataggaaactaaggagtctatgacaaacatgaatattagataaatactagttataaatcttgacctcatataattatagttcagctgtaaattaggattgttcattaagggataatctgtaaccataatgtgattaacctaaacaactctaacattcaaagcatggataattattaaccttttataatttattgtgacaagtaaaatttgttcataattaaagtaaagcctccatcaattaaataataatacaaatgattcattatttgattgatcctaaatccatctaacaacagaacctctgttatgtaacagtgctatttagatagatgcatatatagccataatccttccatagccatttgatagactaaaccaccgattagccaaatatatgtgtataccataaatgctatgttggttaactcctaaatagaccacgatgacaatagaaagattaagaaactttagcccttagcatgattggaattcattagcaaacatgaatagtacattttgttgtgcatatttgattgttgtttgaatattggtttttctcgcgtattatagaccttgtgtatcggttagtcgtgaggcaacgtttgcaacttccaggaggtaacggttgatcaagattatatcaagaataaggcctattctgagcaggcaagtcatcactattctttgaacatgttgatcccaattgcgaaattattttgtttacaaataaaattgcatgcaatgatgaacatcctacttgtgattatgccatgccttgattattgtttaccccttattccttcataaccatgtttacgtatgagtccctagtcaattatgacaattgcttagaaatgctattctagaattatgcatactcatatttatcaaatgctatatacttgggcaattacctttgggaaggtaattgagatgcggcatgtcgagacatgagcgccacattgccatgatattgatgacatgatttgtgaaatgagaaataaaactaaacaactgttttcgactggggcggacggaggatttgggtggtatctggaaaaggctagtaccgtccccggtcaattaaggaccgagccatgaagttaagcatgaaacgacccccgtacaaccgcacttctcgtatgggtatagacctagcggattagatagccgagcggaggcagtatccctgcatagatggttcacccctgagtgaggcaggtgcgctaccgtgggacagccgttgaggtagggccgagaggcgtgccctacatcggtgtcgccattggtaggactgccatgagtgtgtgagagagaaactaacttaatgagtgtgtgagacttcctttcccgggagcgccagaactcctctcactgctagaaactgtgtacgcctagagtgcatgaggatgaaaagttcatggagcgggtactgccaatgcgaggttatcgaaaagctttgccgtggcgcgtctcatgtgttgggacgaggctcatgtgttgggcagtcgcggagtgcgggtaaagtgtacatccactgcagtgtgagtaaaccaaatctattcgaatagccgtgctcgcggttattgagcaccgggacatgtattacacttggctagactctaaattcttaactggtgtgggatgggatattgcatgatgaattttatgctgatggagacacttcctgagaggagggaaggtggacgtcctcagaaaaccatgacgactcaatggcgggaagctatccttgggattacaatggatggtggacagaaccgccgttgtttaatgtgaacactggtattaaaacttgatcagtctatggtaggtcttaggcttgtgaaaagaattgcaaaactagctttatgcaaaagaacctgaagccattccttgaaataccctctatcatatgcattgttgttgtggtggcttgctgagtacggttggtactcacccttactatttatatatcttttaggagagtgttgaagagaagcccttatcggtacgcttgcgtatccaacaagatgatcggagtgcggtcttgttctaggtctcgtttccccagtcgactgcctgtggcatgttaaccgggcccttatattattttgtcttccgctg

SEQ ID NO: 3959 - DNA, 4088 bp, Oryza sativa
gtactgatgagtatgtagaatacatgtcaagagttccatattctagtgttgttggttatttgatgtatgtcatggtttgctcccatccggatttatctcatgctatgagtttagttagtagatacatggctaatcctgttaaagaacactggaaagctgttcagtggattttcaggtacctcagaggcacagctgatgcttgcttgaagtttggcaagactgataagggacttattggctatgtggattcagattttgctgctgatttggataagagaaggacactcacaggttatgtatttactattggtagttgtgctgtgagttggaagacaacattgtagcctgttgttgcccagtctaccactgaagcagaatacatggctattgctgaaacatgtaaagaaccagtttggctaaaaggattgtttgctgagctttgtggagatgattcttgcattaacttgttttgtgacagtcaaagtgccatatacctcactaaagatcatgagaggacaaagcacattgatatcaagtaccattatgttcgcgatgtagtcgcgcaaggtaagctaaaggtatacaagataagcactcatgataatcctgctgatatgatgataaagcatgttcctgttgctaagtttgagttttgctcaagcttagttggtatagtggtttagcccaagaggccatttggcgctgaaagtgttttttgcttttgttgtgaaggattgattcatgctataagaaggaatttgtcttaaggtggagtttgttgagttgtgatccaaattcatttgcacttaataaagaccagcttctgccggagcgaagtggaagccttgccgaaggccccgtggtacggatcgtaataccttttagggtttcacctcatatatataactcttgtaagccgccgtgtggcgttgtaacctcaccccgatatagtgaagatattttgctggctggcgcccgtgttttttctctcctgctttgggagggttttccatattaaatctcgtgtcttttgtgattgatctattgttatttatcgtttgtttgcctatctttttctaacatgatttggatttttttttcttttgatattttccttctgccacttgagttaaatttgattttagagattggagtttttttttcatacccttctgccacttgatttggattattttttcatttgatattttccttctgccacttgagttaaatttgattttagagtttggagtttttttttaatgccacgtgagttgaatgagttttttttccctcctgcgcttgagttaaatttgagttcttttcatttcattttgagtgtttttttttgtctgttttgagttcttttttcatgccacttgagttgtatttgagttttttttccatcttgagagagttagtttcagtttttcatttcattttgagttttttttcgtttcaaaagaaaataaaaatcgtccaagaaaacatcccttacaattcgagttgcgagaagtaaaaaatcgtcgttaagccaattcatatcctggcaacactcgcacacggtacagcacacgtcgatcggatcactgtttctaagaaagaaaagagcagatgtatcaattgaaacgcccgagcagtcaggagtaacgtgcaaaaaggtcgtacacatctccacccttctaccaaaaggtccaaaaccccagaaccaacctgattacccatttggatccacagtatcaatacgatcaaacactcgctcctttttttttctctgtttatcagacaagtttaatcgatcatctcttgatctaagcacaacataatttattgttcacacacctataaatttaattaatcacaacacggttcgcttacaaacattcatcacgctctacaacgagcgacgggataaagcctcaaagctccccgtccaatctaacttcgacaaccttgtatagctgcgctgtgcaaagcagcgtcccacactggggacatggtgtacagtcattacaaccttcttactcctgagtaaacaatgaactaatcatgtacactaaagttacaggtaaaccacccaaagtacatacaactcgattatttgctcatcattccattctgtcctttaaaattggtgtagatgagagggaccgggaagcacatagcttcgcttacgatttgaagctctgaacggttgtgtagcttccaaccgaggagatgaagtcatatcaactacactgaacactgaagcgtcacaatgaactaatcaccagatgaacaccttcgacaaacagggggcctgtgatgtgatgctcggctgcaggttgtttggatgtataatgtatgtaccttgtgactggtaaagagatttccgtcaagaaacatggatcaagaagctggaggtggttcaacgatgtatcatatataagcaagagaatttctgtcactagcagactgtggccgtcctctagttggtgtaggtggccgttgtatgttaagttcctgcatatgatcagaaattgtgcaaacaaatcattaaatgagccatacattcagagcctaatgttgagtttttttagatgaatcagaacctaatgctgttgataaaaagttgttgctcacaatcaagttgtgccttgccttatctcactagagaaatgagaagaaagaaatactcattctaacctgcatccatgtggcgtccatggcacgttctggggaagactctggagaattaactggtggaggaagtggatgaattaactttggaacaataactagtcccctgcccaccacaagtatggccccagcgttgtttgcagtacctggtgcacgcatggtcttagcaaaaaacttggttgcatacttgcataggtaacaaaggaagttagaggagacataccacaatagttagtggctgaaaataaagttatcaattgcccatgagcaaaacgctcaaacccatccataacacactcatgagctcttatgattagttgcaatctgtttcgtttacagaattcagtcactcgatcaggctgcaaagtagacaggaaaaagtttaacaagcagattacagtatgatttatttcataaaaaaagaagcatgtgtagtttaatttgatgttgctagcactcaaacttaaaaggaaaacaacgagcatagtaggagagctcaattatcatatcataccccaaatgtcaccaagccaggccctcgtgcatttggtctcaaaccctccacactatcattttctgtaggatcggacctgtatttatacaaggaaagtactcatgaattgtcatatacagatgaatgtagaagacaacaaaataagaataggtaccataaaaggtccatgagaataatagatccaacatccattgtgataggccgttcaagtttctcgatttgctcgatagtgtttattgaccttccaatgccaccatgcatgcaaattattttcttttctatcatggcagcaagtgggagataattaaacagttgattgaatcttgtccaagcccatatgccatcactttcaccctgcataagagttaagacaattaccacatcaaaaaacttctatagttcaaatatgtattaagtattataataactaccattctctctatgcattcaaggcggaacccaaaaagtgcattgatgtcagcagcctcgtgatttcccctaatcaagtggacgttttcagggtactctatctgcaggatatgttttcaatggctcagaaataacttcatgacaatagtgttgtggcaatcaatgtatttcaattaccagaaataaagactcactttaagagcaagaagcaatgttattgtttccaagctgtgctgacctcggtcaacatagtctcccaagaagagataatcaatatacctaagaaaaatagaaacaggtgtttagacaaagaaaagcacgtgttcaaagtatttggaaggatataacaacagaaaaaaatggatatatttggaaacatctagtacactctagtagctttgaaaacaaaatatgattaaaaagttcagcagcaactaacgttatatcaccagcagctgatggataa

SEQ ID NO: 3960 - DNA, 5028 bp, Oryza sativa
  unsure (1)..(5028): unsure at all n locations
ttcattagaacgcaggaactcttgtagcgttaaacaagatgagtatggaacctgaaaccagaagctatctcgtgcctgttatttgtagtgggagaatctgaattaaaattgtggtttctattttgattttctgcccttgggactctgtcgtacatagatgaagtaaattctgattggataggtgcattatcagcaacaagaaaatcgtcgaggagaatatctgtttgaaaagaacatatattagattttcaacagcatgaatttggagatatatcaatcatcacaccaaaaagtaaaacttggaataatccacagttgacactgaaatataacaatgcagagtaacggaaatgaaaagcatgccattttcccatctactcatcagttgcttacaaaaactttgtggccttgatataaataggaaattctatcattatctaatatctgtaccttgctaaaacgctgaatagttaaatggaatatttcaattctgttagaaaattgccagactacaaatttgattgtctaaacatgtgtggattgtctacactaaacacatcgaggtgacaactgccaaccccactacattgagaaacaaatattaagtatagtaatgccatctagtgacagcaaaaggaaaaatacagttcagacaacaatggtcacagtattgtttgaaaaggtttctccaattctcagatggacaaatacaaaatgaggcagccaatcacgaaatgggcatccaaaaccagttacctcccctcagaccaccataaatgtatatctgcgttccaacagaagcagctgcatgacgacaacggcgaagtagatccgaagaagcatcatggtcatgtgaagacttcaatgtgcgagaggtcacaatgccatttctatccaaccaaactccagcagcagtgtccagaacttcagaaagtgtggtatggttgagtccaagagagtagaaataagcatatgaaagctgtgggaacaaaaggaggtaaactcacctgctattgcaccctctccctcaatggctctccctcctctaaggactccaccagtaacatgcaaccgagcaccaacaaagacctaaaacatatgaccacgagccatcaatataagaaaagcagaatattgtatgtgcttgagtgcagaaattagatcaataaatatgaggcaagattttaaagaaagaaagtcattgctgaaaccaaccaaccaggagaacccgttaacaccatctgagcaccaattcatcatcaacaaataaagaaattcagctctcatgtatggttaacttacagctgcatgctgatatcttggagatggagatacccctggagctagtgtccactcccactggccacttgtatgcattagtagtccataagcatcagaaagtggctgcacatacattgcacgtatcataaattaatctcaacataaaattatttaatgacacaaacctaatgttcaaccagcatcttataataataaaactacttcctccgtcccaaaatataaacatttttagctatgaatctggacaactgtgtgtctagattcatagccaaaagttgctatattttggaacggaagtagtagataacttgattggcatgataaagcaatcctaattttagtacaagtcccactgcctataaaatatgcataacagtacaacacattaaaaatgctaaaacaccatgcttaagaaacttgctatatacttgatgcagaacccctcgaagataagagagagagagagagagagagtatgttttttttcatcctagtgatattatccataacaaacagtgattcaattccattaactatatttaaagatttcatctctttagttatgctcgtttgctatctttaaatgcttgccttccaaagttccaacttccaaagatagataattaggaagagagcattgataattagcatattaaatgtgtaggagctatcctaagaatatattaatccattactacctccgtcccaaaatgttgctaactaggatgggatttgacccatcctagacaacgaatctgaataaaacctctgtccagattcgttgtctggtttagggtttaggtagcaacattttgggacagaggaagtactaaataatgaatggatgttctcagccaccagaactcatgcattacataaagccatcgatgatcttcattcaccatatatgcatatgaggttcttgcactagcagaccatagttaaacaatgacacataacatcatataaaaacataatatgacattatgctaaggagaatattttagagctaacaaacagntaacaaaagcatagactaccatcccagaagcatcccttccaccgcaaagtaaaagcatgccatcggtgcgtgcactggcagtagcatacctacagtgatttagaatgaaacaaagtaagacattgcacgtttatacaaacagtgtaaattaatgcaatggctacacctaagaaacttgtgaagtgctagtttcattttacataaaagcatgctgaattaagtgctacatgctgtaatttacaatgccatttatgctgtgagtttcatccagatacatcatactatttatttgtacgctgtcagaacaattaccatagtgttatgtgcagaactcaacattgttactacggttataaaacagtacttttatgctctatctttatccctctcactaaatttcacaagtaattaagcgttattattagtggaatagtggcaggccaaaaatcggacccttgattagctttaaaaatattgattttcattttttatagcatagaagaattacgtgaaactgaaaagcaaacccagacaagcctgtaaaaagacaaaataccagattgtatgcataatacaggctcgtctatacagttatttttccttcttttctttaatgtaagagtgcttgcaaatatagctagaaaacaaggctaacaaagattcaacagtttccaacatggagtaatattggaagatgagaccgtttgcagtttgtccaagaaagtcaaatacaacaaatacatagtaggttgccaatctactaaaaaggaggtcaggttgaccactcgcaaggggctggatagaagaaaataaacaaatatgtagtaacaatgaaaagtgaattgatctgatgcagtgaagctctctaaagtagtggactgactcacattctcgctgaaggtctatcgccatcagggttaagtttctgccacctatatggtttctgtgctgtgtccagagcccaagcatccgataagactcgctttcctgtaccaaaagaaacattatttgacaagtccgacaactattaaaagttattccaaaacatgctagcgaaatccttttagaaggcaataaataagcaacccatgtgaaatcttctaatgggttgagaacttcaggctacttaaaaagttggctgaactataaatctataacaataatagacaagttatctatagttttgttactgaatacggatagccaaggtactgaaatgtccatatatatttgcagtgaaagcgtttttgtaccaaagaaactgttctagttccatgttttctttttataaattgaacaagtgcgagtgaaattcaggccatatttcctcttccacttgggtgcatgcacttttgttagaaactgtccttgtttagggaacaagttatatagatatgtttaataaatactctattgtggagagccctaactggcaggcagttaaaacttataagcaggtatattcattagagtgttacaacttgccagtcaaaacaaaatggacttccataaatagtaaggaggtggaacgccataaaaattattatggaaatacaattcactgatttggagaatttagcatcgaagggctaaccatcatttccagagacagttacaagataacgttgggctaccagatccatacagtgaccatagcgaggaccaggcccagccccctgaacaacaaccctgcatccaatggcagaaatgtagacatcacatatccatccaatgataagcccaaaaagggcaaatgcatccgcaaacaaaaaggctggtgtctttaacattcacctgtgccatttaaacttgtcgtttgtcaggtcaagaacatagagatcatctgtcgagtgccccgctggtccaataccaccctatgcaaacattgcatcactcacaattaattaattagaagtaagtagacaggtaccgaacaaaaaatcgaagatcccaagttccaaatacctggaaaacaaccatcgttcctacggcagctgcagcatgtgcagccctcggcgatggaggctctccagctggatgcaatctgcgtcattaagaattgaacttaaaccctgattatttgaacccataatcccattccttcccttaacggccaagttaagcaaattagttgaatgggtggaatgcatttctcatcctaaacgcacgacagcacaaatataagacaatgatttcatcaccatgtataccataaccctaaaagactatataacacagaatatacgaaattgaacctcaaataaactccaagggatgaggagacctggaaattgagctaaaccctagatttctgagcagccatatgaaacaaaatctaaacgcgagcagcgcccgtacctcgtccacctgcgcgtgtccacatcatacgagtgcaccgagttcgtcacccccgcgagcccttcaagcagagagaccccaaaacccccaaaccattagagcaccaccacatcacatcacaaggggagatagagagaggagaaaagctcaagcaaacacgacgcgcgcgagacttcaaaaaaaaaaaaagagcaccgtactgatgcccggcatgcctgaggatgcgccggcctcgatggcggtggcgccgccgaagaggatgagccgcgggccgtgccccttggtgggcgcgaccaccgtcagcgagtggccgcacctgaaccccggcgagtcgtcccccgccccct

SEQ ID NO: 3961 - DNA, 5841 bp, Oryza sativa
tgtgcgtgcacgcattatgtcaacatgccagattgatgtgatcagtggaggcatggtgctatgagtatatatattggctacatatggtgttttctgcctatgtaagactaattggtgcaatgtccaatttactcacatttagtgcagtatctgtggtttgatcttagtaatacagggaccaaattggttgtatggtcgttcactttgcacaaattggtgtactagataagttcgatagatggcagtccattttccataatagagcatattgctgagctaaaaacaagtcatcttatttcttttcagattaatgatatgcgtgtcacagaaacagggtcctttcagtatttactggagtatcttgattacccagacgaaggtaagcaaatcattatctgagctatcatttattcgggagttgtttttctttttggaaaaatgcttttacacaattggcgatctgtgccttgacttgaaagaatctgttatacagattgtaatttaaggctattgaacgggaaacttacatttcattatgttttagtgaatagggaagttgaacagagctaacatacatgtgcaaatgaaggatattttgcatttgaatttgtctgacacttctcaacatcttctctattggggaacacatgttttcttctgtctactgataatggtttacagtttggtttgtatggtctccactatcttgtaaccctcttttgttttatgtttggtggtgattaactgatcaatcctccatattacataaaccagtattatcttgggttgagggttaaataagttgtttgtgtaaactaccaggagctatagtgtcacataaatcagtattagcatggtttaatagttaatatacttatgttttcttctcttccttgaatagtggttgtatataataacagttgcaagggcttgtctaatgatgtcatgcgcgaatgcttatcttgaaccatagaaggggcattacaagtagacatttgtaaccttgtgaagatataggcacattcttgaggcctatatattttttatctcatccattttgtccttgtatgctgacaaggcacaagcaaatattgggagaacagaaactcatcatgactaggaaattagttttgtatacacctcacgtcattactccccatgcccttcttttgcagagaaaacatggactgaagtctttgaaaagaacccagcgtatggcaaaaggaactcaaatgtggttagagaaagagaatgcatgcttcgtccttcctatcctgagttgtattggggggatcaagttcccgagcaatttccaaagagtaatgtgatagtatctgtttgtgataccccgaaagtaggtgatctggttgagtggttgtctgaaggttcttactggactgcgaaagttactaagttacttagtgaagatatggttaaggtaaacatttaataatttgcaaaaccaataaatttgttgctgcccttgtaagatatgaattcagttgttgtccgcacgtgataaatatattagtgctaatataaatttaccttgtgtaatccaacaaatttgtgtctatttgtctaatactagataatgaaagtaataaagtccaaataattcactgtcaattttaactctgaagtttgcaatcgattgttgatttgcatcttaaatgtcaagagaggttttacaattccttatgtatacttttcaactgtccggccttttcgaagtggagatctattagtatttcttgtactcccccaccaagaattgcagaaactaggaagatgtaacatacttttgttggaacatacccgaaacaatatattgatctctctgcttggccatctacttgcaggtacagctgttgaaacctcctataggtgaaggggggagttatactgcttactgcaaggacatcaggcctgctcttgattggtgcctggagaaaggttggactgtacctctttcacaggtatctacctaatgtcctgatgggaaggactctcaatacctttgttgatttcttcgtatttattttgtagtttaggaccaatgtatatataatgatctggagtgattcttggtcagtttgggctttttgatgagtctatttctgagctgaagcagttcttatagcttaaaacagtttcagctaaatttatatatatgcatctaatgatatattcatttatggcatcaggcaaatggacggtgctggcatgctgctcgtctgattcatcataaatctggtacagctgatcttttgtggattcaatatggctgtgtgtcaattaataaaaatgtggcattctgagattttaatattctttggtggtttacgatcctcttccatttcttgtaagacaagaacaaaaaagaaagtgaaaaaaaaactaataagttatgcatcgcaataaggattgtatcatgattagattgtttatccttggaatttgaaggaaacatcatgacaacttttcaagcaaattacatttcatattctacaaaaggatatgttcttcctattagacatttgaccttgacgttgaaactttaagtttgaggcaaatcttgtatgattcttttttcctctttaagaggtgtccctggtatttcaattgataaaatataaacaataaccatgatatttgccaaagttttgtcaataatggaactctagttttttctttgtctgaacaaagctgggacattcaattaatttgattcacttaaatattctttttccctcaagctttgcatagatttcttcataatgtgattctagaagttatgctctctgctatgatgtctcaatctttgtttacgcaaattatggattgcagacacagagatgagtggttcagatgaagagtcgacatctgatgacgatgaagaggaagcgcagaaatccttgaaaagagcatcaaattcgtctcaagaagctccaggctcaaacctggaaattacatcagatacaacctccagttctaggattaacagtcagacagctaccattgccacaaccaaggggatttcgagatccagcccggtatccatttccactgggccatagtcatggtgcacaagcagctgtgacttgtacagttaaccaggtacccgcagttccagcagacaattagggatataggtgcgccaacccacaaatccacttataagctatttaaccacttaaatggcctgtaagtgcgttatcttgctgacccacttgtggcatcgttgcaggtgatagacatgtccaatagcacaaatgtttcagagctggataggatctcaaacagtactatagccgctgagtctcttccaaagatctgaactggctaccccctcaaccatttgtggagaaggatccatcacgagacacaacactatataaatataagaaatataatgatgttggagtcttggagatacatcagcattcagccagtacttcatcccatgaaatggatatatgctttacacgttgttgttttcatgactgaagtgctacgttggcaggctgcaatgtttgcagcgttgccgctacttttagggacagttcatttgactgatcaatgagatttatacagctctgaaatttcagacacgttgcaacacaaactgctgacatgaacgatgattagagggaaaattcctagtttttgcattttcttaataattaggaaactggttctgtcaccaggccatacaaggaatgaaattatcaagcaaaacataccaaccgactacgtgattatcatagggatacattaaaaaattgataaataaacttaacaactgatttagaaccgatcgaaccaacacaatagaggaaagtttaaaagaaaaaaaatattttttttgaaaaaagtagtgcaaataatctgtttcaacaatccgataaataatctgaaaaaaaaaataaacctgtcaagcattcaacagctagccaaataaattagtcagcttgttgatccaataacagtgggagggaaaagaaatggaagcgctgatgcagcatcgtaagttcctacccacatatgagcacaatacttcactctcaagctcattaaattgctcaatgatcatatttcatgatgaaggaataaggaacgcaagcatagctgtgacacaacacgatgtaaacaccccaagcaacaagcatctcatcacaaagatccaacatcagcggttacaatccacggcaactagcgtgccaaacttggaacagtaaacacagctccatccatatactgaaaagagttacaatgccacagaactatcacagccatcgactgaaaatagcagacgagctaatattgataatcaaactacggtaggaggccaagcaaacaaccggaatcctacaagcaattcttgcattctaaagcaccatcatcacatggtggggagcactcagtatcttctcctcggtggggatctggagcgtcttggtgatctgacaagaacaagtgaccaaataagattataatttcatacatgtgaggatatccaatgcttacaacatgttgcactgtgaatgtatcttgtcagtggttccgacttcaacagaagtatttgatagcagggaaatagaaacagtgtaaatctttacatgtgtaattagaaaaaaaatgaaacaaaaagaaatcaatatttaggatttcacattatcacattgccactaggtcagaacaatgaccatatgtattgtaatgataaatgaattacttcgatattctgaaataccaatcagtagccatactatccatatatgataattggacaggccagtgagatcaaatatatttccgagcacatagttgagagttaaaatgaacaaataattttcagagaccgattaaataaaacaagggatggttatggcatgtattacttttagttacaaagaaaaaggccaaacaactttcctcccatgctattttccacctcacagaaatttgtaggatgattaaatggtataaagaatagtttacaacaagtgccatactcactctcaaaaagagattatgtgacaaaacctaaccctctgacagtgtgattattctgccataacaaaataaaaggggcatacaagctaacataaaacatacctcttccgaatattcctgcgcttgacagggccattactaaatgcccaatcaacacttatgatttgtgttagaagctcagttccatccaatgcttttattgcagcctgagcttcctcgaaagtttcatactcaataagagcatatccctggaaaggaaaaaacgtgaagatagaatcaagagattaaaatgttcttaagagaacatgcaacataatattttcttctaaactaaagatggtgcatagtgaaggtagcaatttgcaatattagataagaaagggacctctgaaatactgagctactttctgcagattgttttattcgttatcatggaacattttctggaatctcatttaagagaatttcctaaaaactatgactaaaagcaattttacaaggctgcaacagggctagacacattgcagtattgaaaaagacaaaccttcacgaatccagttcggcgatccaaattcaaatgcaagttcttgacctgcccaaagtcccggaaaatattgtgaagatcatcttcctgagcttcttcatgaaccccagtgactagcacaatccatccttcaatggctgtaacaagaggcaaaatatgcatgggctcagacaatgccacgaattatcttcaaacaatggaatcttccatgaagaaacaaatagcataagagatcacaatttaaatgtccaccattacagtttcattagatgatactt

SEQ ID NO: 3962 - DNA, 5159 bp, Oryza sativa
attgtacggtttcacataatataaaactcctccgaacagaccctacatatatatatcatatatacaccgatcgccatatagccgcacacgtatgtacttcaacggtttcagtggcatcatgtgcaaaagttaatcaacttggcctgcgggcttattgttgcctcgctggaacgcctctttcttcctccggatgaaatccgcggctatctcgtcgatgttcatcaggccgtccccggccttcttctccgatgccgtcggcgccaccccgttcatgaccaccacgatcttgtccaccctctggacatggacttcgccgtccagtacaccaccatcaccgctgcctcgtgacatattccccggagcttgtgactactttgatctaacttgctacaatatttataattctagatcaatatgaggaggattgggtacttctctcttggttgatatggattgtatttataggctggctcgactcagctggcaagctacgctagctccaattattgtacagttaattaactggctctttgatctgaacaggtagtagctttgcataccgttaaagaagtgtaacttaaggttaatgtaaggtacgggtcaggtcagatggaacatatatatatatatatacttgtcatttgtgcaaagtgaaatacttcctccgtattttaatatatgacgccattgactttttgataaacgtttgacatttcgtcttatttaaaaaatttatgtaattatcatttattttattgtgactttatttatcatcaaatattttttaagcatgacataagtatttttatatttgcataaaaaatttgaataagacgaatggtcaaacgttggttaaaaagtcaacggcgtcatacattaaaatacggagggagtaattatttgatcttcagattaaggctagccacacatgcgtaattgcatatacattgcgttgcgtgcgtgtttgtgcgaatgaaggtgcattacggtagctagctgcattcacaaaagtccgaaagagtggcgcccgatcgaatcgatcgatggatcagttgtctgattgacaggtgacacatggaatattagctcgctcttgctgacttcttttgttacatatacaggagtagcgtatttcagatcttcggccagaagagaggatactggaagaggattctctgatttacttcctactactttgagtcactaattaatatgcagggtttacaatttcgttttctgaaaattttggtgatttaggtaggaccaaaattttttgaaattttgaaagattttgaatgaatttaaataaactttgaccaaatttcacaaaaaattgaggaaacccaaaaatttcggtcggtatattaattgatttgccggtggggtccaaaattatttccgaaattttgaaccaaaattataaacactgctaatacgtgggtcggttgggtagaggaccctcctgtcagtgaaacagttgaggcagtgcatgcaaaccacagctgtcgcgagagagtattaattgttacggagccgtttagcaatacatgttatgcaaactgaaatttcgttgtagtaactcctccattcaaaattataaattataagtatttttaagattcaaattttgtatcataatatttttcccaatattttaatgcatgaaaatctatacatttttagccaaatgagatgtttatgaagagagcaaatctaagcaatttaaaattcaaaatttgaccacttaagtgactaaaatacattttttttcttcgcctctatattaatttttgctacaaaatctaaaaaaaatatattttaaaaaggagagagtatttcattatttgtgatcatcgatattatgtggttctgtaattattgttttgtcgattccgcttgacgtggataagcctgtaattgtgttattttccgttgattccacttggcgtggataaagagcttataacatagcacctggaatacttattctaatatgtttcagacaattaattagcctttagagccaagtgtgtcatgcatatataaatataacccagaagttaaatttggtctacagtaaaataaaatgcagtttgttgtgaaaaatgatttttttttgaaaaaaaaatgattcattatatttttcttgaaaactttcagttgaataataaaaaaatagatttaaaaaagggtgaatagccaatttagtccttcaagtctttacaaaggttcactttggtcctttaagttgcattttgttcgtatagaacgaattaaatattcgtattggctcaaaatcatccttgtacctacttgatatgctacatagctaatcctagtcaacgtttctactataaaatgtcccagtttgcacacacgggtcaaaagggaaaaaactaaataaatagcaatgtaatgtacttctcattatttcgagctgtacacacaacagtagagcttcaatggatatattgcactacccctagaagtaattaccatgtattcattatgatgaaaaatgtattgtacacaaattttgataaaaagtagctgcatataatcattggatgtatatttgatgggaagtcttgtccaataagtaaatattatagcatatttctcatttgaaatcattcttatgtatgtgaatgaggtgtataagggtcatttatcacaagagatgctgactagatttagccacatggctcctcaagtgggttcgagcacatgatctggattcaaaatgaaaaactgaaggactaatatggatggattgcaacgtcaagtactaaattgagccttatgtgaaatttagaggactaatttagttattcaccaaaaaataaataataaactcagatagatagagtcatgcgtgcaaccaacaactccacctccacaccggtaatcattttattatctaaacaaaatctggtatacggctctctctgcatataaactgccaagtcaagttgcatcttctttaatcatttcaatcccaacacattgattactacttaagtaagactatcatgttgactcgacgaatgaagaaacacacacatatatatttagcctagctaaatttgtataacaaaagtacaaaattgcatactaattaatccagttaactaacattaattgacaacaaacaacagtaataatacttaacatgcaaaaaaacataagtatatacatatatgcataatgcatccatatcatatccatttgcatatatatgtagtaacactagtgctgcgcattgatctctagctgctatgatcagctgcctcctccgccgcccatttctgtttcaacctgtcgatgtacgcctgggaggccttgtcaatattccttcctgcagctgcagccctctccggcggtgctccgccgccaccggccgtcctcggcgtccgcgccgcgttgatgatcaccttcgtcttcgtctccggctcatcatcgatccgctccaccctgctgatcttgatctccttcgtcctctcgacacgcgacatattgttgtttctatatatgtgttcaggttttgcttggtctgaaattctgaatgaatagatgataatcaagacatgtatttataaacgaagagatgactgaagaagtaacgctaactatgtggagtaccttggtacccaaggaacagaaaagaaggcataccagaagcttcatgcatttgtgttgatattgactggacctattcagcttaggagaaaatgcagtgttctttctgacgaaaatcgccgcaggatgtatcggagataattaattaactagtataatgtgcatatctatcgcattgtcggttcagaatagcctagcccaagctagcaaaactaccaagtgcacaggatctgatggtcaattgttaagacgtaaaaagtaatatgaatcagttgaagattttgcaacgaaaacatggaccagctagtgctgcactacacggtgtttttttcaaacagtaggcttaatactgaaggagcaagacttacctggaacttccttggttcgtactctcgattcgctttaattacgtcattagattgcagctggttaatttcttcagcgtgaatgcgtcatgatcaggagaactccaaatcggaatccgatttggtagggatgggcgcgtatacagtgtaactgctcatcaaggtcaaatgcgcccatccctagctagtaaacatctgcctctctgctctcatctatcgatagtgcaacacgcaagttaatcagggcctgtttagttcgtgaaaagaaaatttttagatgtcacatcggatgtttgactggatgtcggaaggagatttcagacatgaatgaaaaaactaatttcataactcacctggaaaccggagacgaatcttttgagcctaattaatcagtcattaacacatgtgggttactgtagcacttatggctaatcatgaactaattagactcaaaagattctctcgtgatttcccccctaattgtgcaattagtttttttaatctatatttaatgctccgtgcaagtatccaaagatttgatgtgatgttttgggaaaaaaatttgggaactaaaccaggccttatgccttctacgtactcccttcctttcgtattataagctgctttaatttttcctaatcagttttttatcaagtttgcacaaaaatatagcaacattttcaacaaacatattaataaattatatttaacgttacattttcctccgcaaggttcgtccacggagggtgagttagggcctaagattaggctatttaaaaaaataatttagtgttttagatgttattaattttttttataaagttggtcaaatctaaatattttgttgtcaacaatatccgagagagttgtttgatctatatagtttaaatgctatttttgcaggtcaactacattttattccgcgatccttgtaatcattccttctggggataattaaaaagagctcattctggtgcaacagtttaattacttaggtctggttaatttgacacagcttcagatattagatgcatgatagatttgaagttcatatgttaaattatagttattgttatattttatattttatctaaaatgagaataaaataattaattcaaatgtgttaacgtaatcgcagatctagatgcataaat

SEQ ID NO: 3963 - DNA, 5093 bp, Oryza sativa
atttttgttgctacagagctagcccaatcaactcagaggtatcgatctttgttagctgcaaatgcaagagcatcaggttctctccaagacggataatgaattggactcataacagtagtctactactactatgcaaagaattgcaaatatattcaggaaagcacttctcagtgtgatagtggacactccatagcaaagatatttttgtgtcacttttgaaaggaagctttgatctttttgatgtgctggccttgtgaaatatctacaagttggcgattgcaacctttaaaaggtatccattaattattaatttactgttttaggactagcttgtgatgtctgagagaaaaaaaaaacaaagtgaatcaagttcagcacatacagctatagtttttgtgttatgtttggtttagttggttgttggttaaattaacttccaaattatggttccaacttgcaaactttgttagatttcactttctggcttctgaacgtgtttgtatttctacaaacaaaaaaaaagatgtttggttcaattaatgtagccttacagttgctgaagagattctcttgaaattaaataaaagttgcagcagacatgcatggctagttatgttactgaaaataaatcctttttactgatcattaaatacttttaactgctcttaattaattggcaatagctaggtaaatcttggcataaaaatcattacctcagaaatgggtacaaactgcatatatgtttttttttgggtatatccttctttggtaaaagaaggaaaactgggaaattaaccatgaaataagggtgaatcataagttcttgttttatcaatcattgggagttcattatgtacacttctgtttcattctttgaacttgtaatataattcaataaagtgtctgataatttatcttttaaaataaagttttgcccacacatcccaccaagtcatggtatggccaaaactaaggtttatttctaaattaaaaataagttaccggatcacttttaaaatccaactaaatggttcaaaacacaaaaattgaaattggccagtatctccacaggctaataatattagagagaattggtagcactagtgcagcttgctagctaacattccatcaaattctagatatgttagagtgtaaactagagagaattggtagtagcctttattagattgcattgagcatcatgggttgtttatatggagtaacagattggagggcatgaagcttgatctcctaggtaaggcaacccatacagataagtcagatgagatacttaaaatcctagtatatagtagatatggagatatatattccaaacatacttaacaaagagggcattgtaggattatacagcaataactaaaccaatcagggggagggtgaatgattgaactacccaaaaaccaaaacttttagcagaattaaaagttacattcgaatagatagagcttggtctgactggagttgatgcgccggtctaaccacacaggtgcctccggtctgaccagtgtagtcgctctagtctgaccgtcctttgcgtagctgtcgcctgcttctgatacttaaatcctagtatacttgatatggagatatatatattccaaacatacttaacatatagagaacatatacctgctagtccacttgaaacaaacatatctaagttccaaatgtttcagtctcaaaggagaaagttcgttcaataaaaaacactctcaaaggagaaagaaagatgctagtttttctgtacacaattggaggggtagtaaatttgcaatctgttttttttgcatattggagcatggcgatgtggaaattgaagtatcacaggtgaaataggcacaatttctaaaacaatttattaccatgaagtttcaagacacaaaatggggccttttagccctttacatgactggtagtagccacttttgtatcttatatatatgtcattacaagcatgtcacacaattattgacatataataaacttatacatatatggattattacgttcatggcatctagcgacaccgtggtagatgactggccagttacacatgacatatgacagagcctataaccatcatccctagttatcccaagtagaaactcacattttccctagtaaaccatgcgtgctaattagttgttatgtatagccactagacgatgacgtacaccgtctatttctccgatcataacttagttgttcattctagccactgggacgatgtcgtctggttttccagccacagctccaacccgaacaacggtgacggccatgctttcggcctgacctgttatcggcgatatcctgcttgtggtcgctgatggcttggtgacgaggttgtaagcctggatcttctccaccttcctcaccctcaccacaccttcaaccgggagatcgctgctcatgttcttggctccagtgcggaacatcttctccctccctttctacaccgcccctctttgatcagatgatggagatcagcctagctaggtatatctatcacagttaggagggatttcaagctctagctagcaagatggtacatgttcttgtgtgagcttgccttggccaccatttatactcctagacaactaggagttgtgttcttgtgggactctgcagtgtctccatggagatgccaattgtacagtgagagcaatcaatcaatggagaaatatgtaatggttgctgctgtttggtcgacgtggctgcacttttttggattggatattttttttttgaaaagaattttggattggatatgatgctgtgctatctgttcggttgttgctgtgcagagtgcttatcgttttgggcatcttgattccaatcaattaatatcagtctgatcttttttttgcacccatgtggaaatatcgatcccgaattcgcatcgatgctcttgatcaaaagtgaaaactcatgctgtcctggatcattcaataattaagcctcgtgctagcgcgctgcaggcatttgtgagcatatggaatatatatagcccctatttttttcggcttgagcatattgacttagatttttaagatgcttttatagggttatggttttataaaccggtggatatttagattttatttcaaatgtagagttatactctaatccacatatataagtcaatatagtttctcaaatatagttttttggttcaattgtgcaagaatggtttatggattatatatgactttaaaaagccaattgaaaatattgctagtttgtttagactttggcttttagacttataaagcactcataggaggtccaaacaaaaagggctatagaatcgtaaccaatagctatgattgaggtatgtttcatggaaaaaaattatgccaagtgttatatatatggagtgtaaatttaattagaatgtaaatatctgaatctgcatgcgaattccgatcatgcatctgtatacttttggttatataaatcaattaaggagaaattttcatatttttgctgatgatcatccaaagcttttaagcttcattgacacactaccaatctcatgcttatttacctaacaaagagaaatcaagcgtgctgcacgttgcatgctaaatataattaattcaaaagcttaggatctccaataactgagcacagtggagaaaagtttcaggatgcagctgcttttttttcatatataatatataaaagcccatatatatatgcatgctcttttgtcggagagatatatagattttattagtcaactattgaactatatttatctccaagcatatatgtccctggcccaagctgtgtcgagtttttatacgctgtcgccaattaattattgcgacaatagtttggcaatccttgtatgacaaattaaataattaaattatcagtgttaaagtacattgcatgtaaatttaccggttgttgtccttcacttttaattttttacattcattttagataatagaaatatatggtttaagcttgattaattatgtgagcaaaaaattatccaaatatatatgagattttcttccatccttgaatatatacctccatatatactacttcaaaagaaaaaaaaaataaattgattgaaccgattagaaccagagtcccactccggtgctctttacttattagaaagcaatatgaaccattaatctaatttgattgaaggtttcagatctatttctactaccacatcatttaacggtagagagcaccagggcatataaaagttatatatacctcaattttggacaggaattatatacctctgactaaaaactaaatatttatacatctcccaaagattattgaagtaacacatcaaaaacatatatgtataatgtatgtgaatttgaatcctacactaacttgtgagattagttttgatacatcacttattgaagagcagtctcatcaagtgatgatatgagagatatattcctgtccaaggatgacagagaatctctatatgtaaccagagatttatttaatatattcactgtctgcaagcccactcgacatcaattacaacgaaaaattaaatggcatagtgcacaccagagacaaagctgtacttttccttttgcaagagaaataactgtagcttgtgttggtctatattaaaatgttcggtttctcatatcatgagtggctttaagttttttggatgaactaatattctgttcattaaactaacaatcaaattaacatgcaagtaggacaacacatgtgctaccaccatgtaggaaacaaaactatcaacatatataaaaaaaaccgaagtagaagatgtgctgccttattgtgatatatatatatatatatatatatatatatatatatatatatatatatatcgactctttgaaacatgtcaaaataacatgaacagtttataattaagaaaggcttgtgcctcgtgtgtgacttttgtccaatcaggtatatttcaacgtctccatcaaaattaaaattaagggcttctttcaaacatggaaaatttacaagaacttaaataatagtatttagttcaaatttcctaaaaaaaatccttcatttttcaaagtaag

SEQ ID NO: 3964 - DNA, 4752 bp, Oryza sativa
  unsure (1)..(4752): unsure at all n locations
atgctataaactcggcatacatagtagaccctgcagtgatagtctgttttgagcttttccatgaaatagctcctcctgccagggtaaacacgtatcccgatgttgactttgtattatcttttgcaaagtcagaatctgagtaccccactatctggagtgattctgatcttctgtaagtcagcatgaggccttttgttccttgcaaataacgcaagactttctttaccaatttccagtgctctaggcctggattactctgaaatctgccaagtaacccggtaacaaatgccaagtcaggtcgtgtgcacacttgcgcgtactgtaggcttcctacagctgacgcatatggctttgttttcatttcattgagctcatactgatttctgggacattgcgatgccccatacttttcgcctttcattataggagcaggtgtagcactgcatctgtacatgttgaatttcttcaacaccttttctatatatgtcttttgagaaagtcccaatgcatactttgttctatctcggtgaatctctatgcccaaaacatatgaagcctcaccgaggtctttcatgtcaaagtttgaggacaagaatttctttgtttcctgcagtagactgacatcactactagccagtagaatgtcatccacatacagaattaggaaaataaatctcccattcttaaactttgaataaatacagttgtcctcgacattctcttgaaacccaaatttctttattgtcccatcaaacttcaagtaccactgtctcgaagcttgctttaatccataaatggatctctttagacgacatcccatattttcgtttcctttcatgacaaaacctttcggttgcgccatgtatactttttcctccaaatctccatttagaaatgccgtttttacatccatctgatgtaattccaaatcataatgtgccactagtgccattataatcctgaaggaatctttacaagagactggagaaaatgtctcattgtaatcaatcccttctcgttgcgtgaagccttttgccacaagtcgcgctttaaacttttctatattccctctggagtcatatttggttttgtagacccatttacagcctactgttttggctcctttaggaatttcttctaaatcccaaacattgtttagtttcattgatttcatttcatctttcatggcttccaaccattcagatgagcgagcgcttctcatggcctcttcatatgaggtgggatcatcctccatatgcgactcttctatattataaactttatagtcatcacggatagccgatcttctgactctttcagaccttctaggggcctgcacatttggcacatcctgtacctgaggctcttgatgagtctcctgtactggcacattatctatttgaggctgttgtagctcctcctctggtgtgacaaccatttctgttgaatcctgtataacaggttcctcactctcattcattgttgccacaggaggggtaacaacaggtgctggtacctcaatgacaggcattgcaggcacaacatcagcaggtagagagaagaaaggttcctgagtcgacggagcgggtacagacacccgcctctcctcaagatcaatttctcgaactaccgagctccccctaatcatttcgtcttccaagaagacggcgtgtctcgtttctacaaactttgtataactgtttggacagtagaaacgatagccttttgatctttcaggatagccaataaaatggcagctgactgttttggggtccaacttcccaatatttgggttaaatactttggcctctgcaggactcccccacacacggaggtgagttagcgagggtactctccctgtccatagctcatacggtgttttgggtaccgatttgcttggaactctgttgagaatatgaatgtcggttttaacgccctccatccataaaccgagtggtagtgtgnagtagctcatcatgctgggcacaatatccataagcgtacggttgagccttttcagctaccccattctgttgaggttcgcccggtgttgaatactgggctactattccattctctagcaagaaccttgcaaaaggtctagggacttgcccataaggcgtatgtcgaccatagtactctcccccacggtcagatcttagtactttaatctttatatcaagctgattttcaacttcagctttgaatatcttaaatttatccagtgcttctgatcgctctttaattggataaatataaccatagcgggagtaatcatctgtgaatgttatgaacgagtcatagccatccacactttttacaggaaatggaccacaaatatctgtatgaatgatctataaaattcctgcgcttcgttttgcaccctttttgatgctctttacaaattttcctttaatgcattctatgcattgttctaagtctgagaactccaatggaggaagaatttcattcttaactagtctctcaattctccccctcgaaatatggcccaaacgacagtgccataatttcgatgagacatcgggagttcgctttcttttcttgttttcttttgtcaacgaggacacaacattcacattctcagaaagagataacaaataaagctcgtctcgcaacacagcaagaccaatacatgcattattatgccatagttcacatttgccacttccaaagcggcaatcatatccatcaaaatccaactttgatacacttattaagtttctttgcaaagaaggaacataaaagacatctcgaagtaaaagtgtgaagccattcgcgagctctagcggaagatctccaacagcttcaactttttcttcaactccattggcaactctaatggtgctttctcttccttgcgtagtcctcgtcgaacggaatgcctttaaacaattacaagcatgaatagttgctccagaatcaatccaccatgtggatctagagtaaccaacataatgagattcatttacaaatgtaataatgttctcacctttctttgccatgatcattttcaaaaagtcaggacaatctttcttgtagtgtcctgtcttcttgcagtggagacattgatctttctcaacagcgaactgttgttgctgaggcagatgctgagactgtttaccttttgaggtgggagacttgtggttctttttcttatctttaacatagtttattgaaccaccatttgattctttgattctctcctcctctgcacacaattagcaatgagcttctcaaagttccatttctctggacttatgttgtagttgacaataaaatgtcaaactgctttggcaatgaggccataaccagatggaccagaaagtcatctgttatgcccaaatccattggcttcaacttggaagccatgttgctcattctaagtatgtggtctctaacaccacctccatggtacctttctgtcacaagctgcttgatcagctgtgtagcataagtctttgaagagccagtaaactgactctttattctttcaaggtactctgagacagcgtcacactctgggatcgagcccaatatggtaggctcaatcgtattctttaccacagccaaacatttcttgttggctaaggaccatttcttttgttcaatgtcatacgacatgacgagaggagcattgtccctctgtctcttttgccagtcagcatctgactcattttcacctctgacaagttcagcaggttctataggacatggggtagtcaatacccagtccacctctcccaagataaaagcaaggtcgagttttcttttccattctgcgtagttatctccttttagggtcggaatatctttaatgcaacccatcaaggagtagccacctgaaataatcatgtgcggtgagaacaaaattaacattaaaatattatgcattaagcctacatcaccgttgggcagaattagacataacacatataaccataactataatattgtaattaacaacgttggtcagaaaattacaacatcatagcacatacttaatgttcctaaaattaaattctcccgttggtttgaaatttaattttagaaacactaattttcatcaattacatctatttgcagcggaaaactatataaaaatcatatgaacagtagcaaaatctctgtaattctctctctgtgaaaattctcccgttggttcaaatttaaacagaggtaaaacatgcaaaaaactattcaaaattctattgaaatttgcatgaaaattgacaaaataaaaattgctactgttctcttttattcatttttcggccccgaagggaccttatatggacttcttccggcctttgccggtcggcccatggccaccttgcgcgcgggcgagcgccccctcctctcccccaggccgcaacctgggcctgggcgggagaagccgccgccgcgcgctccccacttgggccgctttcggcccgagccgccgtcggccgtccgatcgctagggtttcgatcggacggccgggaggggagatcgggagaccaaaacccgacccccaggccgccggaaaccctagctcttcttctctcgcgggcgcgtggccgcgccgagcggcgtcgccgacgccggcggccctcgcgccgccccgccatgaccggcgcgcctttcttttctcttcttctccgctcgccccaccgtctctaacccccaccgtgtgagagagagatggcgacgacggagatggcggcgccgccgcgggccccctcgccggcatg

SEQ ID NO: 3965 - DNA, 710 bp, Oryza sativa
gattatgataggtatttaagtgtaaacagaggattgcaaaacacaggaatggtcgtttgattggagcgcaggaaaaacacaggaatcggataagagagatgaactcaaaggaaattttccaagaggttgaagctcttgctatatttcctccaaaatccacatgcaatgtgccattccataggaatttcataggatttaaaaatcttcaatcttttaaatcaaagggccaaataggaaaattttctataggatttaaatcctataaaattcctacctaaatcctttgattcaaagggagctattttttttctcccttcttttagatgtgataggctgatagccattgattagaataggatcacatggatcctagtactcagattgtcagatgggcaagtttgctggaccagccaggaaggacagtgctctgtttgtggttccacaattctagtacttctgatttttttagaaaataaaataaaagataaaataacaagaaaaagggagaaaagaagtactcctacttgtagtgcactgcacgaaattgcaacatctagatgtatagtgtgtagtcaaggatgaacatgccaactagtagcaaggaaggaatctttgcatttgcacctgtttctgatgacatatgcatgtgaaaactggagtgtgtgtctagctatacatgaataacagatactaccatttttctcccgtca

SEQ ID NO: 3966 - DNA, 10834 bp, Oryza sativa
gacatagaaaaaaacatattttttgatggatggagtactagctagagtagtagcatcggattaataatgaacttcaacaacaactttcgtgcaactcgatatactatgtactaaccccgtcacaaaataaattcacttttcatccatcccacacgctaccaatatacaaaacaaaaaactaaaatactcttatttcatcaaatcctaatgcaactcttactcattttatttatttttaatgtaattattctctactttcacaaacacagatacgatgagtactttaaagacaaacttatttttgagataaatgaaatgagttaaaaaagaacttattacgggacagcagaaagtactatagctagctagaccttatcttccaaatcagaataaccaacaatctaaagcaatgagaatagcatgtaagaatcatcaggagactaaccatctccttaaagcttcctcgcaaacaaacacataaagaaaaattagactacttagggtgtgtttagttcatatcaaaattagaaatttggttaaaattggaacgatatgatggaaaagttggaagtttactccgtgtgtaggaaagttttgatgtgatggaaaagttgaaagtttgacttattgtaatattttggcagcctcgatcgctagcctagctatatatataataactaataagtagtaccatgtcccatctctgctagtcaagtctctctgtctttctctcgacttgaattttcatcgatcggttttaccggcaagcatggcgtcgcggcgggccgccggcagcgtgggcgtcgtcgccggcgacggccaagctgctgctgtctgcgtcgacaaggtggcgaagattggccggcagcgggaagacgtcgatggcgtcggcggcggcggcgacgacgcggcggtggcggtggcggtggacagggtggaggagatcggcggcaacggcgtggacatctgggctcagatcttcatcgaccagacgagaaggaagatgaattcgcagctaaataagtaaaaaatatcactctccgtcctaaaatatattagattttgattgatgtaatacattttatactaatctcattcaaccaaaatctcttatatttgagaatggggtatactaactgcacatatagttattaaggatatatagataagtaattagctgcgaccatttgtgattgtaatttctttcaacagtgtgtataacgtacaaaactcgtgtgttatcgatgaatttatttattattgcactcaatgatcagttacggtaagtacaacttggggagccaatcgaccattcgaccgtgttaattttgtttaatttctcgttttgcttgtactcacaattttgtgaacctcaactgttgggcttcctaaatgtggcccatctaatgcgccccggcccatgcatgtgaaggtgccaatgcacatagagtaaaagtatatgagatggattggaaacttattaatttctccgtttcacaatgtaattcattctagcatttgaatgcgatgttaattgtagcgcccgtttcgtcgtggcgcctagcgggaaaactatctcttaaaaaccctaattgcgaaatccgtttctttgcttgttgtctagtgtccgtgccatctcatatctcaaatccctccgcaaaagtctatcttgcctccctcgggttcgatgggccgaattcctctcggcccatctctccctccctccccatctctctctctctctctccctctcccccactctgcccgtgcgctgcacacgcgtgcgcgtgagccgcgccgagccgagcgccctccgccttcgccgccgcttcccgccgatgccacccaaatcgcagcgccgcccgcgcgcgcgcacgccgtggtggccgatcggccagtcgccgccgccgtcagcgcctgctgcgcctgccccgcgtctgccgcccgagtcgctgctccgttccaaaccgccccgccgtcatcgccgtcgtcatcgactcggccccgcctctccccgcgcgtgcctccaagggacggaggcagagcttcccccctccgccgcgtcgccctctctccctcctccttttccccaaagtggcaagggggcaagccccctttccctcctccctttttcccttttctcttcccagccggcgtcatccacctctgtcgccgttttggccgcgagcgccgagcgccagctcgcgccttgaccgcccaaggtcggtttccaaaccgacattgccgccctataagcccaggcaccctccctcccttctcctctcgtttgtcccaccgcctccactccattgtcgccgcctcccgtgctctgttcgccgccgcctttcgtgcctcgcgtgccggaggagccggcacgttcgtggacgcggaaggggactccaggagctcgtcttcttcctcttccccggcccgaggccggagagaacactcccgcgccgtcggcccctcgtcactgcaccccgtcccgcacggtagtgcatccctccgttctccctcctcgcaacatctcttccccttagctttgagtagccgctcgagtagtaccccagtagttagctggcgccgttccgactgctgtcgtcgctcgccgtgtgctcgccgccgtcgccgcccgagctcggaagcgtctctcgtcgccggcctccctcgatgcgtttcctcctaatccggcgcaagcgatgggttcccgtagccgcgtagatgctctcaccgccgggaatcggcccctcgagacctcgtcgccgtttccccctttcctctccgccggttgccgccgccgcaatccgccgccgacggactccctccggcgaatccaagccgttggctcgctccctctcgttctccctcgtcatcccagtgtacgccccgtcacccctcgtcgtcgcacggcgtcccggagaaaccgccgccgcccgccgtccattcgcggccggcgccttcgtcttcctccagccggcccgcgtggcagccacgtaggcaccacgtcggcgccacctcggccgcgaccggatcggctgacccggccagccgctccctccgttcccccccccgtgcgcatggtccacggtgagccgtgaggctgcgcgtgggcccgccgcaccgcgtcctccgcgaaccgcgcgcatgcaccgcgcctccctccccaaaccctagcacgccccgcgtgcacctcactcacggtgagccgagtcgccgacaagcgggtcccactcgggaccacacgggatggacccggcccaccggctctctctctctcctccccacccgcacgcgcgccttgggccgccttcttgggccggccggcccattaagctcggccgagccgcccctttctctcgggccgcgccctagccgcccgaggaaagtctaatttccctccctccttcttttcttttcttttctttttctaaaaggatttaaataaatccttttcctttagaccaaaaatccaataatgttagaaattcaatatcttcccaaccgtaagcccgtttgactccgttcaacttccaaaactcctcaaatctcgagatctatctaatggcatgcctagaggtcaataatagggctttattttcgccgtttgttgagttgtcccatttcgcgtgtagtttcggagcccgaagacccgcagtgcgaggatttcgaggatcaagctcaagatctcgagcaaggcaagccacctttgaacatcttgaacctatatttgaacgtaattatattgcttgcaaaatattatacattgataggagtgcacttaatctgtttgccccgtctgcaaggcagaccggtgggcctacctaacttgttgcatttgatccttccgttgttaattgttatatcatgttcccttgtaaccacctagttgcgcctcggtaatcgtgcactctgtacgagtatcgacggtcgccttcaaacttaaaatctgagaaacatcttgggtaaaacttgggttttacaaaagacttggaaaacccgacacctgggtcggtgcttgcaaactaaatgaatttccaaaatcgcggaccggggaacgtaccgggtgtacggtttcccgctcttgcacttaaggaccgtttccttggaatttcatccgaacataagacaagtgcgaccacatgggtggaatgggacacccctggctgagtaattagctaatcaggggagccttgatgctgagagacaagtggattcgccgaggtggtgtcggggaggacccctgggcttcctggcacagtatggtctgggacctaacctgttgttggtctgggacccctctcgtcagcatatggtgaacctgtgtcggctttcgaaatgccttgtcatgaaagccctaaggtctctagtcgtggccgttctgcacgggctggatgatccgggttagtaattagtaatgtcgtgtgggtaaagtgtaccccctctgcagaggttattaaactgttcgaacagccgtgcccacggtcatgggcggatgtgaggtgattccttgcgtagttttgtttgactactgctttgtgaaatttgctgatgtggtttgggattgatgtttggaaaatctgcggctgatgggatcagccaggcccgggtggccgtttgaaagttgttggccgggtgccaatcctgatcaattcaaaagactgatacattgcacatactccgaccggacgagacgcactgtctcatccgtgtcgtttgagaagcactcacttagttgtttcagaaaagagtttaaataaaattaattgcaaaaacaacagcctttccttgaagcctgcataaaatacttatttcccatggcttgctgagtatccctgtacccacccttgctctatataaataatctcccccagttgctgaagaagatgaagcggaacccgctgacgaggagttcttccaggagcaagtcggccccgatgagttttagggtttcggcctagttcccaagtcgcgcctgtgatgtgtggtccaagtcttggcttccgcttcccttatgtaatgcagttgtgagctcgggatctgtccgcagcccaacatgactgtacccctactctataataaagagacctctgttgctgtgatattctgtcttcctgtgataccagcactgtttcctgggactggtatcgattaacaggttaatttggagcgtcacgggctagtcccgctcggggctagttcggggcgtgacattaatgaatctagatagatatatatgtctagatttattaacatcaatatgaatgtgacaaaagctagaatgacttacattgtgaaatggagggagtataaacttttctataaaagtgtcagggttacgggttaggtataccctttacccttcgatatacgtcgcatatcggtatggcatacccacgcgcatacggatattctctgcatacattaaggaaatccttcacggaatttacggatggaaagagttctactcggacaagactgggtcgtcaatgtatcgtgtaaggtctgatgtctccgagttctacttggaaaccgcttgacctgcgatataaagggaccccccggggaggacctagggatcgaatctcagagccaacacaaccctcacagcctacgaagtcagagcctgcaaggagccaaatcgccggggatctagtcgaaccaactcgactacgaactcgccggatccgtcgagttccattgttcccattgtaaactggattagggctattacctatcaaggggcctgaaccagtataatctttgtctttgatttgcttgatgtcgtattacgtagattcttgtaccaacgtaccccaataccctctatatccggtctacgggtatcacccgtcgacaaaaagttcttaagaaatctttaaaaaatcactcagataggtaatatgtaaataaacaattctataaaatttcatggacaaactcaatgtgatacaaaattaacaaataatactatttttgtttgtctttttttctccaatgtttctctatttaatatctcacggataaagttgagtttatcatcgaactttaaagtgttgtctaatattatgttaactatctgtgagatatttttttttcaatttttttgaaaacttgtatatatcatcttttcttcaatgtttctcaattttatatctcagacaccgatagatatgaaatgtttcaaataactgatcatataagacaaattccagtacaaaaccaaatcgccgcctctgcatacatttcctatctattttcacatgaatgatatgatgcatgcatatttatatatatgtgagaatggaacttataatttaactcttataatataccttgttcgttcctgcctagcgaagctaagccaaatctagtacatggctggccttctgacgtatgccaagtgatatcagcaacgcacacataacacataatacatcacgcgtgtgattttaggagaaatcatgtgaatttctgaccttcagaaacgatcgtgtatgcgcatcgcatataccatgaagaggacgaaatctttgtttgaaaaagaaacttttgatgaaagcgttagcggttgacgccttcgattattattcagttcttactactatacaggcatatacaactcagtgcacgtatatcgctatcgatatctttgtgcctgatactctcttaagcgtaaaaccctttttttgccatacgtatgtttgtcccttgatggatcagctggattgtgcgctaggtagctcccttcattattttagttcactatactttcagtttttaacatgtgttactgttactatttctgtcactaccagaacacaacacccgtgctgcctcgtcagtgttggttagccaaaagccaacattaatgggatttctctctccgcgcgcgtccaatctgaccaactactagcacttatgactattcactagtgcctttattttttaattgaaccagcatcaaaagaatgtgagtcgaccaaatcaaaacgagccaattttttaagtcggactccggaatctagattggtcgatccccttttcctcctccctgtccatctccccctactcgcagatgataaggtgtatttgaatttagattgaatatgtgatgttgatttgtatttgtcagtgttgatctatgcatattgatttgtgagtgtgtccattgatgtgtttgtgagatgttgatgttgatttggatatgaggatttagacatttggtattgagttgatctaggcatccatcgatttggacgagccagctctttttttttttagcttgtcaacctcatcagccagctcataggtgcccatatatatattattgtgccggttggggacccatttaccggcactgatgagagagggctcatcagtgccctattgttgtgccagttggggactcatcatagatgagagtctccaaccggcactaaagttgttccctgtcgtaatgtgtaaactaaaaaccatagcctttacaaagtaattaatttaattataccatatagatgtaagaagtaatattcaaaacaagtatttcctctatccaaaatatgagcattccaaacgtttaaaatttatttataaatttagggatttctaagaactacttgttacatcaatttatctctcattcaaattactttccatcttatatccttaatcatcctcctatctccaaccgtcctttatttaatgaaggacacaaagctcttttctccttagtcttaatctccactaaacatgtataaatgtttgacatggcacatgtacataaccaattagatggaattggacaagtaacattcgaacatgagctacaattagcatagcataaagcttaaataaggcagtaaagtagtaattaaaccgaatgaaccctaggcctacttggaatgtctgtttctggtccaaaacggtgtaaaatactggcctatatcatttttcagttggactgaaaaacacccttggagaagttgtatctcggattataattcggcatggtatgcccattaccataaaaaaaataatctcataacacgcaaaagggaaaataagttggccgattaagtgctctccgcccagcaccgacgccagcctcttctttgcccatgcccccacagccaaggctccacatcacgaccatcttcttcttccagatgccaccacctcctcctctcccaggatctgctttctctcatgcgcaccggatccgctaccttctccgccctgttgccgttgccagtgctcctcagcacgcgttgccttcctcaccgcaccaccccatcaacaagcttagtcttttccttgaggtcgatggcaccctctccagtgtccttatgagttttgagttgttggcatcatcttggagttgcattgtgcctccacagctcagtgataacttgtgcttgccacttctcttccagttcaaatacatattccaaaattttcaattaccgtgttgatgattcttgtatatcttctacttaatccaaactttcttgttccaattcgatgttccatttatgttttgatgaatagcgatgtctcgaactgaattgaccattcgcttatccagttctttatgagagaaaactttcacttttgtgccttctcccaaatagctcagctagggatttccttttcaccggtattcaatttttttttgggtaaccgaagttataaatgattttatttatttttggactagaaaagaaaacccgaaacattcaagcctatatctcaaagtgagccacgtgctataaataaaaatttcaagactgaaataaaaaagtttacgttctttgcgggaaactattttaatccctcaaggggatatccactcgttctttgcatgtcacttaaatggttatgaaaaaaattaaaaaaaattgagaatgtgtattaacatgtgatataacactccacaaacatgtaagttcaaattcaacttctatatctcgtaacgaaaaaaaaattaaaccgcagctagttaacgtatattcagagtcaaatttgttttttcgttgttagatttagaagttgaatttttacttgcatgtttgtggagtgatatatcacatgttaatacatcttctcaattattttcattttttttcataaccatttgagtaaaatgcaaacaacgaggggatatcctctcgagggatcaaaatcatcttcccttatttgctgttggatataaaagatacagtacggttgttgcacaccataaaagaattggtaattaactatggaacactaggccattattttattatttttatgagattttagaaagaaaaatttgcccctagggctagaagcttgtattggaaactttgacgacgaagtcgaaatgatctttcttgaaaacaaaagcttgacgacgtcgagtgtattgcagacttgcagtgtgccgatccttaatacccaatccaagatgctgtctttttaattatgagtagaggaatcaagtcagaaattaggcatgtgatagcatcgtagtatcttaggtcttaaggcagtacgtacacaggtagctgctggctaccgcgttatcgcatctgttggtagggacgacagtattgaaaggcagctagtgattgactgctaattattcctgacgaaattacgataggcatactgttcaattcaacaactgctatacatatatatgcatcaaattttataagtatatatacgtacgtgtatgtatatgaaaagtatatgcatgaatgtatgcggcgatccagtcaataagtctctggatccgtgtggccgcggcctgcaaattgcaaattctaattcgtcacagagaccgaatctgattcgaatttggaacacgctcctgacgcattcgacgattggagacgaaaccaccgtgcaatttgacgcaatcaaagcgaactgcgagtattactactatgcaaggaagtttcagtaatatatattcagtctactgtagctttctggtccatattttccttgctctggatcttcaaatggttcatacagcttttacgctttaatttgaccttcactagctaatgctgttctgaacctcacagatttctgcattattatctcctcttggatcagttagttttcgtcagaaagaaagaacagcgcattttcttcagctgaataggtcaatcaacgctcgctacagtgtaataatacaaattaaacctcacaagaagcttctataaatacatgcaatgagtggtttcgtgatcattcattcagagcaacagaaaagatcaaggtgaacacatcagagagctagatcatcagcagatcgatcaagaaaaaacacatttcgtcatcgatctgcaggacgaacagtatgccgagtgttcaggagatcagcgtccacagggtggccaagatcgagccgacgacgccgacgacggtggcgaacgcggtgaagacgccggcgccgcctgcaggcggcggcattgacgcggcagcggcggggtacatcgccaagatgaagcggcggtgggcggcggagtcggcggcggcggcggctgcatcgtcgtcgtcgtcgactcgtgctactgcgaaaaagcgttagagattaaggaaatcaaggattatattgcatgcaacacatagatctacatgcatggatggatgaaagttaattagtttttggtgttaattttcattgacaggttgtttccgctgattgtttgttgttattgattgattaattgactggattattgtacgtagcttacttgttacaaacaaggacgttgaggtgtatatatgtttcttattattaatataatataaagcctaaacatgtgtatatatgttc

SEQ ID NO: 3967 - DNA, 10204 bp, Oryza sativa
cggccagccagcagtggatgtggaggatgtgtgaggggagtgggactaggagtaggggatggcgattgggaaattagggtttagattttataatactcacttattgggccaaccgggcttgtattgttgaaatgggctatattttaagatatatcttatacctcggggccctgccgggtcacccacggcccacgggtggctaacgatccccgcccccatccccgctcacccgccggcgaaaattgctccccaccccggccctaacggggaaattgccaccctactccttctcttcccgacaagcagaggcccttgtggctccctccttagcatggcaactccctctcatcttcatggagctggccatctagagctcaagaatgtccagatcttatggtcatgagcttaggggcaaacacctccctctccttggtgagcagagggctgctctaccatgacatacacaggctgctatagatccattgggctggcgggctggctgcccccaagggtagaaaccattgatcaaggtcttggcaaacaatttccccgcaaaaaaaagtctcggcaaacaatgacctcctccagcagcctcttcatgcatcttctaagctagtgagttgtagattaaatgggatctatgcatatgtgtgtttgtgttggtcttgggtgttattttttatgaaattcgtgacttgtaaagtgccattattggatatacattttgtgcatttttttcaacttgatgaaatttgtgacttgtttagaattgattgtgtgttgtgttagtttatggatgagcaattgaaattttatttcatttttatccgatttatggtttaaagttatgggaacaacagatcaaaaatgcctcgaaaaggatagcaatgcctttgatctagctcaaagcatcggctcgatttttcattctctcatgaaagcaccatcaattaatctattctggttctacaactgacactactacattatcattgctgtttacacatggaatcgacactgacaacgatctcaaacaggcactgataaccttgtctagtcctgttcagtgattccccatatttgaatgtatttgaggtccacacctccataagtatgaaattatggggctgtttggttcactccctcattttaccaaactttgccatactttttaagacatatgtttgtttcacttctaaacttgtggcatgccacagttttttaattcaaaggcccacatgtcatacaaccattttttagccaaaccatgtttaaggtgtggccattaatttataagccacatatttagctaggtttggtaagaaggtttggcaatgtttgggagggaaccaaacaacccctatatattccccttcgaatcccctcaatcctcttttgaatgagattaaccgaacaagctctggacacgtcaagcaaactgtgcatgcatgcagttactcaaacagccaaattagcttagcaaaagtacttagtaaatctgcggtgattaattctatcttactataaagttataatccactaactcctaaatcttaacatgcaaagatgacacatcatcgttcactaacaagttgacacatcatcatccacgaacaaccaatacatttaacatcatgcaaacatgctatattatctataatttaaaatttattatattttagagcttttaaaatgaaagcatgttaaatcatcatcccccataattcacataatatttcaatatatatcttcattattttttataatatcttatgtacctatgtaagttcatcctcacttgattaatgctatttctctcttctctaattaatccatatcacatcaattgattttagtgcttatgtaagtttatgttgtttagctatcttacatattatttttacttattattttcatactgaattctcgcagcaacgcgcggggtttcacctagttattagagaggtgaatagttaatagagagatttcacccaggtgatgattaatccctggatcaatcacaataatgcatacatgcaggaatctcgatatatgatggccgtcgctctcgccgtggaccggatcggacgacgggaatcaaacgtgatgtacgcaaggtttcccatggaatcaatttaagctaataaaatcggttgcttgtgttgctcacatcgctccacgtctatagcgtctatagctatctcgatcgcctgcgtatgtttgatagcgttacgttcccagcatcgatcatcgatcgtcagcattcatgccacagcatcaatatatctcctcctccttctaatgaatgatatgtaatccttctgtgcgttcacgaaaaaaaaaaagagcatcggtcatattcagtctctgagtctcaagatgtcatctgacgcaaaggagaagcaccaggtcccttctacacctggatcatgaaattaaggttcaggtacagtttcagctaacttttgtacagtttgtatagtcagaattgcagacagaaggtcgtacgcaattgcttctcttcagatatggttgtgtttagttcagcgcaaagtttagattttagttaaaattgaagatgatgtgactgaaaagttgtgtgtgtatgacagattaatgtgataaaaaagaactgaagtttgaatccatatgaccacctgtgtgattagtctggagagaatcgtcaggtaacaatgttcctagcttgactctggcatgacttgacctgctgcctggtcatgcatgttatccagatttcagaaaatttatcgtcagtagatgtacaggtaacttcacaataaataagaagtatttggagatattatattttcttgtatataaattgatatctccaggtatttgaggtatcaaaattcttagtataaaatttatgtaacttgtggtgatttttttaatgattgtaaaatttctttcagttgtaaaggccggactgtattgagaaatgaaacatatacctcagattactcttcagtaggataaaaattcatagttccatctaattaactccattagtttctggattctgataggcgaaccagtactttatcaatacattaaaatcattatatattgatctgttcataagtcacgagtaacatgtgtgacaaaatatctacggcatggaaaatactcagttcgttgcagccgcattgtaaaagctgctttagttttgttttataatcacagggaatttctgatggaagtgttcatttctttaatttaattaatcaccgtcattatattcctgccgcatgatctctgcgttgtatgtaattaattactttgcaaatcattaacgtcaagtcgatagatatataagctgttatatattgcggtgtacatgcatggaatatatctctcctgccaaattagtttggtaatgagacctaatcagccataataattgacacgattaggcatccatgactgcgactactctaatcaatctctcgaaaaagtacaaggggctagcttatcatcatctcacgaatatatcaccactaatcgcacctggtaattccacatggcacaagctaattaacgttaattctttctctctacagttgtcaagattttgaaatatttaatttagagctctcgagaaggtaccatatttaacaccacttttaacaaattaacaaatgccattatatagtagtacttttgtaaaggccgtaaaaattatagtgtgattattaatgggcattattaatcgtgcatcattcgtcaattcattctgaagagttaggtaggctaactccaattaaaaagattatggctatgcctatgtacacccatattggtgtaaatttaatacattataaaaaaattaaacaagattaaccttacaaccttcggccgaccccaaaaaaaaaaacaaaatcttacgatgaaaaaaaggaaatatatgtggtggttttatatactatctccatcccataaaaaaagttcatttttcagtttttaaatacaatatttgactcttcgtcttatttaaattttttattttatgattaataataataataatattattattattattagatgataaaacataaatggtactttgtgtgtgactaatttttttagtttcttttaaaaaaataaaataagattgacgatcaaacgtagggcacagacctaaaaataaatttatttttagacggaggtcgtatgttccatggttccaccatcactaatttcccgtgattaatatgtaagtacgtctgtttttcttaatataagggagaacatataatattttttttgtggggaacatataatatttaacattcatctcattacaacttattacttcttttttgaacgcagaaaagaattacatgcacatcaatatattatattagaagaagagtttaattacatatcgcaaccagtcagaggaccattgccgggggacaagaagaaaagaaattacagcttattactgattatcttgggtcagaataggcgcagctgatctcagattggagagctcacagtacggggatcgatgctgccgcagacgacgatgacaaccacgatgaaaatgaaaactgaaaccacaaatttggtatcaggaaattaagatttacagaatcgatcttactgttcaagctagcacctcatgtcaactgctcaaaattttttataacttaaaccaatatatctgctgccaattatttggcacacttgcacgttgcagacgcatcaggtaccttccacacgtagggcatgaacgcaagctagatcattaagagactcgattaatattgataggatcatatcgatctagtcttctcgatctctccgtgaatgcaatggagtccatatgaatagctagctagatgcaatactggagcgagcaggaacaatgactgcttctcttgtctggatttttgatcatcttcatcttttggaaagtctcaaactgtctagaagaattttattaggtaccaagctagatcataactctccatgactttgatggccagagacaggtcttaacttgagcaggtggctagattggcttactttcgattgatcgacccattcacaaaaaggaaaactttatttttaaaaataatatatttatttgtgttaaaattatatacttaataaaataacacctttatcattacctttttttctcaagaaatatgctcaataacatccaagatatataagtagagaaattttgcggtccttaagaaagtatatgtaagtattaataaaaattttacactaaaaattttggtacctcgagatatctaatatatatttggagatatatataaaatatggtatatcccggtatcttcttaagaatgataaaattcctgtataagtatagcataggagcctctaggcttgcatgcatgtcagtgactcatgcagcttatttctcatttttcagtgttatgcgcgtattataagcaattcgctcccaaagtcttatgttacttgaaaaaacattctgaaaatatcagtcaaaacattttcatagcaaaattaccaatacaattctagacaatatcattggccaagtaattaagatagttaaactgcactcttgggtgaggtacatttttttcaactgatatagcacgtaatatagacattccatacatagaaaacgatagtacctcaaagtatttactcaaaaactgcgaaaagggctcatcatgcatgctagacatagagcccaaccagatttgctaatagctagaaattaatggataacgtgccaacagtttctttcgataataaaaatctcaattcagcctctacatttaagatgatgtgcatatgtatccaaccatcttttggctgtgtacatccagcttagatgtagaggctgggtttttaatccattttctaaaagaaatatatccaactatcgtgccaacaattgattaataatgtgtaatgtttgtattgaaaattgtacaatttcttacagtaggcaacctagctagaaaatcctcacaaaaaaaatttaatttacagtcgtccttatccttatataagcactaactatagcctatgaagttcagtctctgaaaattaaaaatctcttgaaaacacagtcaacatatagcaagctattcatatatttcaggtaaatattttacaacacaagcgcccatcgatcaggggctaattattttccccatatttatgcatgcatacatccgtatatacgtacgtaatacagtgcaaatatcacatcatgcagaccgatcttaacacttcaattaatttccatgatcgagctcgaaactaatttggactaattttggccaaagaacatcctcttcctgtccctgatgtagttttcagacctcttgttgatgtcctctatcgacacgacgcccggctgcttcctgccggcgacggcgccgccgctgccatggtcgccgccggtagccgccggtcgccttggtgctggagcttttggagggttgttacctttgccggcgccgtacaccggcggctttgtcaggatgttgaagacgaggtccagcttgtccaccttctgaaccctcacctcgctgtcggagggtgcggcggcggccatggcggcgcggcgaaacatcgtcgtcgccgtcgtctgaatttctgtgtgtttgaattgaattggctagcttagctaggagacagtgatgtgttcttgttctaagcttgctcttattagcttagctatctctgatggcaatggctgatctaccaatggctcaatttatagggagctgcacatgttgctagctagctggtaggaatgttctactttttcttttatgggattctatggactgtccatcactgtgagagcaagtggcaccatttcccatttctctgaactatgtaaaggaggaagaggtttgtacatattctcatttgtagtctgaaattgttggtatatgctattggaattaattaagtttgtgatggtaaggtggtggcgattaataaacgcgtgggcatctaagtggagcctctccttggcagaaatatcgagtatcaattccaaaagcaaaatcgacacatgggtattgaaggaagtcccacggaagtttggggaaaatgcaacccataataagagaccgcggacaacttggttcctcagcggtcctatcacttctttgtatatagtcaaaacccactatccataaatcagttttcatgtttagccaagtcatcaacactcttggccattagattgccatatattcacacactatctgtaaagcaaccttcacatatagccacatcatcatgtatttgcttagtatctattgttagatgatagtcttcgtctctagtttatccagggccacctctatatttttaagagccctaggcaaactcggtgataaaaatccttaaggccaaatataagtttacttgtaatatatactttataaatcatgtatcatctaaagtgacacaaataagtaatactaacaaaataaacacataatattatggagtaaattaaacaagaagaacaaaacaagatcttagcctaatttttggactaaatagatgaaaaaaaaataaaataaactctagtcatgatgaggtaaggtgtggccgcgtgggattcaggcataaggatggacgatgacaccctctgctagctaggttggttggtgataagcctgagccctaggcggtcgcacaaccgacctaagccctcgagccagcccagccctgagtttatctaaaggttatgtctcatgctacaattaatgtttagtgagttaaccatttatggcgtaataggtttatttttttcgagtacaagtcggaccatacacaacacccggctggtgccaaatctaaaactacaaacagattccaacacaatgagcttaaccatctaaggcccaattcgcatatggggcttcatattatttcctaaaagtaagacaaattacatataaaaaaatattatttcttacctaataatattgtttgtttttttaactgaaaaggagcatctacacagtgaaaaaaaaactctatgagaacaatcaatatgaaaagcttaaagagatttgaatttatatttaaactttgaagttaaagatttgaattttccagtagacattgctcttattgctttcttactgttagaaatttaaacttctatttaaaagataagaacttccaaaacatttaatcagactatatatgaaaccaaaagcaagagcttctattgttaatatatttaatcacaagcgttaacgctatctacattctggctacgatgttagaaagccattctatttctctataaccaaatgttctaccacgtcataaaaaaagagttttaaaattccaactcttatgtgttttttttttgctaaaaaggatatataatatctgttcttaaatatatgtttattgtataaagagaaatttactgacatactacctcaatccatataaaaaagaacagagggagaacaaaatactagtattgaactttaacaaaaaagaaagaacctctatttagtttgttaggttgtcttaattgactcatgatctttaatctctcaaaaggaaatgtgtaccacgttgcgacttgatcacgaaggtatgagaagaaactctctaatctagtaaagttatataaagaaaaggtgttgcccttgttgtaagatataagttcattaactgtttagacatttttacattttttttagcatatgagtacgttgcatatcatttccttaataaagagagattttagaaagttcggacaagtaccttgtaggtaagagcctagctaccaccgcttccctttcttttgttttctttactccttaattttaaggtaatgaaaacattatttggcctctatacctacatatattctacttttgatttattaatatagaaaaaagccaaaaagtcctatctttctaaaaacaaaaagagcctagctagcactaactaacatgcatgttatcatcaatcaacaagacaacaggggagaaaatatgttttctcaacaactcaaagtctaaagtcagaaagaacagaatcttgttcttccgagtgtctgtctttacttcctgctttggggaaacaggtgagcacccaacatacccagaaattaaaagaataataaaagctcgatcgtaccaaattgcatgatcgaattaaatcgatgctagttgatcgattaatttttctccgacgaactagatcaggctctgcaacaatatttatctgaacttccttttttcatcccaagtacaatttcagatacacatcaatcagaatttcagataactcattgagaaaagacaagtgtactggtcaattaactagctgaaaaccataaatttcaggtcatatatataactcgttaatatactttataaacaactccatctggaagctagatatacatattcatgagttctactctcatggaatacttacatattatatgcatttctaattaatacataataactaataagtagagcatcttcttatgtagatatgtagctgtatttatactaaatattacatgataatattgcactgatcgatcaactgataatattaatctgagtttactgctcattcgtctccttgattaaactgcctcttcttgtcctcgatgtacttgctgatgaactccttggtgaccactgatccatgcggccagctcgccggcgccggcgccggctgcctactgttgctgctcccggcgaagccggcggcgacggcagtggtcgccggcctcgccttcaccgtcgtcgccctccggttggcgccgtagacggagggcttggtgacgaggttgtagaccggggcgatcttctccaccttctggacatccacctcgccattgccagaagaggagttcttggcacgagccatggcgtttctaatttctttctttcttggctcactaattgtgactgtaattgaattgtgttgttgctgaagctgagctttgcctgcttgattgctgccatgggagtgagtggtgagctcaatttataggcctgcagctgcaactgaattcaattgagtgagctactgcacctatccctctatggtcactgactcactggtcagtgtgagcagtgaccaatcactagtacagaaatagccatctctgccggttcactttggttcggacggaaaaatg

SEQ ID NO: 3968 - DNA, 803 bp, Oryza sativa
gtatgaaaatttttagtgcaaaccgaaggtatcaaaatttacgctagaaaatatagtaccttccagtacgtccttaaggattgtaaaatcactcaaagaaataaagtgatgcggtaattggggtgtgccaatctttcggtgagttgcagaaaaccctaattaatgcattcttgcttccaatagcacaaaaccccccttatcccctctctctagttgtcatgctcatgcttggtcgccggcgccgtgaacgtctggtaggtcacggtgccggcgccggggaagacctcggcggcgcggcaatggcacgccaggccaagcggctccagggcttcggccaccggcgtgcagagcgacgacgcggcgctggaggtgtgggagatggagaccgagacggtggccgggcggaacgcggcgacggcgcggcggatggcggcgagcgcggcggcggcgtcgtcggtggcgcactcgaagctggcgtagcagtggccgtcctccggcgtgacgtgcacggtggcgtagcgcgcgccgtcgagcgcgttcatggagtagccgcacggcgcgaacgcgtaggcgcacaccagggagcgcgggtcattctcgtccaccacgccgccgatccccgacgccgccgtcatctcgtcgccgatggcgtggctggtccggccgtcgccggggcgctggtagaaccgcgcggccatgccgcggtccagctccgtcatgcacacctccgccgtgagccgcgccgcgccatccgcgtcggatgacgacgccgacgacgacgccgagtagacgtgccacctgtg

SEQ ID NO: 3969 - DNA, 577 bp, Oryza sativa
caagtctttgatttcttaaaagcttttatcaagctttgttgagcctaaaacccaaagaagctattaaaaactttcagtcctcgcagactaagtagaaaaaatcaaacaaggcaatgatagaccaagtaagcaaattaaattgataaaaaatcacactccattattatgataatagcccccgactgacaacggcaagaagaaaacttgatgttgacagtcaagatagggaagtacaatgataaacttaagcgtagaaacgccgaagatgttcaatgttccaagagttgtcgacaagagtaccgtcttcgcgcttgagtcgataagaacctggccgggtgacttcagagataataaatggcccttcccatagaggagataacttgtgccgatctcgtgtagtttgaattttcctcaaaaccaggtcaccgactaaaaaggcacgagatcgaacgttgcgattatgatagcgccgcaacccttgtaaatatcgagccgactgaatcaaagctgcttcgcgggcttcttctaatcggtgcaagtcatccacccggtcctcttcgtagcgttcttcacggaa

SEQ ID NO: 3970 - DNA, 552 bp, Oryza sativa
ctggagttgaaattacacaagtaaatatttcttatctttatttgctttcattgtcaatgttcaattttgtaccatttaacccttgtcgatgctcactattgtttcatcaccttctacttgtctaggtatgacagggtgagaacaaagaaggtgaaagactgggggctagagcataatagatacattgatgaatggaggacagccggaaggaacgacaggtacatcgagactatacaccaaaatcatcttttatcagagtaccttcgttggctgcataggacatatagactgttcctccgccctacttggacggaagccgacatagaggatgaccgcgactccgatgaggggcggaatccctatgatgtccggactagagttggatatcaaatggagcacgccccacttagagacagagtcgtaagttttcttgcatttgtcaaagttatttccatttgcaccctagaccctaacatatatcttgtcacgctttcagtcgagagagctcctcaggagtgtgaatgaaatggggcatgccctccaagctccgag

SEQ ID NO: 3971 - DNA, 1222 bp, Oryza sativa
cccagagggggaaacttcagggcgtgacaatgtcgctcccgccatcgctgtttggcgctaccgcgcgagcagccgcgcgaacttcgccgccgctcggccatgcgtcgccgacagctcctctcgacgttttccccactgtcgctctcccagagaccccttcaacccccctcctttggccgccccgcctctttcctctagccgccggcctcccatccccttctatcgccgccgctctgcttccgccgctgccgcgcacaaccgcgcgccgtcgtcggccattccccgtcgattcctctcgcctccgccctcttggagctcccgtggccctccccgaaccgccgccttgaccgccggccttccttctcgtgcccgcgccgtgccacccatcccgccgccgcacggctgtcgtcgccggccgccgtcgcgccgcctccccatcatccgagccggtggatggaaccgcctcgaccccctctcgcctccagtgcccgcatccccctccgatttgccgccgctcgccggaacccgtcggctgccgtgcaccgtccgatctccgggcgcgctcccctcccctctcgtcatgccagcgtggacgccacctcagcccccgggcccgcttgaccgagtcaagccggcgcccagtcagcctcccccttcatccctttcccccgtgcgcgcggtccatggcgagcccaatggctacgcgtgggtccgccgctatcccgtccaaccggtgcacaccatgtgagccgcatccaccgattcaaggcaacgcgtcccgcgtgcgcccattcttccgtggaccgtctcaccgacaagcgggccccactcgggaccccgcgaagtgaacttggtccaccggaccgcctctctctccccacccgggctctaatgggccaatctcctttgggccacaccaatgccacccgaaacaagtctaatatatatccctccttgatttcctttccacccttgttccataaatcattttcctatattccaaaattccatgaatcattttccttggtcccgcatgtcaatgactgtcaataatattcttgagaatattatttctataaatttcaaaaatcaatttccccttgttccacaaaatatcttcccttgtccagaaattccaattaatcttccaaaattcatatctcgcgtaattccgattgactccgttccacttccagtttttctctaaaattgagatctattt

SEQ ID NO: 3972 - DNA, 517 bp, Oryza sativa
ttattaaatttacctagctatccacaggctgatcaatctggtcgtgcgggaagcaagcagcccgtaagaaacgcggcatgctttaaaaaaaatatatggaaaaatcggagcgacggagccttcgatactcaccgagacgaacgccgggtagaagacgacctgcgcgcggcccccgaggacgtcgacggcggcgtcgtggatgccctggagccgcttgacggccttctccaccgagcccgcgcacgcggcgcacgtcatcccggacacctcgaacaccgccaccttctcctcctcctccgcccccacggccgccgcctccagatcgccgtcgcctcctcctcctcctccttcccctccctctccggcgaccgcggcgtagcaatgtttgtgcaccaacatggctaagccacatcccacgtgcgtgggaggctgggcagctcagcacgactgcacgaggttggctcagcccgcactgtccacgcatagtgatgggtaccgagctcgaattcgccctata

SEQ ID NO: 3973 - DNA, 2819 bp, Oryza sativa
tcaggcagaagtggaggtaggtatgtgccgtcccgtcaggaggatgttcggaggacgaccgtgcaaatctccgtccatttatgaaaagaagaaaagtccagtttggaaagggaggggtgcatgtggtatccccttgaagtataaaaggaggaccttgcccatagagaaaggggttggttgattcttcccaaattcagagccttgaacgagggagaggtcggctcacactttgtagctccttcatacacagatccaccaaaacacaggagtagggtattacgcttctcagcggcccgaacctgtatacatcgcccgtgtctcgcgtttcttcctggcggacgatctttccacataccgagagagcttgagatttcaccctgagcccccggccgaaccggcaaaggggggcctgtgcggtctcccggtgaggagcgaggacttctgcttaggctgtttcctaagcagaaggtcgtaggtttcacgttgcaaacggtgggagaaaccaccatcgcaatttgccctccccgggcaacgcacggcgggcggtcggactggtcaaaagtgagggcaacttccgaccaccgcgcccggcgcgtcgcctcatgagtaggggcagcggccagaagctctcgcttcatggccttgaggctccgggcgaaaaacgtgcgcacacgctcctccatcgacagtggctatggtagccccaggctcttggaaacctaggtcattatcgccatcatcgatgtcctcggcgggggccttctgcttggcctcacttcgccgacggccggaaggaaccgccggggacttgccttcccggcgctcctgcctcctctcctcctcccacttccttgtccgctcagccaagcttttgactgcgcgacagtccgcaaggtcatggagggaggtgttgtggacggtcaccacttgccggtagggcgctccctgctgggaacgctggcctccttctttttgtcgctcgcaggcctcccctttcgggtggcccgtgaagcgccctcgacggcgaggacatgaccctcgtagtcggaacggactgacctcttcttcctcctcctgtcacgccgccctgactgagcggcggatccgggggcggccgaagctgccactccggaaccggaggggttccaagtccaggcctcctccttgcgagccactcggtccgcgagctgaaaaagctctgcggtagtctggggctctttggaggcgatcttttcgagcatgcggttgtgccgcacaccccccctgaacgcgtagattactgcgtgtgcagggatgcatggtatggtattgcggacttgacaaaaccgctgaatgtacgattgaagcgactcatcgtcccttcgctgtacagcgtgcaagtccgcttcctcaccggggcgcggatacgtgccttggaagttcatggtgaactgctggcacaaatcctcccaggagtggacagacgcgggtggcaagttcattagccaaccccgtgcttgccccttcagggccatgggaaagaaattcgccatgaccctgtcgtcacccccggcggcctcaatcccggtcgtgtagacctggagaaactcggcggggttgacgctgccatcatatttttcggcgatggtgggccggaaccttgggggccaacggacattccgaagactcaccacgaaggctctacagccaacaccaccaaccgggggcacggagggctgattcccacgtccgtgtcgaggtgacactctagacgaggaagcgccttccattgcgtgggcagcacttcggtcattacgccggcgctcgaggctggcgcgggcgccctgctccctacgcagatcttctcgggtcgaaggagtcgatgagggagtggctactgaacggcgaacagcggctgctgctcgtcgtgcccttcgtcttgacgacgcggagccagtggtagcagcaccagaggtcttggtggcggaggaccgcccaccagcatctaggcgctgccgcgccgtcatgaccaatttggccacgtcgtccagccatcgttgggctggagattccgggtcagggacgacaggcgggtggcgtaagagcgcgcccgcagcttggagcgcgccctggggcgtgctgccgtcgccgtagacgaggaggcgacgctccccatctcgccgttctcctccatcgcccgcgatcggtgaagccgcggatctttcgaccctttcgagcgcctccccctgcttaggactttggcgaggagggggcggtggagtacgagctcgacggcgtggattcggctccccgtcgtcgccactcacactgggagagaggtcgggtgcctttgcttgctcagccatgaggctgatcaagaaaaacttgacgcacccggaaaagtgcgagagctcagaaaacactcgctgagccccctacctggcgcgccagatgacggagctcgtggcccctcaccgggagaccgcacaggcccccctttgccggttcggccgggggctcagggtgagatctcaagctctcgctgtagatgacggaaagatcgccacctctcaagagaacatgaaacacaagcgatgtatacaggttcgggccgctgagaagcgtaataccctactcctgtgttttggtggatctgtgtatggaggagctacaaagtgtgagccgacctctccctcgttctaggctctgaatctggaaagaatcaaccaacccctttctctatgggcaaggtcctccttttatactcaaggggataccacatgcacccctccctttccaaactggactttttttcttttcataaatggacggagatttgc

SEQ ID NO: 3974 - DNA, 1475 bp, Oryza sativa
cgaaagtgagcataatcggatgaagaactgcaagaagaaggattgtcaccatcccagtatttccaggtggtaaccaaagacagcgcactgagccacttcagatcaccggatcttctgttgtgcatcaagagttcctgccccaagaagatgaacacaatgcagacagcaacactagcaatactaatgatgatgataccaccaacaaccatggttcttgccccattagtgaccactcgaataaagcgtgcaatgtcagtagcattcaccaagatgtcaacgatagtatcaatgttggaacccagaatgacaaccttagcaatttcgacactgagaaagactccaatggtgatagcaactatggtaccactgatgccaatgttagcaaggattcccaaccaccaattccaactccaagtcaaaatgatcgtccccagatggacagctcagtaaagaagacgttgatttgttacaactgcaaagaaccaggtcatttctctagagattgtccacagccgaagcgtaacctgcgccatcactccggccattatgcaagaagaagacaagtcactcgccttgtggtcactggagcaaacgctgtacctgtgaggcctcatgttaattctaacccatagtagaaacaatgtaccgatgttaagcaccttccctttttgtttaagacagtgccttgtattcatgaaatatgggagaaatttgtaataaaaacaagttctaagaggattcttttggaagatgcggatatgtgatcatgtgtataattgtttactgacaaaggagacctagggtctcgtgccagaggaactatattctaacctcgagctaataaccaacctgaggatggaaaagaaaatcaagtgattaaccaaagagacatttgtttggactaagagtttcagatgtgtctttttcggatcgaaggcaatgacagtcagtatagcttttggcgaaacacttcaaggtttcactgaaaggtagcagaccaaaggaccacatcgtcaccagaagcatccacaactctcggagagaagagtacttggttggcaaagtttaaaaggtgattgatagaagataccagcaaaggtgtttattaccgggcaaggaagtaggtcgaaaggtgattgataagagaaatttgaaaagaacacatcagggttgaatgtgtaaaggaatactttgaatgctaaatgatgacaaacatggtatcctagtaatgacaagctagtgttgacgcatgacatgaagtggtaacttgtatgaggttgactccaaagatatgagttataagaagttctggaactgaagccccatcttccaatgccgcagcccagtcgaagtcagctagaggtgcaaccagggaaaagtcaggtgaagagaagattccatctgcaacaggagattgagccaagcagtccagagtggagaagttttgctaggcaagtttgttataaaagatgcga

SEQ ID NO: 3975 - DNA, 3341 bp, Oryza sativa
gagttccggttcgccgccgccgtcgctccggacttcctccccactcggcgtcacctccatcggcttcgccgtgttcccgtcgacctcgtccgcgccttcgcttcgcccgccgaccgccggagctccgtcgtcctcgccgtcccgaaccgcgccgccgccttcttccgcttcggccgccgttcccgtcgtcgccgtcgaccggggtgagccgaagaccgttccgttcgcttcccccttccctcctctctctcgggtgccgctccgccgcgccggtggtcgccggcggtgaccatcggggcgcgggcgcgttcccctcccgtcggccgtgccggcgaggccgccttcgggcgcgccctcgcggctgccaagtgggcccggccgtcagccgcccgcgcccgcgggtgcggctgacgcgtgggacccacggcgccgaccgccgcaaaacgcgtgctcccggtccaccgtggaccgagaggctgacgcgtgggccccactcccgtggacccggtccgcgcgccctctccctcggctgacgcaataaatgcgtttttaattaaaatttaaatgaagaaattcgtaaatatccatttaaagagcatataaacttcaaatggccatatcttggccatttgaactcggaattggaccgttcaagtctctaatttttccttaagaagtcaagaacccatttttgtgctttgtttctgctgttatgtggagtttattagagtaaaagccttttcttttccgttggtcgtgtagacgctgcagcttcggaagatccgctcttcgtggaagtcgaagccgtcggttgggaaagcgagcaaggcaagtcacatcatctttgaacatattgaatcccagtttgtaaaattatgttgatttaaattattgcattatcgctttatttaaattcccgcgttatcactgttttatttagccatgcctatttacctttgttatgaccatattattattgttattgttattattattaccttgttcaccctagattaaacaaaacctcaactagtggacactctactcgtggtatccctagtttaaatttaggtagatgcttcgcaatttaattaggtaacattaggtggttttataactttagacttgggaaatattcatatcacctggacactgtggaattgttggattattgtggaattggcttcacaccgccccctctattcaaaatcccctaaaatggttttaggctgggctcggggtgcatggttttgatggtagcacctcggccatataaggaccggtcttcgggcctctgttgcaaagcactaccgtacttccacatgtctaatgggtaaggcttagtttgtggctcagtctagtcataaacaaaagtacacggattggagatggatgaagtcgggtgtcgatggacattctccagggcaaatgaaggctacacgagctgcggcccggtagtcgagatgtcatatggcagagggttggtgccctgctgctaggggctcagttctgcctgcctgtcccgggtatcccggccgtaggtgggattgggtcggtactcttgtctaaggctaggatgggttggaaactatgtcacgtcttccgtctgtataccgtggtggtatgtggcacgtggttacacgtgaggaagatgtgtcttgtgggtaaagatgtacacctctgatcagagtataatctattcgaatagccgagccctcggttatgggcaagccgagcaatgtacccaagttagtgttttaattcttaaaacctgcttaacaactaaaatatggaatggttggcctgggttggcttaggacgagctgggacccagggtcgggttgccagttcggtctgaatcatcgtaggccttgggttaaggcaggttcgtgtgggttcacggccttgattaataatattgtttagttctaggatcgtgtttacaaaatagcttgagcaactaaatgtctttaaatgctgtttactgcaaccctaacccctctatggtataattcccttgtactcccttgcatttattctgcatttgtgggtgtgtcttgttgagtacggtggttgtactcagtcttgctcaatttttcccaagcccagaagaggagctccttgaagatgaaggctttggtgtctagctcgtgcctgccgtcaagcgcctgtggtcgtcgccctagtcttccgctgtttctcgtttgtctctgtgtgtgctgggccttcgtcgcccatgtaataaattaactatttacgcttccgcttgttaaactctgaattgtatcaacttttggtgtaccttgcctcctgggacaaggattaatgcacgcacgtaaggaatgcccgttgggttatttccggtcgtgacaggaatcctgcgcctcgatcatcacagtggtggcgatgagggcagccccccgctcctcctccacctctcgtgcgatctccgccagtgccgtcttgcgggcctcaagatctgagacgtgccggcggtgtgccttgcggcccgcttctaccatggcctccaccgagcgccgcccctcctcgacacgcgcccatgcggcgtcgagctccgcacgctccgcctgcagggcctcacttgggcgctgaacccatctagcaccgcggtgtttgcggcggccaaggcctgcagaaggggctcggcgctcagcggggcgacagaagacgaggggaagagctgccttgaagaagacgccgcgcggctcggcccgccaatggacgcgccggcctcatcgcgggccacccccggacctgtttggtcctgggcgtcgcctgaaggggtgggcccaagcgaggcgtccgcggcctcgtcgtgaactgcctcggaagccgccatcgcctcagcccggcgaacccgggcggcctcctcccgagcggcttcttcggcctggcgaacccgggcggcctcctcccgagcggcttcctcggcttggcgggcccgggcggcctcctcccgagcggtatcctctgcatggcgagcccgagcggcttcccgggcggcctcttcagcttcccgtaggcggtctgcggcctctcgccggtcagattcccgcctccgtgcctctgcggccgccggatcttcggcctcggactggccggacttgggatggtgggaggaacgcgatgggatatcactgaagcagaaagaaaaaccagaaggcaaacaagatgggtaagagaaaacttgcttttgggatagaagaaaagacggtcgcaatgagcgtgggacgaacctgcgagggggtcggttaaatgacccccttgaaggggaaattaggtttccccgggatggttctgtctcccccatcttgcgcagc

SEQ ID NO: 3976 - DNA, 1189 bp, Oryza sativa
accctcagtcggatggccagactgagagggttaatcagtgcctggagatttatctcagatgttttacacatgcaactccttctaagtgggcagtgtggcttcatttagctgaattctggtataatactgcattccactcagcactgaatacatctccctttgaagttctatatggccacccacccaggtattttggaattcattcagaggattgtgctattcctgaactacaagtttggctcaaggagcgtagactgatgcattcattgattcagcagcaccttaaccgagcccagcaacacatgaaaaatatggctgacaagaaacgcagtttcagatcttttgaattgggtgactgggtttatattaagttacagccctatgttcagtcttctgtcgcagctagggctaatcataagcttgcattcagatattttggccctttccaagttattcagaagtttggctctgtggcatacaagctccaacttcccactactagttctatccaccctgtgttccatgtgtcccagcttaaggcagccaagggtttccaaggagcattgcactccactctgccttcttctgatgatgctttccagtatcctatcatgctcctggataaccggctgattaagaaaggtaacaccaccgtttcccaggttttaatacagtggtctgatactgcagttgaagatgccacctgggaggaccttgaggatctccgggcgcgttttcctgaagctttggcttgggggcaagccactttccaaggggaagggattgtcaaggcgtcaggcgaggaggagccgagtgcaagcgccaagctgaagatgaagcctgtgccggatggtgagcaggaaggaggagaagaagacttgaggccggccagagtcattaggcctaatcgtaaatatgttgggccggaatgggccatgtaacctgtatcgctggcatgagctggcatctgtcttgtgagaggggaaggaagggagttggtagcgagagagagtataagaactgaggtttctaaattgtaagggacttttggcaatctggtggcgaatggcggcggcggctcaaccctgttgggttggagcaagattatcctagcaaaagattgcctaaacacatctctgttcttcctgagttgttcgaagttcttcccttttccttttcaatttcctta

SEQ ID NO: 3977 - DNA, 7712 bp, Oryza sativa
ttcctaaaagaatatttcaactataggattaaatcatatttttttctataaaatccctataaaataggcaataatatagagattttaaagaaaagttagctataattatctttaagtttatttcccacatttaatttctactgactaattaaatgaccatttacatatttttcctgtgatttacaactgttggttttacgctcactattatgccaaaatcttactacttcatgtgtttctatttctcaagtattttttttcatcgcgttttaaacgagcctttcactgctctccatacacagcacccgtgagcaaccggctactcctactctataattaatgagggtagagtatctgaagtgtccccccccccccgcacttttgtcctgttcgcggtcacgcctctacgtagtactacctaggtgtaggtatgtttgaggaggagtggattggggagattgggaatatacgtaaaacgaggtgagtcattagcgtatgattaattgagtattaaatattttaaattttaaaaatagattaatatgactttttaaagtaactttactatagaaaatttttataaaaaacgtttagtagtttggaaagcgtgcgcacggaaaacgaggtgctttctcaccctatatcacacacacgaacgcagctttactgtatagaccctctagtcaaagagcaactgaagttgcaacaccaacctccgaccctggaccaaacaacaatatggctaccacatcactagagggatgatgaagatgaaccatcaaaaaacctgcacaggctgcagggtcccctactccacaatccacaacgctcagttcaaggttcctccaggctttttcccctgtcacggcctctctcgtcgtcgtcgcttgcgtagctctgtaggagtacgcaagcacactcgaatactacaccaccaccatcggttgattgacatttgaccctgattgacgcctctgcgactgcactgatcgatcgatctctgacatgcaccgatcgacacgtccggatcatgatatcttttccctctcttcttgcatcgtctgatgaatccacaatattcatatccttgctataaagcgcggttgcaagcgtacgctgctgtcgctgtcgccattgttcttcatcttcgtcgtcgtcgtcgtcgtcgtcgtcctcgccgcttgcagtcgctgctgccgccgccgtcgccgccgatgcaccaccatccgtcacacgtctttactactaggtactgtagtgttgtagcagtgcgtgtcgtcttgcgacgagctttgtgttggaccacgacgccatgcttggctgtaagctctagcttggcatcgcgctaaccccttttttgttggcttgcgcggcggcgtcacgcccgtggcggtgctactgttcagctgcagggcggaggagcagcagctgggtggcatcggcacagctggataccacatcggagatggcgccatcttccctcctcatcatcttcttcctcctcccgacctcccgctcctccgcactagtaactcacgccactgtctcttccactgttgcattccaagaactgctcctttgtttgattcttgctgcattttgttttttgttttttttttgaaaaggtccgaatccgagctccaagtcgtcgagcaacctcaccgccggaggacaccttccgccgttcgccgtcgccgccgccgccgccgccggggtgagtttggttctttcttcttgctgattgattgattcttcggctgatgcaatgcgaccagcagcagcatggcgtaccggtggtgggcatggcggcgcaccaggggatggcggcggcaacggcggcggaccggttctgcctgccaaggatggcggcggcggcggcggccgcctcgcaggtggagaactggggcgactccggcgtcatcgtcagcagcccgttcaccgacgacacctccaccgacctcgacgacagcgccgacaagcaccacctccacgctctagtggtgccactgccaccagctacctcctctcgccgccgtctttcttggctggctccactcgtgtaatgcggtttctcgtgctactcccagggcggcggcgatggcggcgacgacgccggcgagcagcgaggcgcggattcctccgccgtgtccaaggaaagaagaggggatcagaaggtgcagtcattttgtgtcagaggggaaacggaatctgatctcatgagtgatcaatttggttgtgttcattctgaatatgatttgtccccgaatttgtgtgcagatgcagcggaggcttgcgcagaatcgcgaggcggcgcggaagagccggatgaggaagaaggtgatcgtctgaacctatacattatcgatcattcattcgattaatgggacaattacaatatctgttaaatatactagagcattaattgcttcggaatcaatgttgactgctgctgccgttgctgcaatgttctggaagtagatgctctgctgttacttgcatctttgttttgtggttattgatgatgactaaagacattgcgaattgctgtttgtcgtaggcatacattcaccagttggagagcagcaggtccaagctgatgcaccttgagcaggagctccaaagggcaagacagcaggtgagccctgcattgttcagcatacttatcaaatcgccttgcagaatctaatgtttgaagtctgaacagctcagtaacaaatacgcaaatgcaattgacgactatcctttacagggaatcttcattgcaactggaggctccggcgatcacgggcactcgatcggaggaaatggtggtgttttccacttgcttgatttctctgatctgtcatggcatctgcgcaaacatcgcaattctgattctgtgttgtgttgtgtttgcttctgcaggtacgttggcgttcgaccttgagtacgcgcggtggctggacgagcaccagcggcacatcaacgacctgcgggtggcgctgaacgcgcagatgagcgacgacgagctgtgcgagctcgtcgacgccgtgatgatgcactacgaccaggtgttccgcctcaagagcttcgccaccaagtccgacgtgttccacgtcctctccggcatgtggatgagccccgccgagcgcttcttcatgtggctcggcggcttccgctcgtcggagctcctcaaggttttgacacgatcgagtgatcacccacccaattcagcaacaagcaaagaatctgaagctaccattgaccgccattgttgatgatgttgtttgtgcaggttcttgccagccatcttgagccgctgacggatcagcagctgatgggcatctgcaacctgcagcagtcgtcgcagcaggccgaggacgcgctgtcgcaggggatggaggcgctgcagcagacgctgggggacacgttggtgtcggcggccgccaccgtggtcagcggcggcggcggcgccgacaacgtcaccaactacatgggacagatggccatcgccatggccaagctcaccacgctggagaacttcctccgtcaggtaattgaagcttcggaaaaacatcgacggcgaggcgaactgaattgctcattaccacagcgtgatgcgatgattgattgtgtgtaggctgatctgctgaggcatcagacgctgcagcagatgcaccggatcctgaccacgaggcaagcggcgcgggcgctgctcgtcatcagcgactacttctcgcggctccgggcgctgagctcgctgtggctggcgcggccgagggactagactgactaaagaggatcaatatcatttgcctgagttctgagttctgacgatggatggaggtgaacctgttttttgattgctgaatcctgagagagcgttaactgcgatcggcattgtaaaatcagttgctttggtgatgaagcagtagtagtaggagaatattttagattgggctcttgggcctgtaacgtgttgtagtgttagcgtagtaagaactaatccgcgtacaatgtcaaaaggagaagttttattacaggcctatttccaatctcggatgccgtcaaggaccaggtcattgcatctgatcggtgctacctgcgactttagcaggtttgtgcataagcccgttacttgaccgaaacagcggagtagctcagagaagacccttacgtcctctttgtctggatttatgaagacgaccgtctcgtcggtgtacatggatgtgcagaagcggacggctctacctcgcatcttgctaatcaccagtggatagtgggtcgccctaacgtagcctcttgccatggctgatcgcttctcccgggatcccatttgggatgatctttgaggtggaggtggataggaggcccgttatctagttctgcctcttatttttttggaaccctctattttgaaggtgaggaggtatatagccccatctcatcaagtcgaaagctttggagatgtctagtttaaagagcaggattggtcttctactcatgtggtgtttcctcaccatattcctgacgtacattaagttgtcgtaaatgcttcgatcggggatgtaagagctttggtttgttgagatcagctagtgcatgagcggccgtagcctgatggccagaactctggagaagattttggcaaagccatgaaccaggcttattggtttatagtcctagattccctcagccccatccttttttagaatgaggatcacgtttgctgagtttagcaggtttacgtgcgtgctcctagcgtcatgcaaggcgttgaaggccgccacgatgttgtccttgatgatgtcccaacatgacttgaagtatttcccagtgaagccatctgggcctggtgccttgtcaaccaacatttcatttatcgccttgcgaatccctgattatgtgaatggggtcattaaaactagacatttctatcagggcggtcctcatggaagaccagttgagatcttgcgttcttggctccaattggcccattacttgctagaggtgcttggcaacggaaagttccttttatgtgtgttgtattgcccatctgttgtgcttacgcaatcgatagatgtggttttttttttccttttgtgtgcattcattttggggtgaaagaattacatgtttacgtctccttctttgatgttggttacatgcgcggcatgtttcttcctttctcattctatgaccgtgaggccgagtagccttcactttaaggccgtgcgaaacctatactttgatgggcaaatcgtacatataattaaaaaaaaggaatttaaaaagtagcagaaaataacatcttcacaaagtgtgtttagattatttaacatcttggcacacttctattgacttagatgatcccatatgtaatcctcacaaatatcaattaaattaaactaaggtagcccacatacatgcgtgggtatatttaatattgcttaaattttctattacaaatgtttataagttggtgatatttttctaaatattttttacttcattttaaacatgtttcgttagtaatttgtttgggcattggttatgatctttttgctaactacccttggaacatataaattttaaactaaaaatgtttgaaaccgtgtagtgttgaatttatgagaaaatagtgtagtaataatagagttggttcctatctctagataccatatgttatttttttggaatatttagcatatcttatttgtgagttttaaaactttaaataacaaattgtcttgtatactatagatgtcttcacataatttaggatatattaatgaatttttaggattgtttcatccacttaaaggtagcaatgtatttatttctaattagagtgagatgattagttatgtatagagatatatgatgggttagatagtgagtggatgccagtcgctctcgattggacaaggagtagtataaacttgcaccaacataaggagaagtatcatgacttaatttcgttaacaatagaagcaatatcattctgttgccagctatgttctagatatcacatataggaagtaaaaacagtaacaagcaatttctatgtgatttgtatgaaatttctagttccaaagggttctagggtcagatttgcaccaacatttaaattcagccaggtcacacctcaaaacccagtacacgaaacatatacaagcaagtaacactttaagtacatgcttaccaaggcatcaatatgcttccatttgccgtatgttcttactctgcttccatttgccgtatgttcttactcttcacttcgtctgattcttctaatttccttttccttttcattttggaacctttgattctcctaatttcatccccccagttaagcttcgctgccaaagcagtcttgttaaaagcatggataatcttagagtccctagcaggatcaaaaatatatgtagtcctctccaaatgtaccccgtcgacaagctattagcttcccatgactgatgattcgctcattgtcaatagtacgtctccccaaagccatcttctcgaaatccatggcatctccacagtaactttcaaatggatgcagaatcctggtcccttcaaagtcacaataacagcaacaagcttttttttaacagatcaattatattgaaccggctttgaaagaaagcccaacaaacaaacagagtcttataaaaaaagaacaaaaatagaaaaacacagctcaaacacaggctgtttttcccttgaagcacaggtacatgcaaacatccacacacactactccagacctagatgcaaaagagcaccaactgaactacatagctacaaatcttcaggcaatcgatctgccttcagttgtcccattttctccagcagacgatcacgccattcttccaagataccatgctcctcccattttagcatgatacatcatttctgaacaaaagacagagttttgtaaacaatatgcaaagggtatttaatcaacacattttcaaaaacccaatcgttcctaaccaaccgcaatgcccaacacacagtagccagaagcaccacccaaaccctatttattttcttccccttaaccaaatccaaaccctcactgatattacttggtcttttatccaagccaagagcatccctaatgacacaacacgcaaaactagctaaagggcacataaaaaggatatagttcgaggtttctttttttaccacacagcttacacaactcatctccccctctccacttccttttaaccaattgagtagcataaggtagtcttcctattcctgccatatacaagaaatgcttgatcttttgaggaattttactcttccaaatactcatcatttcagaatctttcacacctccaaaagttatcaatctatacatcgatctcacattaaagatcttgttgctggtataaggccaaaccactctatttgctcccccatccaaattatattcatttaaaaggcctctcaacctaattaaatcttgacctctgttatcatccaaattccttctaaactccaaattccaagtctcattctcccataaatcactcacagtcgcttcttgatgataatttatgtcaaacaactcagaaaaaacaactttcaaaggtacctaacccagccaaacatccctccagaatttcacacaccctccctggtgaacttctttaaccactaacctttctagccaacccttacagtcatgcaaacccttccaaacttggaccccc

SEQ ID NO: 3978 - DNA, 3227 bp, Oryza sativa
aaaatttggatttgttttgttttgaaaacattccgaaaaatccggtgcctgaaaacggcgtggagtccggataagttacgcgcgacttatccggttcggttacgcggagtggagatcgtgcgggcaccctgatcaagcgacctatctctatataaaccgagccaccgccttcacgcaaaacacatgaaatcaatctagggtttgcctcctcctctgtgttgcgtcgtcgctcgtggactactccatcccgctcgtcagtgtgcaccggcgatcgggagagcaggtctccggaacctctgcctttcgacgtcctgcacctggagaaggcggcgataaggtttttgggaagcgcttcacgcgactgctccctgttcgtccgcgatggctcgccttcctctccgctcgcgtgctgcacgccttcatcgacgctcgcaaccgcgagtagttcctgccgagcaatcagtctttccgccacctcggtacgtgttcgacatgttgcgcatatttgatctgttcatgttttactgcttagtttacatgtatagatctaatgatgcgttaatgctagtatacatctgtaatgtcatgatttatttatggaatatattaaatcattatatgactatattctcaacaatccaaaaatcttaatataggcgctatgattttactatggctgtttttgccgatgcactgaggccggataaatttaatggtgtgcactttaagagatggcagatcagggtcactctgtggctgacagctatgaaatgcttctgggtgagtactggcaagcctatgggcgttcttaatgctgactagcagaaagaattcgatgaggccactactctctttgtgggatgcattcttagcgtgcttggcgatcatctggtcgaggtgtatatgcatatgaccgacgctaaggagttgtgggatgcattgaatactaaattcggtgctactaatgctagcaatgatctgtatatcatggagcagtttcatgactacaagatggctgacaaccgttctgtagtcgaacaagctcatgagatacaaaccatggctaaggaactcgaactccttaagtgtgtcttacccgacaaatttgtggtcgggtgcattattgcgaaactacctccatcttggagaggtttcggttctgcactcaaacacaagagacaggaatactccgttgaggggttgatagcgtctcttgatgttgaggagaaagctcgggaaaaagatgcggcgtctaagggcgatggtgggcagtccattgccaatgttgtgcaccaggcccagaacaagagcaaggggaaatacaaagctcagcagaccaccaacttcaagaagaagaagaacaacagcaatcctaatcaggatgagaggacttgctttgtgtgtggtcaacctggccatctggccaggaagtgtccacaacgcaaggggatgaaggcacctggagggcagacctctaagtttgctaatgtgaccattggcaacactggagatggaagcgggtatggtaatttacctactgttttttcagttaaccagtctactaattggtgggttgatacaggggccaatgtacatgtttgtgctgacatctcattattgtcttcttatcaggtcgcacggggttctaccgtcctaatggggaatgggtcacatgcttctgttcatgatgttggcacggtagatctgaagtttacttcgggaaagatcgtgcagctgaagaacatgcagcatgtcccttctatcgacaagaatcttgttagtggctcccgtctgactagagacggatttaagttggtttttgagtctaataaagtagtcgtgtctaaacatggatattttattggtaaaggttatgagtgcggaggcctgttccgcttttccctttctgctttctgcaataagtctgtgaaccatatttgtggcagtgtggatgatgaggctaatgtatggcactcacgtttatgtcatattaattttggattgatgtctcggttttccagcatgtgtttaattcctaagttttccattgtcaaaggttctaagtgccatagttgtgtgcaatcaaagcaacctcgcaagcctcacaaggctactgaggagagaaacttggcacctctagaactcctacactcagatctctgtgaaatgaatggggtgttgacgaagggtggaaaacgatatttcatgacgttgattgatgatgctactagattttgctatgtgtacttgttgaaaacgaaagacgaggctctagactattttaaaatttataaggcagaagttgaaaatcaacttgacagaaagataaaaatacttaggtctgatcgtggtggagagtttttctcaaacgagtttgacttattctgtgaggaacatggtattatacatgagaggacgcctccctattctcccgagtctaataggattgctgaaaggaagaaccgcacactgaccgacttggtgaatgccatgttggacaccgcgggattacctaaagcatggtggagggaggcattgttgacctcgaatcatgtgttaaacagagttcctaacagaaataaggacaaaacaccatatgagatatggattgggagaaaaccatcactttcttacttgcgcacatgagggtgcttggcgaaagtcaatgtaccaataacgaagaagcgcaaacttggacctaagactgtggactgtgtctttctgggatatgctcaccacagcattgcctatagatttttaatagttaaatctgaggtacctgacatgcatgttggtacaattatggagtctcgtgatgctaccttctttgagagctttttcccaatgaaggatacacatagtagttctagccaaccctctgaaataattcccagttcaatcacaccaccagaacaaactgaacatacacatgaacatgttactaaggaggatgacagtgaagctcctcgaagtagcaaaagacaaaggacagctaagtcttttggttatgatttcactgtgtacctcgtggatgacactcctaagtcaatttcagaagcatacgcatctcttgatgcagactactggaaggaggctatccgtagtgaaatggattccattatcactaacgggacttgggaggtgacagagcgaccctatgggtgtaaacctgtggggtgcaagtgggtgttcaagaagaagctcaggcttgatggggggatcctcta

SEQ ID NO: 3979 - DNA, 8476 bp, Oryza sativa
actcacttgttgctagattgaccacaattcgtgtgctactttccctagcagcctcacatggtcttctcgttcatcaaatggacattaagacagcttttcttaatggagagctggatgaggagatctatatggatcaacgtgatgggtttgtagttgaaggtcaagaaggcaaagtgtgtaaattgttgaagtctttgtatggtctgaaacaagctcataagaaatggcataagaaatttgacaaaacattgacatctgcaagctttgcagtcaatgaggcagataaatgtgtgtattatcgccatggtgggggtgagggagttattctgtgcttgtatgttgatgacatactgatatttgggacaaaccttgaggtgataaatgaggttaaatcattcttgtctcaaaattttgatatgaaggatttgggagtagctgatgttatcttaaacattaagctaattagaggtgagaatgagattacactcttgcagtcccattatgtggagaagatcttgaatcgctttggctacattgatagtaagccttctccaacaccttatgattctagcttgttgcttcgcaagaataagagaattgctaggaattaactggaatactctcaaatcattggctcgctgatgtacctggctagtgcaactaggcctgatatctcctttgctgtgagcaagttgagccggtttacctctaatccaggagatgatcactggcgtgcgcttcagcgagtaatgcgctatctgaaatgtactatggaattggggctttactattctgggtatcctgcagtattggagggatatagtgattctaattggatctctgatgtggataagatcaaagccactagtggatatgtcttcacactaggtggtggtgctgtttcgtggaggtcttgcaaatagactattttgacgaggtcaaccatggaagcagaactgacggcactggatactgctactgttgaggcagaatggctgcgtgatctattaatggatatgcctattgttgaaaactggtgccggctatccttatgaacagtgacaatcaaacggtaattgtcaaagtgaatagttctaagaataatatgaaatcgtctagacatgtgaaaagacaattgaagtctgttaggaaattgagaaactccggagttataacgttggattacatccaaacagctagaaacctggcagatcctttcacgaagggactatcacgaaatgtgatagataatgcatcgaaggagatgggtttgagacccatgtgagttatactatggtggtaacccagtctatgtgatcggagatcctgtgaattagaacctgggaagaacaaaccattagtaaactagaggagagtaccaatctataccctctctaagtgaagatgcatgtactctcgtgagctacaaggcaggttggctatgccttaatgagttctgttggctttatatagcgaagatgctgtcctgcagagcattcttgaaagaactcacctttgtaagcttgactgttggtcgcagtctatgaagattttgggtgaatcttctaggaagcttactaaagacctaggagtatgacttatatgctctacccgaggggtaaactacagacggtctagtaccagataagactctgagtgaaacttgcttgcacaagactgtcaattcaaggcgtagtccattgttcaagttgtgagtaagtgtagcttggagatctaggtggatgttcaaccttgatcggtctccatcgaaccgctggtatataaacaatacattggaaaagacaaatctcagtgggattctgagatttggttggggattgttggaattaatagatgggctaaggcccattcgaagattaattctttggaaaatcacaaaagcccacctcataggatggcatgcatgtggagtttagtaccaccttgcttattctaggagagggggacctccttaaaatggaggatgccctcctagccacttgaggcatgtgtggtggagagaagagggggaacacacgcgcgcgctcgctcgcctcgcctagcctggcaggcggcgcgcgtgcacgacgtacgcgtcgaatggtccgcaaaattggctcctcacctttgcgcagatgcagcctccttttgcagttttgttttgctgcaggaaaattcagatttgttttgttttggagtccggaaaatccggttcggtgcgtgaaaacggcgtggagtccggataagttacgcgcgacttatccggttcggttacgtggagtggagatcgtgcgggtgcactgagcaagcaaccgtcgccttatccggttcggttacgcgggtttatctctatataaaccgagccgccgccttcacgcaaaacacacgaaatcaatctagggattgcctcctcctctgtgttgtgccgtcgctcgtggactactccatcccgctcgccagcgtgcaccggcgatcgggagagcaggtatcccgaacctctgccttcgacgtcctgcaccgggagaaggcggcaataaggtttttgggaagcgcttcgcgcgctgctccttgttcatccgcgatggctcgccttcctctctgctcgcgtgctgcgcgccttcatcgacgctcgcaaccgcgagtagttcctgccgagcaaccggtctttccgccacctcggtacgtgttcgacatgttgcgcatatttgatttgttcatgttttactgcttagtttacatatgtagatctaatgatgcgttaatgctagtatacatctgtaatgtcatgatttatttatggaatatattaaatcattatatgcctatattctcaacatacttcaagtccctgaagcttttgctgcccacacactcatggtgcaaatgaaacgtagttcatattgtccctatagtcacaagtgtcaaaaatatgagatttgctccgtccaataaaaaagtacctcgacgtaccagtacctcacggtaccaaatcatttctgaccattggatctaacaatactcgtcatgcccaactatatccaacgatcgaaaacgatttggtatcatgagctaccgatacctccaggtactttttgctggaccaaagagcctcgcatgtgcccatcctaaaaatcacaaaaaggaataatgggcaactaaacaactgattttacaaccggggcatgcacattaaactgtaagatgtggagggcataaattacacgaaagctaaagttgtaggaccagaactaaccttattttgatcatagtttcacaatgtatgttccacctttttgcgaacaatgttctgttgagagaaaaagtttgatttgtagctttaggccattttcaaggcgtcctgtgttagctcatcagttggctgcaatgaattataagggtaactccttgtatatgataacaactctgagaggtgaagggtaactccttgaatatgataacaactctggcaggtgaagaatatggttggaagagagagtatgtgccaacagttcttgaagaatgtggctggaagagagagtatgtgccaacagttcttgaagaatgtggctggaagagagagtatgtgccaacagttccatgacaacagaccgcaccataggtagcaattccatggcaaaatgcagataagcctcaggtttcggatgagacgatgcatatgttgtagctatgtaagcagtaacatcccaacttgatgtcttatatcattttgtcccgctgtctagattgcttgagtaagatctagattacttttgagcaaataaaccatggcatcatgttcagagaggccagaaacacgggcaaccaacacattgatgagaccatccaaagattgagactcgatacatataaaaatttgagagcttgatccggtgcaggaaacattggattgagtggcccgtaacaatagccggccttgagaaggccgtggtgataacggccgcggaaatcttccatagggatccgagaaattgccctgaggtacacaccatggattctgtccagaaaaatgccccggagtgacagtgtcaatgtaggctgaaccttcatttcgaatttatggcatctcatagcagcaagatccataggattgttcaaattcttcagatccagcggcttctgcatcaatctggttaacctggtcacatcttgaatcgagaggaggcgacgacgggccggaattctctgcagacaaagagtgggcgaggtgagacactggcgcggacaatccaatgaggaaagcattagcatcaacatcaggcagcctcgtggacaacgcggcgcatctaagagcagccttggcagcatgtgagcggaattggaatctgtccttgtgacgatgatggtggcggtcaacctcgatgaggcggacggcgagaaggagatccgccatggataggcggaggtagcggagcgcatcctaggtggggagatagtggtagtacgatgtcaaggtgatcaggccttccagcgagcgctccgcgacggtgtgcgcctctggaggggaggggacgtcgccgccggtgacgatcttagagaggaccatctccccacttgctcttgccacccgcgaccgtgaggccatggtggtctcccgcttcggaatcatggcaccgtcggagtcggggagttcgctggggacgacgcggagggtgttggcgatgatgttgttgacagggtcggcgaagccgaagtagacgcctgcgttgaggaggcgtgtgttaacgaccaaatttggtaagatatgaaccaggttcggcattggaatcgaagcagattcggcaaagagttagattcgaagaacagagtatgcatcggctgcgaaggcatcggctgaagtctgcatcgtttgagatggatcggatagagaacaacggatacagccggtagagtcaatacaaccgattccgatggggatggctccgaggctgtttctagaatcaatcaacgtgcttcacaaggattgccacgatggagataaatctctcagaaagacaattatatatattaattaggatatttcgtgtaattctctttagagatatgtttgggcaaaagtctgccgcaaagacttatggtatcttagagtttgttagagataagagttgtgtccggcaaggacatattttgtatctcaggtataaatatgacctgaacggctgaacccaatgtaataaaaaacaacagttcaataatactttcggtgcatcgccacccttttactttcgttctatttcgacgagttcctacttttgggttgaactgcatcggtttcgatcttcaactagatgaaacttgtcatggcggtttgcgttctccggattagtgtgtccatctttatgacactctaatcctgtttatgtaattcgtcgagttatcatatacactctgtaatctctgttagttgcgctatatgacttgtcatcggctggttcttactattaggaagtaaacgatagagttatgttttgttattaatctagattatataatgtatctaccatctcttagaggttttcatcctcttgcctagatcttatacttgtctttatgcttaatgctacatcggttgaattcgatctattaagtaatatctataattaattatgatatctggcttgttttatgattatcaagagagatagcatcggggtttcagccgatcttacctgatttagctactttacatctcatatgcttgattgataggctagatctaccctttagagtgagatcttattgcattaaagtatattagactttttgtttgatatattttgcctgttttaatatcttagtataaagtggtatcggagtattagccgatacatgctagatctacctgatcggctatgctataaacgtatatataatcattactttagtgtatacttcgactttagtgatttatactatctcggcatggcgaccgatctatcccaatcacgtagtttaaatatacatcgaagaaagcattatatatcgttaatatctacagccgatcgagtagatttagctttatcttatttattcataactgtcgatcgattccaacatgacatcggctcaaagataaatgatatgtcatcggcaactagccgatcggctatcgtttatagatttaaccgcggtttttcttatctttctttcttattgattgcatgatcaaatcaactggcacgctcacgaacctaaaagcaagattttggacctgcactgaagttaagcagatcttacaggctagtgtgtgtttttagcatcaatagcgtgcggcgagcactagcacacggtccagcgacagcgcgtcgagcgcctcctcgtagtacccgtacatcagtcctagaatcacgcgtctgttgcgagccatgccctcccgcgagcaatcggaacggtttggcccgacgccggagtcgctgccgtctccatcgcggtcgctcccgcctcgcaccgctgtcggccggccatgatctggggttagggtgagcgtggatcacaggaggaggagggaaacagatcctctgacattgggtggaaagtcacggtgttgcagttggtttcatccctgctgaccactgcatccaacggcacacatccatcttccctccttcgaactgcatattgtgcggcccagttcgatttctgtggccatcggctaggccatcaggtcacaatgaccctgttgcctgctactacatgcaaggactcagtctcgcagaggacaaggctgtcaagtctacaacaagaacaagagaaccaaaactactgaagcataaaactgctatcatttagaataattcaaaataagacctaagtttcaactagcatcattcatgcattgcaaatcaacagctgagtttggagaacactacaaggcgtggctattgtgactaaaacagtagaattgaaaaaaaaacaaaagtattgcactgggtacaagcagcgtgtgtagccaagattatgcggtccagtaacttcttaacatgccaactcattgcagcttttggcctaatccctgaattaccagccgcttcaatttcaaaggcttgaatttctgaaatttttctttgtgatgccatcaagtggatggtttctggcaaatgaaggatgtgattatgctcaagaactagatccgacacttgataatttcctacctctcgatttattatgagacccatgcgtactttacagtcagttctagtttcagctctaggatacctagtgagatgatctcttttgtcctctgttcgtcgaccctcatttgaacatacatatctgcaggatgtgatcttgtcatcagacttgcttttatttttgtatcttttttttacatcaaagcccatatgacctccatattgtacccaaaactcccaagccttatcctcatcaacctaggtaagaagagcttcagtgcggaagcagaaggcctcgagccaacagaggagtctgtcaacaagcatttctgcacaaggaaagttctcctaagcaatgacacgccaaacgttgtcgccactctatgtttctcatactgatctacatttgttttattttttctgcaaggaaatcaatttcatactatctatgtcaatgctataagcaagaagaaaaattcttcttgagattgaattatatcatcaaataaaggaagctatttaatcagttgaggactagacacgatttatttccgcctttgttccactaatggcaacttggagaactaatttgttattgcaacaattttcattctatatatgtagctgcacaagaattggcaattaatttaattatgaactatttcgttattacttcaacagtttatctaaggtatgattcacaccccctcaaacccctctattctaagaaaataaaaatcaagaaaatatttgtttttcgatctatgtgttggaaaattattgggattttatgtgttggaagaaaattattgtacatattatcttttaattaatgagtagatgatagggttaaaattagagctagtagtcacatttactataaaacttgctctaaggcaagtagcacattccaacgaagttcaatcaaaagaagccaaaccatcgcgccaccgctagtgatgactagaatgacccgtcacaacatgtgcacaatctccgtggtacaatctcaactccagtagtactccagtgctctctggaacctcctagcttgcccgagacagagaaaaaaaagcctcttctctggcccctcttcctccttgattccggtggctcgccgccggtgacgggagggagaggggtcaggctcaatcgcgtctccttcgtatagtagtttagtcgggttagtctcgtagtcgagttagtctcattctgtgtccttcctattcttcgtctttggtcctctatgaagagtccagtgttcccttcttcagatctgaaatcttgtgggtggatcagccagggaggtcagtcttcgcggtgccaga

SEQ ID NO: 3980 - DNA, 649 bp, Oryza sativa
cccttagatgaatttcagcagctacaagttgaattgaatgagttacaacttcaaatacaaagggagatccttagtctgtcatatggaacagccgtgtttgttcctcagaattttcacgggctgaattttgtgaatcattctccccctagtcaccatttggctctggaaaactaaatgtgtcgtcaagaacaaagtatttatgtggctgatgttgtatgatcgattgaataccggagacacgttggacaaaatcacaaaaaactattgtgctctagaatgcagatctaccttgtgttctttgcttactggttctagggagacaacaatgcatcccttcttcgatcatgtgtcgagaccgtattagagtaagatggaatgctaatcttgagtttttccaaatggtggtcttggcacgaccgaggtttaagcaaaagagtttcttggatataatgttcatagcttgctggcatatattgaagcaatgaaatgaaataatctttcaaaaattgttaccagaagaagacaatttgttccattcttttaacaatgaaattctcttgcatatgtgcaagatgaataagccccttaatttagtcatttttgactgattacaacatttacaataattattttgatgtgatactcttgc

SEQ ID NO: 3981 - DNA, 643 bp, Oryza sativa
aggtgcaacgaaacctctactgacaatttccaaatttaatctttcaaattccttgcataacttcaatggcaactgtcgtccttccgtagcattgcaatagcctttcctgtgagagcatctgctacaacattggcctttcctgggtgataatgaattcccatatcatagtccttaatcagttccaaccatctctgttgtctcatgtttagatccgactagataaaaatatacttcaaacttttgtgatcagtgtacacctccgtacgagtaccaaaaagatagtgacgccaaatcttcaacgcatgaaccactgcagctaactcaagatcatgagtagggtagttcttctcatgcggacgtaactaacgagatgcataggcaaccaccttcccatcttgcatcagaacacaacctaacccaagcttagatgcatcacaatacacttggaaacccttcttaggatcatgcaaaatcaaaatgggagctgatattaagcgacttttcaactcttgaaaactctgctcgcactcttctgaccacttgtactttacatctttctgaagcagtcgtgtcatgggcttggcaatcttggaaaaattctctatgaacctccggtaataacctgggagacccagaaaactac

SEQ ID NO: 3982 - DNA, 631 bp, Oryza sativa
caagatgggtaagagaaaacttgcttttgggatagaagaaaagacggtcgcaatgagcgtgggacgaacctgcgagggggtcggttaaatgaccaccttggaggggaaattaggtttccccgggatggttctgtctcccccatcttgcgcagccgcttcttcttgcgctccccctcgggctgcgatgttggcgcggccccctccgggcgcctgctgctggcacgcaccgccccgccccctcggggaggagatcttttgcagttttgtttagttgcaagaaaatttggatttggtttgttttgaaaacatttccaaaaatccggtgcctgaaaaccgcgtggagttccgataagttacccccgaattatcccggtcggttacgcggagtggagatcgtgccggcaccctgatcaagcgacctatctttatataaaccgagccaccgccttcacgcaaaacacatgaaatcaatctagggtttgcctcctcctctgtgttgcgtcgtcgctcgtggactactccatcccgctcgtcagtgtgcaccggcgatcggagagcaggtctccggaacctctgcctttcgacgtcctgcacctggagaaggcggcgataaggtttttgggaagcgctt

SEQ ID NO: 3983 - DNA, 611 bp, Oryza sativa
ctgcacgccgaagcaaccacttcatgttgtgagccgattgatgagtaccatagatcccttcgggaactccgccgattgcaaccttatcctgatcggcactcaagcacttaagtaataccccatcaatcgcccgataataaagctcatcattcaataacggatactgtaatgccttatatgttaatttcctagaagccgatcgagataggattacttaaatactgatgcacatcatacctgctatcatcggctgacactgatgcaatttgaactttaacatctatgatcatcggcttataccccgatgccccttgagccaaatcattaccttcaaaatattgatctcgagatacatgcttcaaagctaccagtcgaaaccctttcattagttccaggcacttctcattataaaccatcaatgtatcgtacttgcattcatatgaccctgccaattggctgattactagcaaggaatcccccatgatttcaatggtatcggctacaacttccttgagtaattgcaaccccttgagcactgcttcatactcagcctgattattgggcgcatatggtttaatagtataagcaaactcgaaacatgcccccctagg

SEQ ID NO: 3984 - DNA, 696 bp, Oryza sativa
ggagggaatgatacgcagctggagggacactatgattacggtagctagcatgcctgcaaggcggatactacatgatgccctatgaacaaatggtttcgcgaaaaatcaattattttgacaacaggatgtgcgaactcgaagtttgacacgactctctttaccaattctgccccgaattacacttaaaacgactcagcagcttaacgttggctagccacgcattacttgactgtaaaactctcacttttaccgaacttggccgtaacctgcctaccagagcgagaacaaaacataacatcagacgaatcgaccgattggtgaggaatcgtaacctccacagagagcgactcgctgtataccgttggcatgctagctatatctgtgcgggcaatacgatgcccattgtacttgttgactggtctgatattcgcgagcaaaaacgacttatggtattgtgagctacagtcgcactacacggtcgttctgttactctttatgagaaagcgtgcccgcttacagagcaatgttcatagaaagctcatgacctatttctagccgaccttgcgagcattctaccgagtaacaccacaccgctcattgtcagtgatgctggctttaaagtgccatggtataaatccgctgagaagctgggttggtactggttaaggcgagtaacaggaaaagtgcaatatgcag

SEQ ID NO: 3985 - DNA, 2725 bp, Oryza sativa
tgccagagtacgaggggctccttgccggactcagagtggcagggggactggggatccgccgtctcttggtgttaggcgactcccagctagtcgttaaccaagtctgtaaggagtaccggtgctctgacccgcaaatggacgcttacgtacgccaagtgcggtgtatggagcgccattttgacgggatagagcttcggcatgtgcccagacgggataacatgattaccgacgaactctcacggctcgcgtcctcgcgagcccagaccccaccgggcacctttgaagaaaggcttacccagccgtcggcgcgacccgaccccctaggggagacggatgtgcctgaccggcccccgaggtccgtcggagtccaggcctcgggacccgaagggagcgctgcaagctcccttagattgattgcttggatctccgagatccaagcatacctcacagataagactctacctgaggaccgcgaagggagtgaacgcgtccaacgcatttccaaacgctacgtgctggtagaagggatcctctatcggcgcgcggctaatggaatcctcctgaagtgcattcctcaggaacaaggcgttgagcttcttgccgatatccatgaaggcgagtgcggagcccattccgcctcgcgcaccttggttggcaaggcctttcgtcaagggttctattggccgacagctctcaatgatgcagttgatctggtccggcgatgcagagcgtgtcagtttcacgccaagcaaatccatcagccggcccaggccctgcagatcataccactttcgtggccatttgctgtctgggggctcgatatcctgggaccgtttaagcgggccccgggcgggtttgagtatctgtatgtcgcgatcgacaagttcactaagtagcccgaggcttatccggtcgtcaagatcgataagcactctgcacttaaatttattaagggcatcacggcccgttttggagtgcctaaccgtattattacggataatggcacccaattcactagtgaactcttcggcgactactgcgaagacatgggcatcaagctctgcttcgcctcacctgcccaccccagaagcaatggccaagtggagcgcgccaatgcagaaatcctcaaaggccttaaaaccaagaccttcaatattctcaagaagcatggcgattcatggatcgaggagttaccagcggtgctctgggcgaaccgaaccacaccaagccgagcaaccggggaaacgcctttcttcctcgtctacggcgcggaagcggttctcccatccgagctcaccctgaggtctcctcgggctaccatgtactgcgaggttgatcaagatcagcttcgtagagatgacctcgactacttggaagaacgaaggcggcgtgcggccctccgagctgcacgctaccagcagagcctgcggcgttaccatcagcgccacgtccgggcccgatcactctgcgttgacgacctcgtcttacgccgcgttcaaacgcgtgctggattgagcaagctctcaccaatgtgggagggtccgtatcgagtgatcggtatcccccggccgggctccatacggctggccacgggcgacggcacagagttgcctaacccttggaacatcgagcaccttcgtcgcttctacccctgagggggggtcgggtgtcaggtttcgggctcgggtcaaccccgcaccccccctcgggtgtgcagggttgaccgggggctgccacacatgcacattctcatttctctcatttcagtatttcaataaaagcagtttcaatttcctaagggctgtatctgtgccgtttttttttcctttttgaagaattttgacttgaaataaggtcactcgtgctcaaccttgccctcgggggctcggttcggtcagctaaaatcgccaaacggggcccagaaccgagccgtgcccggggcgtggtgaactccgggggggaatcggcaaaaacccacaatcgggtcacccataaccctcggtcaccacgttcccggcctggccagtctcgacatgcggatctccccaggcactagtcccgacccgcgcttttcgaggactgggacttgggcacgggcccttaaatcaagctaagacacaaaaagaggatcacggcacagatcatcctcatctcattcgcatagcaaaataaaattaacacaaagaattttttcatcatttttgattgcagattgtaagttgatttatacaaaaaacaggcccgagggccttagaagaaagaaaaagaagaaaattgaagattggcgggggcctgggggctcaatccgatgcgcccgggtcgccggcctcgtcttccacgtcgtctgcaccgctggcatcgccctcctcgtcggagttgggggcgaacgcgagccgaggggccgacccctcgaaactgtggacgatgtggtcggcggcatcccggacccgcgcgcgcgcgtcgtcctcggtcccgggagggaactcttccagcgccatccatggagagaagttggggtccctggcctggtaactcgctagtacgagttcaaccgctccttgggcgaggtccctcgaggatgacttgatggtcttctcgagctcctcggggagttgttgaagagcccaggccatcttcgtgaggtgcggagcgaggccttccaggttggtggagtgcgtccttgtctggcctttccagaggcccgcttgctggccggcgcgatcca

SEQ ID NO: 3986 - DNA, 659 bp, Oryza sativa
attgagcgtctgcatagcgatgtcattgctggccgtaagcggctgcaagtcgccgccacctgtgcaaagtcaacgaccggagccagcagcatgggcgatggagaaagcccaagacttacagcagatgctgaactcaattattaccgtctccgaagtggaatcgacaggataaccgcgcaggttaactacctgcaggaatacatcaggacgcaatgcctgaaataatttttttgcaaatcacaaagtcaatttaatgagcctcgcgatgcggggcttttttatgtccgcagtaaacgcgcatctcacgcgcatattaacgagagcctttcagtaagcgagcctgagaaatgccgttataggtggcgacctctctcgggcggcttttctgtgagacaggctcactttctaaaaggtaaagacgctatgaataatccgtcagttattccggccttcgacttccgcgaaatggtcacgaccctcgacaacaagataatcaccacatcactcaaggtggcggattactttggcaagcgacacaaagacgttttgcgtgccatacgtaacctgaaatgctccgatgacttcacccagcgcaattttgcgcccattgatttcattgataaaaatggcgatgttcagcctatgtataacatcacccg

SEQ ID NO: 3987 - DNA, 638 bp, Oryza sativa
ctattttccgtccctcctctttgggctgacatatgtatacctaaaataagtctattttctgtccctcctcttcggctgacatatgtatagataaaaaagtctattttagatccctattctttcgttcatggcatataatatgtctatttttacttccctattttttttgtaccgggcctagctgccagcccatcgtgccgggccgagccaacgtgccggtggaggggcccaggcacggcccgatggtcgggccgggccggcacgggcccgacctccgtcgggccgtgccgtgcttgggccgggccaaaataccgtgccatgggccgggccgtcgggcctcgggccttttggccatctatacttcttcctcctccctccctccctctctctttctctgccctttctcttccctttcgactgcagctgcctgtgcgacgctggcaatcagccggagtggtgtggcaatgggcgagagggtgggcgttggagcggcagcggtgggaaaaccatggacggcatcatggccgtgccaagtatatacggtagggaaaaccactgtccaggagctgtactggcaatctggagctcaccggcgaggagaaggaaaccgtgcggaagctgatggggtaccgagctcg

SEQ ID NO: 3988 - DNA, 3061 bp, Oryza sativa
tagtatgctaatggctatttctcagcaagccttatggggaactgaatccaatagatcagtcaggttaaggggatgggtgcaaggacctgaactgcttatgctaatagatctaagatagtcacattcttttattgatctaggtgtgggaaagaagttgccaggaatctctcctttgcctaagccggtcactgttaaggttgcagatgggggaaccatgagttgtacacatgaaatcgttgattgcagctggtggatgcaaggacacaattttaaaaacactttcaaactattgcaattgggaagttatgatgtgattttgggtatggattggttagaaagattcagccccatgcaagtagactgggttaacaaatggatggatgttgaactatctggtaaaattgtgagattatttggcattactccacatacaacaacctgttgtcctattacctctgaccagttggaaggaatggctaaatgtggctcaatactttgcttagtgcaattagcttcagttttacagactaccactgatccaattccggcatcagtacagcaaatcattcaggaattttcatctgtctttgaagaaccaaagggcttacctcccaaaagagcctgtgaccacagcattcctctaattcctgatgctaagccagtgaatctgaggccttatagatacaaccctgcattgaaggatgagattgaagcccaagtggccgaaatgctacagtcaggggtaatacagcacagtcagagtgccttctcttcgccagccttgctagtacgaaagaaggatggaacttggaggttagtgattgactaccgacaactaaatgccattacagtcaagagcacatacccaatgccagtcattgatgaactattggatgagttatcaggagcaaaatggttctccaagcttgacttgagagctggttatcaccaaatcaggatgaaggcaggtgaagagtataaaacagcattccaaacccacactggacactatgagtataaggtaatgtcctttggtctcactggggctcctgctacatttcaaggagcaatgaatgccacattgcaatctgtgctcaggaagtttgctctagtgttctttgatgatatattaatctatagtcctgatcttgagtcccatttggatcacatcaaacaagtactatccctgttgcaaagacaccaatggcaagttaaattgtccaaatgctcatttgctcaacagcaattaacctacttgggtcatataattagtggagcaggagtatcaactgatcccagtaaggttcaggaggtggtggattgggccattcctactactcctaaaaagctcagagggtgccttggattggctggctattacagaaagtttgttaaggggtttggcattatcagtaaaccacttactcaactattaaggaagggggttccctacaaatggtctgccgagactgacaaggcattccagacacttaaacaagcactggtaacagctccagtgttagcccttcctgatttcaatcagccgtttacagtagaaacagatgcaagtgattcaggcattggagctgtactgtcacaagggggacacccaattgcttttattagcaaggctttgggtcctcgtaccaaaggactttcaacttatgagaaggaatgcttagcaatattgatggcagtagaacactggagatcttatttgcagattggggagttcactattcttactgaccacaacagccttatgcatctttcagatcaaaggttacatactccatggcaacacaaagcttttaccaaactgcttggattgtcatataagatatgttacagaaaagggagtactaatgcagctgctgatgcactttccaggaaattccaagatgaatctgagttaaacttggtttccagttgtactccaacctggttgttggatgttgctaagggttatgagactgatcaattttcattagatttgctcactgctctagctcttaaaccagatgcaaagcctgggtacaccttgcagtcaggaattataaagtacaagggacgaatctggattggtcagaacagcactatgcaaaatgcgttacttgcagcattccatgccagtcctattggagggcactcaagattcccggttacttatagcaaattgaagaaactttttgcatggcctggaatgaagcaacagactaaacaatttgttcaaacctgccaaatctgtctgcaagctaaaccagacagggcaaaataccctgggttactgcagcccttacctgtgccagaagggtcgtggcaagtggtgacactagattttattgaagggttgccaagatcttcatcttacaattgtatactggtggtggtggataaattttcaaaatatggccatttcttgcccttatcccaccctttcacagcaatagatgtggcaaaaacttttatgctgaacatttataaactacatggtcttccccagactataatctcagacagagataagatctttacaagccaattgtgggagcagctgtttactagatcaggaacacaactgcatctgagcactgcttatcaccctcagtcggatggccagactgagagggttaatcagtgcctggagatttatctcagatgttttacacatgcaactccttctaagtgggcagtgtggcttcatttagctgaattctggtataatactgcattccactcagcactgaatacatctccctttgaagttctatatggccacccacccaggtattttggaattcattcagaggattgtgctattcctgaactacaagtttggctcaaggagcgtagactgatgcattcattgattcagcagcaccttaaccgagcccagcaacacatgaaaaatatggctgacaagaaacgcagtttcagatcttttgaattgggtgactgggtttatattaagttacagccctatgttcagtcttctgtcgcagctagggctaatcataagcttgcattcagatattttggccctttccaagttattcagaag

SEQ ID NO: 3989 - DNA, 2354 bp, Oryza sativa
ttgtcaaggcgtcaggcgaggaggagccgagtgcaagcgccaagctgaagatgaagcctgtgccggatggtgagcaggaaggaggagaagaagacttgaggccggccagagtcattaggcctaatcgtaaatatgttgggccggaatgggccatgtaacctgtatcgctggcatgagctggcatctgtcttgtgagaggggaaggaagggagttggtagcgagagagagtataagaactgaggtttctaaattgtaagggacttttggcaatctggtggcgaatggcggcggcggctcaaccctgttgggttggagcaagattatcctagtaaaagattgcctaaacacatctctgttcttcctgagttgttcgagttcttccacttttccttttcattttccttagttgtgttgagtccatctggtgacgctgacagtgagcaacatgtgtgatagcatgtcgttccaggcgtcaatggcgccgggaacacaccagtgcacgcagtcattgaagatggtgaagtactctttcatccattccttacgacgcgtccatcccctgtacctgctcgggtgcgcgtccgcccgccgtatcatcgcctccgtcgtgtccatcagcatcattcttaccccgccgccgctcgccgccctgtttgcatgcctggaactcgctccacctacgaagctcagaacacacgtttactagaaagaacaagataattgatcactagatcaatggagaaaaatcaagaaattaacctgcagcgtgtggaagtcgagctcgaagccctgcagcgtcttctcgccacgccggtacggccgcgtccggacgcagttgccgtccttgttccactccccgccctcgtactgcgacggcgacacggtccgcagcacggcggtgacgccgccgccgtcgctgctcaccacggcgcggagcgcggcgcgggtggccatgcggagcgcgtaccgcagcgtgaggtcggtgacgttggggaggaggcagtggtggcacccgacgagccggccggcctcgtacagcatcgacggccggtagaaccagctcgacgccgacacgacggcgtagtcgaacgccgggacgtgcggcgcccacacggcggcgggctcgtcgaggtagaggttccacaggcccgtgtgcgccggcccgtcggcgtcgacgagctcgctccggaccaggaacggcgcccagaagttgaggacggtgaagttgtagccgccgccgtagtggtacaccgtgtgctcgctgctcggccagctcgtcgttggcttggcaacctgcaggccggccaataaaacgtcacaccctttgctgctggcccatttctgaccgtccgatcaagcgatcaatgattcagatcgaagctagtactgtagcaaatccggcacgttttttactttttaccctggtcaggagacagatgagggagttcatgtggttcttggcaagggaatccccaatgaaggccaaggtcttgcccctcatggcagagaggaagcgcaacgggtcgagacgggggagatcacaaccgtcgggacgccaccgccactgcacgaagccaaggtccagcttgccgtacttcatacagtcatagtgctcgtggatgaacgagcaggtgtcgttggtgtagtagggtgcatcagggtctggcacccattcgcctctaaatatgtcgcaggcctcgccgtcagccttccggccaccggaggaggtggagaaggaagagtaggacagccaggcggacagtgttcacggcataaccaccgggaaagggaagtatgtgtcggagacggcgatgacagcgacgagtaggaggatagagatggcgggaatcaagcacctgccgttgtagtactgcgtcttgacaagaaaattgcagagattattaagaagcgccatcgatcggcactaggagaaaactaagaatctatatttatgtgagaattgggtgtgaaacaccggtggagttaattcaggtgtatatataagaaggtgttcataatctcaatgtatcggaattttggttttttgggggtccactgctactggcctagtaatataatctccgcagcacacacagtctgtacgtagtatggcgtcgcacctcatggcaccgcgagtctctgttggcatccatgttacttcctcgcagcaaagctcacagatgattaaattgttggtaagttatgggatccgagggtctcgagcatgagcaaattctctcggcgcgcacatggacacatcacacatggttggtgtcctctacagaaagacccattttgtcttctatcgaaagacccattttcactttatgtctgtattgggtagaatctccca

SEQ ID NO: 3990 - DNA, 9774 bp, Oryza sativa
acactctctcgcaactcaagcatatcccaaatgcaaacgtacaaatagcctagcagcatagaagacatctcaacagaaaaccactagttccatgaagtttgcaattaaatagaaggatcaaatattgttcaagtactgtccatttctctccgtaataacatcgaacaggtgatgtgcaagcgcggcaagtgcgttttcacaacgcagggtgtacatgacgtgcgtaccgaagacgatggtgaccagattgagcaagacgacgctcctcgccttccggggcaccaacgaggccaccttccgccacgccgcccgcgcccgccgccgcgccgtggtgcaaggcgaggcgggcggttcgtcggggacgggggcggcggattcccgcatcccgggcggcaccgacttccacctcccactctcatcggccgccttcttcttcttcttcttcttcttcgacggcggcggcggcgaccggttggaatccttcgacggagaacctgaattggaggcggcggccaaaggcgcgaggaggcgccgccgtctcgtcggcgagggcgccgccgctgggaggaggcgggggagggtgcggaggggaggggcttctagaagggaaggacgccacgggcggggagggttcggaagcttcgagaggaacatctcgccggtggggaaggttctagaaggttggaggctgcgaccggcggctggaggaaaaacggcgaggtggaggaggcgagcggcctacgattggcctgtttgggtgggccgaaatctaggcctatccacgtgtaaggtcgagattttagctcgagtactcggcccacgaatgtgtgtgggcctcgatttcggtccatccaaacaaagattatggcttctcttgtgatttcggattttagtttgcgcatgtcctaaacttctaaattgtatgttttatatataattttttataggaattttaaaatagtttcctaaatcaacttcaactttgtgtcactcatttataccttcaagtagttatcacaacatcagattatctattgatttcagctatctcaaataggacctatatggactacggagtgattaagatcccctaactttagggggggttaaagtcagatgaacagtatcatgactttggggtgttttcagccatccgattcacagcaaacgaacgagatcaatctctaaagtatgctacaatactaaagaaacagtagtgcggtacaatacaattgattgttttaaactgtagctataaaaataactgcaaaatcacttttttctactgtggtgttagactcatttattgtgcgtctctatctttagcgcccgaagtaagagcaggtacaatagcaggctattagccagctataaacatattttaataagataaacgatgagagagaagagcagcgggctacagatctgtagctagctgcagcacggactccaagacacactgtgtgtatgacaggtgggaccatatattaatagtatagtaagcaattattatatgaattggctattagattaaatatagatgaattggagctagtagtgagctgtactattagacttgctctaagtggatatggatccctatgaagtgggattgaggtaagaaatgagtggcacaaactacatttgcggtgcaacgtacactaatgcccatacggcagccagaaggtcacggcgctcccacaaaacattaaatagataaatcaatgtcataggagcatgataagaaactctgatgtgtatggcaaccatataacaacatcaataagaggtgtggttacatggactgccattgcaatcaggagtactagagggtggtggacaaacataataacgacattgatagaaattaagaagggcatgcatcatcggaatcatttcgataataactaccccctccgtccctaaatatttgatgccattgacttttttaaacatgtttgaccgttcgtcttattaaaaactattaattcttttcttatcatttgattcattgttaaatatacttttatgtatacatatagttttacatatttcacaaaagtttttaataagacgaacggtcaaatatgtttaaaaaagtcaacggcgtcaaatatttagggacggagagagtatatggtacctcgcacgttgttacgagaaaattatgataaaaatcaaagatatgagttgtaaaagtttcttacttttttactatatgattttctttcatgtgcttatatattttatatcttgatcaattattcaaaggttgtaaatgattaggttgtatgggatgtcttttgtagagaggagatgtaatttgcacttttgatgaatgatccaaaagctaaaaataattaaggtgatgtggctccataagagagagaattaacattaactatacttagtggggatgaactttatagatacataggatccgtttgatatgtgttaccaagaaggtcaaattcttatagcctaatataccttttttagattttaggaaaatagttaattaagttcagaattgtatttcataactgaattcaaattaaaagaatactttgcaattccaactctttcaaactttgtttagggttagctctacaatgttctatgtcaggtttgtttccgccatatattttcccatatatatacgcccatctgagaaaacattcttcaacccatccgtgacaaagaaaccaaccaaaaccacaaaaaaaaaaaaacttgcgaaatgcccagtattgcacattttgctgtacaacaattcatcaaaatgctcactgcgtggcaagtccagtgtcagtgtcttagagcatccataatgttcatacaaaatgagtagtaagaagtcttcgtactactttacctttagagaaaatccatgaaatgccattgacaaacaccctaatccaagaaatgccatcgacgaacgcgacttccagcaaatgccatcgtacgagccattttgtcccaaaaatgccatcgccgtcactttcactctgttagacaccgttaattttgtcaaaatgaccaaattaccctcctcaacaaaggataaatccccttctcttccatcccatcgccggccactattcctcccctccacttcaatcgccagctcccgatgggcgacagcggcaaggcgacgctcccaggcggtggcacatcagttccaggcgtcgacgcgacgggcggcgaggaggtggcaggcggtggcgcggggctcccaggcggcggcgcggtggtcccaggcggcgcctgtggcagcggtcccaggcgtcgacgtgacgggcggcgaggaggtggaaggcagcggagcgtcggtcccaggcggcggcgcgtcggcagcaggcgtccgcgcggtggtcccaggcgttgacgcgacgggcggcgaggaggtggcatgcggcggcgcggtggtcccaggcggcggcgcgtcggccgcaggcacggtggtcccaggcgacggcgcctcggcagcaggcatccgcacgacggtcccaggcatcgactcattgggggaggttggccggtgatggcgaaactgctcttcttctcttgccgcgcggccgccgccgtgccgggccactttgcgagcacgcggtggccgtcgctagtggcggatccacctcccggacaggtcgggcggccgcccgtgctccgtcgatgtcgtcttcactacgaatagctgtcaacacctatcaaaattagtcgatcaccgaaaaacgctattactcgcccgggctcaacgatgccgctagctccgccactggccgtcgctggcgcagtgtacgacgacatcgtgggcgcgtaccgcgggttcatgccgtcgcggacgcgcgcgttcctcgtcatccaccatggcccgctcgagccgcacgtccgctgcccctactgcggcgcccgcgtctggagcatgaccgccgcggggctcgcccgcctctcctcctcttcctccagcgacggcgagcgaagcgccgactccgactccaaccacagcgacgacgagtcattcgccgccgctgacgtgagcctcccacttcctctggctagccgcgtgtcaggccggcgccttcgaggcaggccggccatgtaacgcatcaagcattagcggtagttttttttttaccggtggattgggatagtattatttggagtgagggcaatttagtcattcttgtaaaatgttttgttctaacggtgtggactaacggtgtgatggcatttctgggagaaataggcttgtacgatggcattttcaggaagttgcgtttgtcaatggcatttctaggatcaaggtgcttgtcgatggcattttatggattttctcttacctttatggaggtgggtagttaaggatgcagtgactcctagcaatagcacttctacctggtaagaagcagtagataaaattaaactctctcctctctcacactctcttttttaaccattgctttagatatggttcatcctaccttactatctacacattgcgatttgtaataactagcaacaattataacctgttttgtaggtcacaccttattacacactggatgaatatatagtgatgatgtccttaaggaaattagcatggtttatttggatttctaaggattataattcttagaagtgtcattcgattgtaaaaatgagtatgcactactgaagaaaccatctttggtcggtcgacccaaatccacaatagtcctagtttcattgaaaaccgggactaaaaagcatttttagtcccggtttataggtgtaaggggacgatgtgatctttaaaaatcctaactttagtcccggttgttgttcctaaccgggattaaaaatctatataccgtatataatcccttactcttatcctcaaaaatttctatctcttattcctcctctctctctcacacactcttaccctctctattcctcttctcttctctcggtaacttctcttctcttctctcgaagtctcggtagagccagcgaggccggcggaggggtgtggcggcgggggcccgagcgtggacggcggtggcccgcggtgggaggcgttggcagccgcccgcggcaagaggcggcggcggcaggagctagcggcggccggtttcttcctttttttttcttttttttccttttttaaagaatctgtgattcgttggatctgtgatgtatttgtatttgatctgtgatgtatttgtgatgtaagtttttttagaatttgtgatgtgaatattatgatttgtgatgttgttactttgatctaggatgtaggggcatcttgatttagaatttgtgatgactagccgtcaacccgtgcgttgcacgggtcatatttgatattaatttgttatcatgtaaaacttgaatgggttaacagattaattattcatatatatgtatataacaaatatgagagtttttaatactatgttgaatatcctggtcattttcttagttcatatataatttgggcaattaacaatattaaaatgagaatctaaaatatacataattcagaaatttagaatatattattagatttttaaaaaatataaataaatggtcatatatttctagctattgcggaagcttttgaaaatataaaatgtctgatttgtatagatctaatcgtcaaaccgtgcatcatactgctaatattcatagtattttaacaataaaatttttttatcttcgttagcttgctaactgtggttttggtcaaaagatctacacatgctaattttaaattttgaatttcagaaataagtggatattgatactgtaaagatctgtaaagacaataggaaaaacatgaaagatacatggtaaagcctattggttgcttatagagaacatgggagaaataaacttaatagcaaacgaatataccttgcaaactccctcaagattatgctatcaagatcacgaaagctgagattaatttatacatagttttagatgaggaacctgtaaaaaaaaatcaaatcttgctttaaaacggagttgtagtagctgcagatcaacttgaatcaaatcttgatagataaagtaataccagaacatgagaattgagcagggtctggttgacagagttcttcgggtgcagggtcaaggagatcgacgtataagatactgatctgatcgccggcggagtcgaatgcggcagcagagatcgatacgacgacaaggggacaatatatagatgcctaacgtacattggatggaggcccagataagtcgttgggcttttaaaattccacggttacaatatgtaatctatggtcacgatttgatgatctagctaatcaacggttagattattctgattaacgtgagagctccaaaaaaaaagtatccaattagtataggtatagattttgtgattttggtgggattggtgtgaaatcaatattcaagcaataatgaaaaaagaaagaaaagagagacgtggcgctaccctctttagtgaactaaaattcctctctttactcccggttggtgttactaaccaggactaaagagattatttgaaccgggatctggattcataagggttccaaaccgggagtaaagagcatttctccaccagtgatatgaaaatcaaaagaaatttttctttccctccaagttatagagagagcataagaaaatttccatccactcgaaccccttgaaaaaattatatagattgatgtgtgcatttcttaccattccttcattttcttattcctaattccctatgaattaaaattcctctaaactgaaccagcccaacaactagactaatcaagctcagaggagcctgcggcgcgtgcacgcaatcccaccagattccgtccacctgggcgaatccccggcaagctgcgcgatcaccttcgcgccgcgagcgaccgcgagcacgcgcgcgactttcgagcccgccggccatggcctccgccagggccccgccgccggcgcagctggggtcgctgtggtcggcgctggaggaccagcgcggcggggcgcacgaggaggagttggtcccgttcctgctgtcgtcgtcgtcgtcggcgtcgtgggggggcctgccgggagcgcgggagagggagaaggagggacttctccggcgagccggcgcggcggtggagcgcgggtggggcgccgcgcgcgccgcggcggaggagctgtgggcgctggcgcgggccgacccgcggaaggccgtgttcgcggcgaaggtcggcctggcgctcgccctcatctcgctgctggtgttcgtccgggagccccgcgacatcgtcagccactccgtctgggccatcctcaccgtcgtcgtcgtcttcgagttcagcatcggtacgtacgtacagtacagagctttgggaccgatttcttcttctgcttcatcttctttgggtttcttcgcagtaaaagtggatatgcttttcgatggtttttgtgctggtcctactgttcactagccttttaggtttgttctaaattagacattttcaaaatttgatatcaagttaatagaaaaatatagtatcatttttaacacaaaatagatatagtggatggaataaatgtaattttggtgttatagtttttatagtttttgttatgtttttgctcgctcagcctccttgttgaaattttgatattaaggaagccataatttgcaataggagctctaaggagctaggcttagtgatgtgctttctgtggtcatttcaatgactcaattggttggctcgactgatctcaccacttctcctaggaccgcaatgacaatcataattaaatttgaacaaaaattaacttacgataaaataacttataatatgaaataggagtattcatctgcagaaatgttttcactgtcttaaaatgcttaacgaaccactatattttcgaagcaactccttcgacataaagttagaagaacacaagtccctaactgtcaccattgaccgttggcctaggcagtggcttggctgtcgccatttgccatctcgcgatgctacttgatgtcacacactgtgaagctaaggtagccctagttgttccttcttaggatacacttctattctggacgtttaactatttgttactttcaaccaaacaagtacaatctcattaacaatatactctctcacaaagtgacagattatttgccactcacgatcctctgaagtggcaaaggttaaaaaaaaatatctcttcctcgtctcaactctcaacctatatatcttcccactcctaccttacgttagaatccaatcttagtttgtcgtctaggaagaaggttttggttgactaaaatgagaaatgccatggttattgtagttggtgggcacaggttaaacattgggagttcaacgaattagtgtacagagaagaggcatatggaggttgaacatgttacaagaaaccaatgataatatcagttgcctaaaaaaaagctataaaaaagaaaaaaaaatgaggagatgaagataagggtaaatttatcctagtaagttgattagtacaacctatagttattaatgctaatctactcatgaaacattggtggtgttatactggagttgtgctgtgcacgacttcatttaataagtgttcaaatccttatacctattaatatgatatatacatgttgatacgttttaaattgaattttagtggggataggaatttgtcaagtctttacgtgttaaggaacgaattcatcctgaggtatgtcgtgtgtgcgcaggcctttttttttttccgtgtaatgaaaacaaaaacactaatatactcggctcaggagctgactgttaattctagtggtacttgaacagcgatatggttttgtctgaccaaacaccagagtaattaaaagcgacttatactttagatatataaaaataaaaaatatagtactccctctgtccctaaatatttgacgttattgacttttttaaacatgattgaccgtttgtcttatttaaatacttttgtgaaatatgtaaaactatatgtataaaaaaaataataaatacttaaaatttttaaataagacgtacgatcaaatacaaagggagtagtagacatggaagtcatgatccatggaaaaacaagtcctgaacggattcggttccagtgcagtggccactgtgactgcaagttaagcagtcgcaggagcatcattggatttaaaacagatggctcatatgcctcttagtactgtagcattttttatatgaaaattgtacggttctgattttattgtagtaaacaatttggaccattggatcaataaatatagggcttagattgtgtgcagtcacaataccaactgctttggatctcaattcgtcctgaacccattcgctacgaaaaaaaaaaaaagaaaaccggcaaaatctccgtgtgccacggccatactcctcgatacaactgctctacgggcagagacaagccagtgtgcgcgcgagccgcggcaaccgccagctttccgggacacgcacactactccactagtacactagtgcccccccggccccacacgagattgagattccatcgtcagccaccgaccgaatccttcgccgcgggaaccttctagagcgttccggatccaccggccatggcggccgcggggagcgcggggtcctcgccgccgccgccgccggggcagctggggacgctgtggtcgacgctggaggaccagcgcggcggggcgcgggaggtgcccctgctgtcgtcggcgtggggcctgccgggcggcgggaggggcgg

SEQ ID NO: 3991 - DNA, 618 bp, Oryza sativa
tggcacctatataggtttattatttgaaatgttgagatcaacgaagaagagctcaaaatcggcatggaaggtgttctttgagatatggcgttcaagttttttatattgccagaaaataattttatagcaccttgcagcaaaaggggagaatgtgatacgcataaaattgttttgtaactcctaggttcttatcatggacaaacttacggtgaagattatgtcattttcttgcaagatggcagatgtgatggaagaaggtgtttcatgtaagtatgttttttaccttattaagaagccatcagtgttttactgtttcgttccttacgaaatatttgatgtgtccatactccatttgttcagtttcagtgcatttgaatttatgcggcaatatatgaagtatggctaagaccctacaatagtggtacacggtgaagattgtactgcgaagtttgtcatacagcctaaatcattttagcttatcagtctagggactcttaagtggtcctggtgaagccacgtgaatatctattggtagtttcttgtcccgagatgtcatgaaaatagcttatgccatccttaaataagctttatattatgctagttgcctagttctacaac

SEQ ID NO: 3992 - DNA, 705 bp, Oryza sativa
caaaatagcactgcatgggtacacattcattcactgtgttgaaaggctagcagctgcctcgctatctgttggcatgggaggaggccaacggcctgctggtaaccaggtagccctatcggcaaatggtttgcggatatgacctgtcagcatgtgtttttgccaagaggacctgtctcggtgacggccactccggacacatgtccaccttttcagcacgccacgtgtcgacagggctagtcggcattctgcttgggtatatggcgtgctgagtgagtgctattttagcaaaagaatttgaaacccgatacttacaattttccattaaaaatattactaaaaaagtaaaagaactatttgacgacttatcgagtcattcaaattttattttgttgtgttttgctaatatttgtttgggtgtctattttcttaagaaacttttggcttaaaaaaacttctttgtgccatacattttacttaagttgtttgctttcaattattttaggaatttcctcgtgtgcactatcgtgttgccaggacgattgatgcttctactttgacaacactacgagatttggcacccacaaagcttgctgctggtgtgtggaattgccttgcaagatttaaggctatgatacctgaattccctcagactgaaacatgtgaattacttatcgtagaccgatcaatagatcaggggtgcaggaa

SEQ ID NO: 3993 - DNA, 2039 bp, Oryza sativa
ctaaacaatgcatttcgtgtaattttattttattaaaatacttttaataagcaatttttttagccttgtagtagttaattcatcgtttatacctcaaatagaaaaaaaaagataatctatcaatctttcaatttcagctatctcaaatggggccttactagctagcatcatttcagggaaaagccatgcaatattttccacatcatcatcccatcaaaacatgatctgttattttccatttctctgcctgttcgatctaacatacatgtgaatacatgttgttcgtccattgtttcaaagaaaccagataaaatcggttatagttattttttcttctagcatccccaaccaatcatttcactaatagtttgctaagctcactccatactccataggaaaggtatatggacactcctaagtgaacactccattttttaaaatacatatactccctccgtttttttaatatatgacgccattaaatttttaagatatgtttaaccattcgtcttattaaaaaaattatgtaactattatttattttactgtgacttgatttaccatcaaatgttctttaagcatgatttaaatatttttatatttataaaaattttgaataagatgaatggtcaaacattgataaaaaattaacggcatcatataataaaaaaacagaggtggtattaaatatagtgtatcagttctgacttctgagctttctttgatgttaaactataacaaccatctctccacttgggactcagcttcggtgacatcgtgtaaccatgtcacagtgtaacattcggtggatctcagccatccaaattgaatccaacgcctgttttggttgggcccgcttgcaggtaaaaaaaaattccccaatccatccatcccgacgggggacggcgccccaatccatccatcccgcgtgcggctctcctctcgttcgcccgccgacgcgagctgggaggcgcgccactgccgtgactcgccggcctcgccgcgagtggggagggctacgagcgtccgccgtcgtgcctcgctgggctcgccgcgagcgccacgcgaggtgtccgcgctcgcatcgtcctcgtcaggccgtcgcggagaccgaggaccgcctcgtccgtccgcgtccgaccgtccggatttgctaactcgcgcacacacgttgccggcgagcatgcccggccaacaaggcccacgcgcgcgcgagattttttttttctctaaccaatctctaacgccggtttttccgttttttcttccgcgttttttcttttggcgtttcttttcgcttttttttgcgttttttttaatcttttagcacacgtgttttttcaaatgttttgagttgaaagtttttaaatattgacttgaaaattttttaatttggccttgaaattttcaaatctcaagtgaaatttttcgaatctgagttgaaagttttcaaatttttcatatctggacttgaaagttttcgaatgttgagttgaaagttttcaaatctcgacttgaaaatttttaaatctcaagttgaaagttttcaaaattttcaaatccggatttgaaagttttcgaatcttgagttgaaagttttcaaatctcgagttgaaaattttcaaatctcaagttaaaagttttcaaattttttaaatctggacttgaaagttttcgaatctcgattctcgagttgaaagttttcaaatctcgaattgaaagttttcgaatctgagttgaaagttttccaaatttgactttaaaatttgaaacttaaatcaaaagttttcaaatctaacttaaatttttctcaatttgctagtaaaaatatctctcaaaaaatcttcagaatcttttctaattactactagtatcattagtattaagtgttaactaatagattaatagataatagatgtagttaaactactttaagggaggtgctcgcagctaggaggcccccccccccccccccggggcgtccagccgaggccctgccgtcccgccgcggacagggaggggtcaggggcagctcggcg

SEQ ID NO: 3994 - DNA, 12360 bp, Oryza sativa
  unsure (1)..(12360): unsure at all n locations
ttctccgcgacctccagggagaggagaagatgtcaaactccgacatgatcgctgttctttgggtaagtctcgtcttcgtcgtaaagctcgagaaggaaacgtccatggcgttttcatggattggtttcttgttttttctttctttaggagatgatctttagagggacggacacggtggcttgagcaatggcagccgccggcttccacgcgcctccctggccgcgccgggacggcagggtgccacgctgccgcctccgcccgcagccgcgcgacacgctcctccagctcggcgccgcgcctcgccgcattcgaggcctccgcctccttctccctccggcagtccggcgcagcctccccgtctgcaacaagcaagcaaaagcgacgccaccaccatagaaaacgcatagtcgaacaccaccagcagcaagcaacgaatcaacacgatcgacgacgtcgacgatcctcacatgatcctggaacatacgcgccatctcgttcttgtaccggtcgaactgcgtggcgagctcgtcagagaggagagacaacgcggaggaggtggtcgtcgtcgacacgtgctccgacccgccgtcgtcgaagtcgaggcggagccccgtcgccgccggcggccgcttgttgtgccgctgcgccaggctcaccaccttgtgcccctgcgcctggcgaggaagaggggaggaggcagatgctgctggtgctggaggtgggccggtgctgcttcccgttggattagttttcaacgccccagatcgctccaatgtcacaccgtgacatgccatagtaaagtcaccgaatccgaatcccccatagaacataaacgagtacctttacgatactctccactagtattattctactttcagtattatctctgttgaagtgatcttaactataaattaatttatgagtcctaccgctagtagaaaaaaataccagtagttaatgtgatagtgtaaatagatattatttattgaattagaaaaaataaatggcttacatcttaagataaacatacctccattcaacaagactaacagtttatgaaaaatgaaaatcaatcctaatttttttaaaaatatattattgaaaaatctaatctagcaatatctatgctcacatgcctaatccatcttactataaaatcataacccactaatcttaaaactcaatatgcaaacatgccatctgatcatccactagcaataattatatacaaaacttatacaagcatgcaacatcagactgagtttgtatgttgtagttgggaactaatctcgtgcgcacgtaaaacagagcgactcatagcacacaattaattaagtattagctatttttttaaaaaaaattgattaatatgatttttttaaagcaactttcttatagaatttttttgcaaaaaaagtactatttagtagcgtgcacacgaaaaaacgagagggtgagatgggaacacaaacaaacgaacacagccctataatttattgaattctacaaatcaacatccaatcatcttcttcaaattatttttcacaatatttttaacatatatacatccattatttttataatacttaatatatatccatccatataatcaaagtgcgggatatcatatttcatttacaatcttatacagagtctaataaatttatttctctctgaacatagtttgacaaaccagttttatttgttgttaataactaatataatttttacttttagcttgattattaaaaaatattaaaagtagtaattttcgtagcgaagcgcgtaaatcacctagtattataaaatcctaagtctgattttttctcattctccacaactagaggcgaggtttggctcctaattacaacgtgcagctcgttcgtgcgctaggaggaggtggagtctcacgctagagtaggagtgaagaggattgattctatttgatgtgtttttatgtggtctacttttttgttctgagaagtcaaattaatctgtaaaagcatatctaagagtctctccatttgcttctctaaaccaaaatttaatcaactttagaaaaaaaaagtagccctccaacattgccatgaggcaggccatgaggcatttggccagccaaccagcaattctcgtggtccacttccacttatgttgccccatccaccgtcgatgagagggcggcgagccagaccaagcaccaacggcaacgatgacacggaggaagcccacgatgagccccaggtcgacgcggcggagaaggctgcggagcacttcttgtaggggcaccggaccttgcctataatagcccgcgctccagaactacgcaacccagcccatccgacaagcaaacccatttacacatagcacctcacttacacttttatatactcgcttcgtgtatattgattaccgtgagcggtatatagttggagggaaaaataacttatatggtttcactcttgctcaactcgtaaggtgatactaataaaatgcacacaacatttaattatgagtcacataggccacatcctaattgagctaggatgtcacaatgccaaagcctaccgccatccaccgccttcattacttatcgttgtctactcaagctccactctatttccttcctttccccaccctcgttgccaatgatgtgatgtggtggccatggtgtgggtgggaagggaaaagatgtattggagaggaagaaaatataaataaagattgacatgtgaagcccacaattggattggagaggataaatagagaggatgttaaagttaaaggtaaatttcgctctctaattttttttaacaagctaactaaatagacatttagagagtcatatttaaagatgttgttagagacacttcatggaaggatattttcatgctcttagggcaatagcagtgcagctaccgtacttgagaagccaaagcctccagctagactaggaacggtgtaagaaacaccctccatagtgtatgtggtattaaataggttccttcacagtacatgttacttattatagtgggtctcaaccgtctctctcttctcacttttcatctccccctctcatccctttgccttttcccaccagccaccaagcaaaggaagtgagacactaggcggcccaagcggcgacgcgttaggcggggaacggagaggcggcgggatggcaccacctctccaggcgacgacgccaccaaactcaccggatccgaagtcggctagcagcggggtggcaccacctctctggacgacggcgctactgagctcgctgaacctcgcaataactttggcctaagccgccgccgagcttcacccccctgtctcgaatccgcggttatgtttttggttcatgcgaggttgaggtgagctccaacgagggctacggcgccgacaaaggcgagctctgacgaggtctgtggcatacgtgcttttgcctcccgtcccagtccttgcatcttgtgaccatcggtgggtggatcgagcaccggagctggagctcggtggtgcaagctggagggagggtcgcaaggggctgccaccgccgttgagctcctcggctgcgtgcgatgcggcctcctcccctgacagatctggccacttccttctcattatcctcctcgccgcctctccttcgatcctctcactcttttacctggtggagctagagtacgggacacgaatgtgtgggtctagacctgcgaaatctaacgaggaacctatggcaatatttggctctgcgttcttcatgtagcaatgcaataggtagacatggagtggaatctccgacgtggctagcttgggctaaattccacttcagtgcactatgaaaatccttagacacccctttggaagaaaattctatgcggcagcgtcgcatgacgcttctcgtgtgacaccgtgcgaactggcgacgcgtgtccggctgccgcccgcgtgagagtttcctggcctgctagctgctgctgctccctgcagacctgctagctctcgcggcgctgttgttgctcgcacgcagcgcgctcccgcgccgccgccgacgacctgctgcattgttgcttctactcgcgtgctcctgtggcaccgcgctgtcaccgacttgctgctcgtggctgcgctctgacgctccgctgcctgcctacctacctagggatgaaaacggtcggaaacgatcggaaaacagcctcaatcatttccgtaaccatatttttcttggaaatgaaatcggaaacggtaaattcggaaatgaaaacgatatcggaaatatcggaaaaccggaaacggaacaatacagacggaaacatgtcggtacagatcgaaaacaggtaacaaatacggatacattaaactataaaaacatatatttaactttacataagtatgttatatgtatacataaattcaagcttatactatataaattataaattaacttcattttagccatgtacaaaagttagagatttgattgaagagtcagtcaatatgtaagctgcgggtcaagtatagacatgctctataaatatcgacatatttagaatatggtaattaccatattataagaaacggtaattttcacaagaatacggtaaatacggaaacgatcggtataacagtaaaaccatttctgttttcatttccatattttttaccatttccatttttgtttcgatcgattatcatttccatatggctcggccggtagaaagtcgaaaacgaacgccggtcggccggtaattaccgttaccgttttcacccctatacctaccggctgccacaagggagcagcagggcccttacagaagcagcagcagccgctgccgtcgtcaccatagcagattagagcgatggctgcctttaagctgcggcctgcggctttgactcgtcccaataggcgtcgactcggctccagcaaaaatcgcgataggcatcggctcggctcaaagaaaaatcttgtgcggtcggtagctgtacatacgtcaccagttcgtacggtgtcgcacgagaagtgccatgcgaaactgccgcacagaatttttttttcccacccctcccccccccccccctctactcctacccctgaaatcacccacaggaaaaaccactcggaaaccgtagctaaagcccggaaaggaggataggaaaaccgtgcaaacggggccagcgagcagtaatgacagcggcggcactgcagcagcattgccagcgagctcctccactccacctctctctcttgtctctttcacgctctccctctcctctctctctctctctctctctcgctcgcttgctttaccctctctctctctcttcctcactctcactgtctcactgtctcactctctcttgcccacatttttttcccccggagagcgacaactgcagggcccaaaaagaggccggattctttggtgttttctgaaccttctttacttgtcctcaaatggccacctcttcctcctcctcctcgcatttcctcccatagctcgcattcgcattcgcatcgcactcaccctctcctgcaagcaaagctaaagcttcggtttggttatttcctttcctcgccgcttttttctttgcttcttgcggtggccatggcggtaaggaggaggaggaggaggagtagagccgcggcggttctggtggccgcgctgcttctcgccgcctccgccgccaccgcctccgcggcgtcgtcttaccccgcgagtaagcgagcgagcaagctctcggtttcttcttggtttttggtgttctactgtttcttggctgaattcgtgtgtttttttgggatggttggtggcagaggtggtgaccgggttgctgtccagcacggcgtcggcggtggtgaagcagctctggtcgctcaaatcgaccgccacaaggacgggtaattcgtctgctcctcctccttggagaaaagaaatttcagttcttgtgtgtgcgcttcttccggtttcttgaccggattattgacggtggtcggcggcggcggcagggtcggcggcggcggggaggtcgatggtgaagtacgagggcgggtacgcggtggagacggtgttcgacggcagcaagctggggatcgagccgcacgacgtcgaggtcaccccctccggcgagctcctcgtgctcgactccatgaacagcaacgtctacagggtccagctgcctctgtcgcgatgtgagcattgctagctcttcttccttccttccttcctactactagcttttcagctctgactcacagtcttcttcatgggattctgctaactagtactactttatgatgattgtcaactcgatgatgtgaggctgtgagtttggtttggttggtcagtttgtgattgatgatgtttgcatgctagattttggtccaggctagtttgtttgttgattgcgaaatgtttgttagtttcttgtttgcaattataggttatgatgtgattgtgctttgctacttggtcactttcactcccattgtttagggaaagatgacactggagttgtcctctatcttaggatttgactaaacaggaacctgaaaaatcattggtgaaatgaaatacatcgtaatttgtttgtccaaattagtacaaaagcttcactatctgatgtttttttttaaggcactgtacgaaaaatcggtgtcgacattttacttatcaattgacgcatttgagatcaccagattctgatgtatcttgtaaaaaatggatcaaacattacagatagcagaccgaagcttgttgctggttcgccggaaggattatccggccatgtcgacgggaggctgcgggaggcgaagatgaaccatccgaagggatttacagtggacgataggggaaacatttatgttgcagatgctatgaatatggcaataagaaagatcagtgatacaggtaagctaaagtgtctcttatatggggttgttgcacatgatactgtctggtccccaagcatcctatgtttgctatttggttttcattgtaactcttcagcacttgtgtccaaaggtgcatttgaaacaagttgtcagagtgcatggaaaggtcatacccacagttttaaatgccaaaatgatagtctaagtggggtgtgatccatggaagtgtttgtggaatcgtggttataaaactttctaatcagcatttgtcttatttacaatgtccccaagttttcagaaatcatgacatcctaacagttatgtgactattgatgtcagaaaattgagtatcacttgcttttgcaagttgcaacagtggaagagatgtcacacattgaaatgaacctcaaagtggacaggaagattacatgattggactttatatactagaatgatctcactcttgatatatagtgatgtctgtaacccatgacatcatatttactcattgagattgggtatgttatgagtgtgttatagacttgtagtgcacttataatgcacttatgcacatgcagccatgcacaaaacattttgtatatttgtaaggtagatttctttttcgtatgaaaatttatttatatgcttgcttttaatatctctatccattttaaattcttcaagtatacattttttttcttttaattaattaatttatctgttctgaaggaacttcatatttgagttttccttctgatgaactttgtttggacttctggaagggcctagcatgcatattattcacttagtcatgtaaatcaaaatgtctctgacaaaccgcttttatatgcaggggttacaaccattgctggggggaaatcaatgagaggtgggcacctagatgggccaagtgatgatgcaaaattttctactgattttgaaattcgctacatcagcagtagctgctccctcttggttattgatagaggaaaccaagcaattcgcgagattgcactccacaatgatgactgtgaatatcagtatgaagctggttttccactaggtgcatctacattacaataagctttctattagtacttcttgaccagacaatattgttgtcccattttctttttaaacaaaaatcgtctcagatctacacatttagtcgaatgacctacatattatatagataagggcatgttaaaactgtggacattaaccatttgagtttgaattcacaggcattgcattgctttttgctgctggtttctttgggtacatgcttgcattgcttcagcgacaggttttagggatggtatcaacagcagatgtaagtgcttcattttgttgcgttattatgcgaacaaaaatattgtttacgttttttcgaagcacaagaaatgtaaggccaagaactataagagcacagtccacagttgtactataaacaatgaatacagacctcaagtagatcatggtacagctttaaaatgaaacatggattgacattgactatgaaatagcatacgagcgtatggtcaaggacactgaaaaggtaacatacaaaataaagtaatacaatcaattttgttgtacctctagagtgtagactctagaccaatggtaaagcaaagacgaataccatacatgttctcttgcccgctttgtttttatttctaatttcatcgccaccttattttgtatggaaatttgaccatacaggaacctcagactcctccaagacccagcattgcaagcatccctccatatcagaagccactaaagccttcgcttcggcctccactgatcccaaccgaagatcaagctgggaaacatgaggctgaagaggggttcttcacctcaatcggcaagctcatcggaggagcaaaatcatctgcggtagagatattctcacgaaagaaacgcccaacccatcagtaccatcatcaccttcagcagcaaagagccaacccttggccggtgcaagaaagttacgccatcccacatgatgagacaccgccaccattggacatgagagcagctactcctcggaagaactacgccttcatgacgaaggagcctgaaaaagttcaccatgtccgccatggccggccttacttcaacggctgggacatgcagcatgcccctcagcaacagccagagcagcagatgtaccaccagcagcacctgcagcagcacaggcagtactccgcaggcccgcaaactttctacgagcagagctgcgagacgacaaacgagatcgtctttggtgctgtccaggaggtggacaccaagcggcgaatggtggagatcaaggccgtgaactatggggacacattctatgagcagtacgggatgcggtatcgcaacaattacatcggctacaacaacagcagcaacggcaacaacaacagctactactattaaacaaccaacccttctgccctcaattttccccctctctctttatccctgtttctttcctatatgattagatttaccgctcgcgttttcgcttctcctgacctccgcgacgcctgtaacaaaagaaagaaaaagcgggggggaagtagaggcactaatcttcttcagtcctgacctgtgcaatgcaatggcaaacacctggggaggggtttttgtactacaccctgatgatgatcagacactcttacactaccatcctgtacatatattttgttgttcaccagctcagctgttcctcaatccatgttggttgcagcaccaatcagtcatgctgtgatgatctctttgcactactgctgtatcctgtatggctgtatgttgtgttgccgcacccaccacctgatgagcagctcagctgcatcagtggagcaggcaggcaggcagctgccgagaccacctccactgtcaagaaagctttgggagtttagtggctgcatcatgtagcgttcgacctcgacacaggaaacttgcgaaaagcaccgcccttttttcagtcgatctttgcacatgccgatgcgcagcgagacgaagctgaatggcagcttggttgctgtttgcaaaaaaaaaaaaaaaaaaaannnacacactgcaaacagcgttacagcaacagtagcttctcactcactcaccttgcctcgtgacgccagtgaatgcactcaccgatatcaccgtctctccagtggaggaggacagccaggggacacagtcctatgtgaccgtggtcagatcagaagttttcagatgtatgtatgtatgtgtgtgtgtgaccagttttactgcgatgaggggtcggcacaccgctgacatgtatgtggacctgacatgtcggatcatggtgaaatgaaattcaagagtgaggacaaagcaatgaggcgatgaaaataaatcagattgtccatatctgaaaaaaaaattgagaagtttgtgagaggagaggtttactatggcacacaggtgatggtagatgctgtcgttgtagcaatggataatgtttgcagggatacgttgctgagaagccttggagggcagtgggcaccattgctggaggacagagtcgtacacttgtgcaggctctggaggtgtctctgatgtccatgaaagatagacatgtttctggcagattgctgcgagacaagcttgacgatgaacggtgacatgttttctgatcctctgctgcgagacaagctcgatgacgatgaaagacgacagggcctgaaggaaagacactcgatactgctactgcccattcattatcatgtggttgaatttacactcaaaacaaatgttgtcgatataaaaaaaaaaacaccctactacatccgtcacaagagagttcacttttcaacacgaatctgacaggcacttgtccagattcgtgtataaaagtgaattaattcttttgagaacaggggtaatacattatatcttatcccacccgattagtcgaatgaagcctcggcatgttcaagtcaagctatgcataccaaaattttgcttatctccagccaacaggtagttaatccaaggcaccttcttgctgctgtcactactaagccacctttatcttcgttgaggcagcgaactttgattcctctgtcatgctagctatttacttttcgttgaggcagcgaactttgattcctctgtcatgctagctatttactttcttattaggtagcaacacttcaatcatcactaataagagttcgctgaattatttatgaaaaaatggttcatctgcttcttcaattttcatgtcaactgtcccctctagatacatcaggaaatgatcccagtatctgaaccataaagctaccagctgaaaaagaaaaaaaaaacaagaaaaaaacatatcatcttcttgttttgagatcttccccaacgaatgatccttccatttcttggatcatggctaataactatttttttggtagataacatttctagtccagaatgtcagagaccatcatgagtaacaacataaaaagattagtagtaagatgtacctatgatgaagatagctccaacaaatcctgtcatgccccatctctcaccaagcatagcccatgcaaaagctgcaccccatacaggttccagaccataaattattgcagtttccgtagctgatacatcacgcatagcagccacctaagacaatgaaaaggtccacacaattaacacttcaaaatgttgtcctcaactgaagagaattgatgcagtgaggataaaatgttacctctgcccataaacaaaaggtagttgagaatatgcctgtgtatagtattgacaaccagggaaactgtatcatcacaccaaataacttcatcggtgactgtaattgtgaagtccactggtgcacattcttggcggagcatttaataaagaatgagactgcagatacaaatgctacaacaagcacctgggtttacatttcctatttagcacctcatctgtaacagagtaaaaaaaaatatcatgatataaattgcaaaaatggagaacaaacctggcatccaacaagagctggaaaattctctttcttcatatttcgggaaatatgctcagtcctgagcatatgaattgcaaaaccaaaggcactaaggaggttcagaagatcaccgacctaatgatattaccaagaaaacatcagtactccagaggaccgaaggaccaaattctaacaagaacgatatttgacagagaggaatattgtagtcataagtaaaatagacaaaaagtgcagacaaatttgttaacctgttcatgtggataatctgacttacacatggcggtgaaccacttaactccagaataccaaccccaataagggataaaagtgctccaatccatgtataggcaggtatttctgctccaaggatcccatccaagaaagggacaatgatcacctgaacatatttgagtaaagaaccatgaaaatctatatattctagggaggaccttattggactaagcttgagaaacatgtt

SEQ ID NO: 3995 - DNA, 686 bp, Oryza sativa
aattgaacagaagttgcacatttatgatctctgccccacctttccccacaaacaaaacagagtcccttggatctacgataagctttcaatgaagccaatctgtcatccttggccttggatgcatcgattgcccttttatcttctgtcataaccacagtaggagtcctaggactatgattcactggactgaattgattagttctaggaacctgcctgatgctagaagaagattcagttcttttgctgctcacagtcttgataccctccaatatttcctcttgtaacaaagctatagaacaagctgagtctaaatcttggggcctttgcaacattactgctcccctgatctcatcccttaacccttcaatgaacttttggacaaagtatacaggagttaaggcactgtcataagccataagttggtgcattatgctgtcaaatttttccacatattctgagactgaactggattgttgtgcatgaaaccactgacggattagagcttcctgtctatcacgggtaaatctagcacacaccaattcacagagagtctgccaggtaatccccacaatttgttgcctaattgactgcaaccagaacgctgcattgcccccaaaattgagcgtagctaccttaacccagtgtataggatgaataccatatatgtcaaaatactgctcacaatt

SEQ ID NO: 3996 - DNA, 2615 bp, Oryza sativa
ctacccaaaaagaaaaaagaaagaaagtggccagagttaccaccttccattgaactttttgccacgactgtccacttgaatttgtgaagtgcccaaccaggaggaatgctttgccttgttctaggtttacaactttacatgttaagccactaactgtctttctattttaaggccccattcgtttgcttagtttggaggagcttttcagccgctgtgaaatgagaaagcccattagcacatgattaattaagtattaactattataaacttgaaaaatggatttatttgattttttttaaaaaaaacttttctataaaaagtttttgcaaaaacgcgccatttaatagtttgaaaagtgtgctgatggaaaacaaggaagttgtagtttggagttgaagaaaagaactaggcctgaatttaagatcagtaatatgctgatgcatgctttagcattttaaaagaagacaaaaacatgctcatgtacagtctcacaattcctctaataactttaataaactttcatattgcagaagaagcggcacctggattttcaggtcacacactacagacattcacagttgagaggttgcgtgcacttctgcgacagaggggcctcatgaccaaagggaaaaaggcaagcaaaaattgtcgttccaagttctcttgttctaaatttaagtggtttcatgcttttaattctgtcactagtatatgtatttgaatttttgcttgtagaatttattttagtagaatgtcagctaagatgactggatatccaccatttttgaacgtttggatgattctgtagtgtctgacacctgatattttcctaggaagcttagtcagttacagaatttgtccattagtattccaaatgttccctcaggacttattcgttgcatggcatatggtaggattttgtttctgtagaagcttcataattttttagtgaaagttggctttacaaaataaaatgaatgggatgataagagcctgagctttgtcatgtaactgcagtattgtgcctaatagattattttaagaacaaaatatagaagttcccaaaacaagcttcttctagagatgcttgtgttgtcagtaggctgttgcttttttctttcagtggcagcacattatggtttttgttatatttacactatttgattttgacgccgcggatgtggcattagtaaatgaactttcttgttaataaagcattgacagtcttcattcttgcacattagaaaataacacaggttcccaaataagaattattttcacataattgatcatgcctacattgatctacctaggccataatcttttgtgcgagaagtgtattcaattttttgatgtatgatgtccttcctactgcaggatgaactcatcgctcgcttaagagaatcacaggactgatctagagaaagctcgtgccgtactctctttgtaggttgatgcaatgtgtttcctgatttgctatgtcaagctttgctgggagcagaatgagaaccaggcttcatctgttggctggatgttaaggctctaggagatgtagtcacttaggttgggccttgagaacttgtgcctaattgcattagcttgtcagaaatttgggcttgggttccctgtttgttagggcttatccagtgctttacttggtacatgtagaaggctaatctggcagtgtttgtaaccttttgtctcatactggaggagttaccatgctaatttacaagcatagttaaaagctaatcgtaccatgtttgaccaattgagctatggaagaaagcataggcgtgaacccagctcagaagtgaatggcagatagcaaaaaagaatagacttggaaatggaaaaaaatggagcgaaacaaaggcatacaaattggaaaatcagcaggaaatgtgctgattactcgtatcgattgctttaggaaatatcgcagtcttgagcagataaattctttttgtgtgtgtgatctcaattctacattgtgttaggtgcaaacatcacttctttaacctaatgcttcctgcaactcgagctgttttattgggtggctgcaaattgcaatttactacttatcttccaacttataaccctgaaagaacagcattacagaggccgtttcttcctatgtttgcccctttatttcttactccctccgtttcacaatgtaagtcattctagtatttttcacattcatatatatctatctagattcattaatatcaatattaatgtataaaatgctagaatgacttaaattgtgaaacgaaggaagtatatgctttgctgcgagatagaaaatatggaatacaaaggagcctcagtaaactagaagcaaacagtcgtagagatggtccaaagtagtggtcatctgtcaattgtcatcctctcagattttaaattttttgctgatattttttttctgattttaaatgtcatctgtcaattgtcatcacttataaatcttttgctgattatctttgtattttttttctatgacaaatggaatagtttcaacagaaaattagacaaaagacagtacaatcaaaataaaatgggttttactccctctatcccatattaagttcacttttggttactctcat

SEQ ID NO: 3997 - DNA, 1656 bp, Oryza sativa
taagtcctcgtatctcttttgtcatcaagatcaaggaaaaattaactcatcccctcatgtatcaaaaccaagaaaacaatatacatgcatacaacctataaacactggtggagaaaccatctttcgtcggtcggccgatttccacaatagtcccggatgcaataaaaaccggggctaaagatgatctttagtcccggttcaaaagggtaacgggcatatttgatctttagtcccggtttgtgttaccaaccgggactaaaaatcatctttagtcccggttcgaatgctgtcagggcctgtcaggcccccccgggatctaacaccaaccgggactaaagatcttaactttagtcccggttggtaataccaaccgggactaaagatcccggtgatctttagccccggttggtgctaccaaccgggactaaagtcacacccctacatatatgtcttcttcctcctccagctgcccgagcaagcttcaaaatttcttcaaaaaagaggggaggtcatgccaaaatttctattgaatttattttggtgattacatacaaatcggagctgcctaaaaggtttacaacttcatcctccaatgtttttttttgtcatactacatttgcacctatgttttgcacactttttttgtctccaaaatttagttgtaagttgatgagagagaaaatgtgtgtgggggaagaaagaatatatagaaatttagttcatttgctaaacaaggttttataaaatagttgagaaggaaaactctagtgaaagttaatcttaaataatagaaaacaaactaaaatgaaaattaaaagaagtaaaacacattaaaattagtttataactttacaaatagcttttaagaattatttggtgtaatattttatgatttttgtatgaataaagatatcttataattattgtatgactgtcattattgtaagaataattatttgtgtacggtttttttgactcatgtagatggatcggcaatggatgtacgctgaccggcggtccaaagagtttattgacggcgtgcactattttttgagagtggccgaagctagtaggcaaaggggttttatttgttgtccatgcaataagtgtaagaatcagaaggagtattctgcatccaggactattcatttccacttgtttgagtcggggttcatgccaagctataattgttggacatcccacggagagcaaggtgttgaaatggaagaagatgaagtggaagacgacaatattccggactttgctcagtatgttggatttgaaggaaatcaaacgggcgaggaggaaatagctgctgatggtaacgacgttgcggatgatcttggtcagatgttgcaggacgccagggaagactgcgaaagtgaaaaggaggcccataaattggacaagatgttggaggaccacagaacttcgttgtacccaggttgcgagcaggggcacaaaaagttggataccactctggagttgttgcaatggaaggcaaaaaatggggttagtgacaaggcatttggcgatttattgaaactcgtcaagaacattcttccagggggaaacaaattgcccgagacaacgtacgaggctaagaagatagtctgcccgttaggactggaagttcataagattcatgcatgtccg

SEQ ID NO: 3998 - DNA, 705 bp, Oryza sativa
ttgttaagatcgagtgacatcataacatgaaaaagttagtgaagcataattattaccttatgcttacaataggtttactccaatctgcttccatgtcatcaacgtggccaccaagcatgtcacctatagacagggataggaacatgaaactttgagattatttcctatcatttatatcaatctaaaaggacagtcactgttgaaggagcaaattacatacttgggccataatagttcactatggcggcctctggcttgaattcctctccagatggcatggctggaatggccatcttttttgcaagagcagataggaggtctggaatcttgttatgtggaagtgatacatcatagttgcgctgtagtgacagaaggattttacacaagaagtcattagcatccttggttaagttgtcattaggaagagctaattgtacaacctttgcatatctccgtaatgtcaaaagattgccagtatgcctcaaatttcaagctgaacaagatgatataattatatgatgtaagcactgtgagattattttgacattactttcaggggttgtaatgttcaggcacatagcttgcagaacagccatactaaaataaaattccttaagtccgtagaattggctgtgtatatcccacttgggcatagaggtcagatttttatcaattatttaaaaataacgtatgtgagcatgtctt

SEQ ID NO: 3999 - DNA, 10325 bp, Oryza sativa
ctaaaatctttccacttttggcagcagtgagtaagtcaaaaattggaccatacaaagctgtcaggttagttctattaggaggctgtgggaaggttttcaagctttccctgatccaatagcattgttcctcaatagatagagcaccaggtatgaaatagaatcctacaaaattaacacaagaaggatatcattaagtgtcacaaacattatgattttttttagaaatatgaccaataggaagtgcaatgtacgatgtgaagaatcaatattaaattgagcaatgtattagttgaattataatcaaatagactacataatatttgttgcagcttgcgcaccatctttctttctggatttattctaaatgaccaaacttatcttaaatttcagagtgagctctatgcctccatcaaaggtataataacaatacaagtctagcatatgttacataggtagtaagatggcatccaggaatgaatcacaccaaggatttggtatcttgctgctaccagagcaatcatgacaaaagtaacacactgttgtgatcacatacaaatcaagcaatgttgcgagtataacaagcaaagtagtagtatacccaaaacaatacttgaatcaaaatacattaggtgctaaaagagtatatataaaaataataagcaagtagtatgccaagaaagcatctatggagtatgatagggtgatcaaaaatccgaagctcccaaactagccgccatgaacaatcgagaaatcgaactgtgaagcgaatggtggagctcccagattttaccaggtcggtccaagaagcagaagaggtcgaacccggcgacgtcgcgcctcccgatcccggcgggcagctcccccccgccgccgccggcggcagcgagcagcgcgtggaagtcgaccaccgcggacaggtcctccaatcctccgccgccgccgccgcctcctggcttgctcctgcagcgctgcagaggtcagggcggctagatagatggatggatggatgcgtgtggacagggggagagagggggaaggagagggagagggatcgagaccttgccctcccgcccttgggcttcagcggcttgtagagcttgtactgcttctcggctcgccggaacgccgtgcgctccgcggcggcggcggcggccggctcggtgtcgccgtacatcgccggagggagaggttttctgacgggtctgtctgtgggcggtggcctaatggctgaccggtgggcccaacaagcgtggtcagggttttgacctgggaatttcctgccaccattatttttcacgaaaccaggtactccctccgttacataccggtacataatacaagccacaactattttttaagttacataatataaaacatgatgtatgcatacaattaattagaacatcttctctattaaattattacttttttaatcttctaccctcaagatctctaattatatttattaagatgatttaaattagaatatgataataattatttattggtctttgggttaagagtggttgtgccttatattttggaacggagggagtaataaactcctactatcgggtaatctatgtctcatattataagttgtttagctcttagtcaaagttctttagatgtgactaaattattgaaaaaactaatagcatttacaacaccagattagttttagtaaatttagcattgaatatattttgataatgtatttattttatatttaacgtattagtatatttttctataaacttactaaaagagtcaaatgacttataatataaaacagagtattaagcactgtgaaagtgatatataactacacccgaatcgcaacactactgccacaagtataaggaaataaaatatgcatgtacacggtattttctgatagcaaaatttaaaaagcaggtgcccgttgctcctcccaaccattgcatgccctgcctctcttgccttttgtatgttgcatctttatcctctaaaaaacatagatgactcaggattttatgaacatgttgaatcaacatatacacattttgtaaaacttcgctagctgagatggatccattagagaggtttcgtgaacttgttgaactaaggcttcccaagccaatattgtagccaaaactccactcctacccaatttccctccactttctcctaatcacagtttccataatcctcacaatttacccaatccttaccacctaattttcaaaccttccacccttttggtcctccagccaactatcacctatatggtagttctcctaactttcaaggttttcagtagcaagtaagttgattataatctgcgccgataagttttcaagatttttgtcctcaagaaagttgggtgcactcaccaaatcaagttgtcgggtctgtctcttctcattgattagaatcaacctcttagcgccctgcaagacaaaaagagaacaatctagttaacatcgaagaatcaagtgataatagccaagaggcaatgagttgaggaacacatgtcaattagactggagaagaaaatttacaactcctcagctcttggttcaataacaacacatctagcaataaccgtaaaaagagagtcatgcaatacaagacacattggggtggtgttaagaaggatattataaaattttgtcgagcttattcttgagctagaagcacctggagcagtggatactctgatgatatgataatgaagaaggcccatgcggtgtataaatcagaaaacaatgagaaaactttcacattaaagtatatgtggagagaattaaatgatcaagcaaaatgacaaaggattcttgaagaggacagcaagaataaagaggacgaggatgtacttcctctgcagctatgaaatccctcgtacgaaattttgtggtttgaggataattgtaactgtttctttcaccagatcttgtttatttgacgacaattataggtatttgaaatgtgcttcctacaaagctgtgttttaaatccagctcctcctgcagttcattgacgtgctgttcttgtagcccacacaaattcttcatcaaatttgcttcttgttctaatgtgaagtacagaactcacagaaaaccactttatgaagaacaaacatgattaattagaacatagcatttcatcacagctgcaagagctgaacctctggatgcatcaatctcaaacccaatattttttttaaaaaaaaatgggattatcacttcattattgttccaaacaaacaaaagaaaacaaacaggcagtgaaacaacaacaattcggtttactagtatacactttacaaactctctgcttgtctttgcattgcatcaaccatcaaggaattcagttcgagctatggaattgcatcaatccagtacctaaagagtagaaagatcaattcttcacattagctcagctcacactagctatgaacaaaccaactgcgcggtcgccgtcgccgtcttcaagaacggctcctgtctccggcgatgccgatggaagggggatctgtgtgctgcattgccaagaaccggcgatgtctccggggagcattggttattggtccggccatccttacaagatctgggcggggccggtcgagcagaacgcgtccggcgggccgccgccggcgacgcggaagtgccagaggcggcccttggcggcggcgaggttgtcctcgcagaggtactcccaggcgtaccaccgctccaccgtgcggtgcacatcgtgcacggcgacgtccaccgcctcccggcctcccgccgccgaggcgcgcgccagcgccgccgccgtgtagatggcgcccatccggccgggctccccggcggcggcgccgctcggcccgtccacgacgagcacgtcccacctcgcgtcgagcacctcccgcggcagcgtggtgatcagcgccaggtggcagccggacctgcgcaccgcccccgtcggacgccggcacgccgggctgtcccgcgcgcgccgcagcagcggccacgcctccccagccgcgtcgcggacctgacctggtggatcttggccgccgccgccgccgacgccgccgagccgccgcggagcgagcggccggcgctgtcggcgtcctcggcgctgtcggtgacgaacgcggtggcggcgccctccccggcgttgaccgcggcaagcgcggcgagctgcggggagaggccgaacacgagcagccggcacggcgcgcgcgcggcgaccacggaccggagcagtgcggcctccttgggcgcgaggccgccgtcccccacgtccgtcccgttcccccacgccgaggcgcggccgcggcgcgcggcggcggcgggcgacgaggagccggtgaggagcagcagcttgacgaaggagagcgcgcagaacacgacgaggacgacggtgagcacctgcttcggcgacatcaccttgctccctccgccgccgccgacgccgacgccgccgctgctcatctgcatcgatccggatgctcctcctccgatctggcctcttcctgtgaacactctaccgatgatttcttgatctggtcttcttccccattgatccgccagattgccacccagatctcctcctccttctctggttcttggattgggttgcttgctgctgttgctggtgtggcttggtgtgtgtgatggtgatgtgtgactagcttagctagctgcctagctaactttgtcctctaagcaattagggtttggttggtgttgacttgtttttgtgtatgctgatgtctttgtgccattttccagaggttggagaagctaaggttgttgaacagttcatgggggtggggagtcactttgctcaactattttcttcacaataataactctcataatacccgtgcgttgcaaccgatttattttaaaaaatagttcgtggcatataaattttaagtattcatattgtctaacatatagcgatgaaaaaattcataataaaaatatttgattctcataattttttatgtatctgattcatggggctaggggaaaaaaagcaaagtctcttctcatttttttttcccacgtgttagttcggagtggtggctgtcaccaccactactattttttaaattagtttttcttcacaatgatttattaaattgacattttttttgtttttagttctttcgtttgtttaattagtattattttttgtttgctttgatttgaagagatatttttcgtgataatttatttccctttgatgtgataacatggatctgttgagctggtggtacggtgcgatgggagtagtgtgctttgcaatgtacgagtgacttcagaataggagaatataagacatttttgtgttcattattttgaataaaatccgcagtatgttattttgtcgcgcttcttcataagttttccatgataattttttgggtaaggtaacaagcatatttagggtcaggaaacaagcaataaaatacgctttatgttacaatttttttccttacttttccattttaactgaggtgaataaacttgagtaattttttttataatagtgtaactttttttggaggtaatacattggaaaaggttaatgtcagattcaaattcttagggtacctttgaaacacaacaattgaaaaacggcggaataggaaaaacacatgattccgataaaaattcaagtataaaacataggaaaacatagaaatgactgcttgattggatcgcaggaaaaacgtaggaataagataagagaaataaattcaaagaaaatttccgcaggttgaagctcttgttaaatttcctccaaaatttctatataattgtcctttccataggaattttaaaatataggatatgattaaatcctttgtttcaaaggcatttatagaaaaaatttctatacgattcaaattcttcaaaattcatatatttttcttccaaatcaaaggcccatagatcatttaaggacagccacccatccacaaatctcctgtcagatccaggcccaatattataattggagaaaatgattcgggccgaatgttggtgggccttgtcaattgggtcttgtgtacctctgggcttgcatttctttttttttttttggaaaaagtatactggaggtccctaaacttgccaccgagatacagaaacgtccttgaaccgcaataccagacacccggggtcccccaactatacaaaaccggtcatccaacgtccctcggtgattttgaccccggttttgatctacgtggcggctgagttagtgtgggacccacgtggccccacatatcaggtgtccacatcatctttatttcccctcttctctctcccttcctcccctctcagctctctctctcgcaggccaggccgacgggttagggagcagacggctgggcggtggcgctgcgacggcggcctgcggccggcggcggcggcgtcgccctcttcttcttctcccgctcccgctccgtccttatcgaaggtgatcaccgcggcatcgggcacgattaggaggatgctcgaggagggccgcggcaacggcggcggcggtgaggacgacgtcgtcgtcaacctccccgaagtcgtccagggcgctgccctcgcccgcgtcatggagtactgcgaccaccaccacggcggcggcgccgacacgggctccgcccggtcctccttccctcccgccctagcaagcgcagcaagcgagggagcgcggcggccagctcctcgcggtggccagcgcgcagcagaggacggccacgccggacgccgacgctccggcctcgccggagccaatgaacgccgcggaaagcgcggcagcgccggccagcgcctcgccgtggttagcgcaccgcagaggatggccacgctggacgcccacgctctggcctagcgggagccgatgaacgctgcggcgagcgcggcggcgcaggccagcgcctcgccgtggccagcgcgccgcagaggacgatggcggcggagtacgggatggtagcagagtgcgggatgacggcggcgggcgggacgacggcttccccttcgccgtcgttgagctcgtcgtcctcgcgaccgtccgcgtcctcgctgcactccaccgccgcgccgttcgaggtgggcgctgccctcttcttcttctcccgctccctcctcatctccctagacgcccaactcgcggccgtctcgttctcggcttcggcggcggcggcgaggggggaggagttgtcggctttggaggaggagcgcttgcggtcggggtcggggacggcggcggcgagggagcccgggaggcggagggtgaggtcggtgtcctcgaagtcaagccccaacaccgcggacgactggagcggctgtgtgcgcctggtgcttcgactcacggacttcgccggcgttggtcttcacggcagcgtcgggtgcctccccacgtgagcggtcgacgaggcgcgcggcctcagcgaggtcgtcgcgggtgatgcaggcggcggacctcgtgcctcggttgttgggggacgacgtgctgggggcctcgggcctcgtggcggcagcggcgaggtgggcgtggtgtgcgcggccatcgccggccgccgtcacagcgccgccgctcggccgtctaatccctactcatcggcccggcctgtgagagagagagcagaaaggggaggaagggaaagagaagagaggaaagagagatgacgtggacactgacatgtgggacccacgtgggtcccacgctgactcagccgccacgtagaccaaaaccggggtcaaaaccactaaaggacctcaggtgaccggttttgtatagttaagggacctgcatatctggttttgtggttcgagtacgttttttatcccgatgacaagttgagggaccttcggtgtactttttctttttttttttctctttcaagtggactgggctgtactttagcttgcaaatttgccatgaaatgcaaaccttttgctcaacatttttatagtgacgagaaaaatgaaaagaggcaaggtagagggggggggtggctgatacgcgatcagccgcgcgggggtgcgcgcgcggtcagtcgccccctcctctagcctatatctaatctactactatacattatatgtatatacgtatgtatatgtgtatatatataaatatttttaatgcataaaaaatatatacatatatacaaagtttatatacgatgtatataaagtttatacaggacatatacaaactttgtatatgataaatataaactttatatacatacgtattaaaaaataataaaactaaaaactacacaacatatacaaactttgcatacgtatatacaaactttgcatacgcgtatacaaactttacatacgtgtatacaaactttgtatatatacaaatacaaacttaatatacatacaaatacaaattttgtatccatacaccttaaaaaaactgggaaaaacataacagaaaccggaagaaaaaaaaggaaaaaccaaccgaacagaaacggaaaaagcggaaaaaacaaaaaaaaacggaaaaactctctctcccttctcctccgcgtggcacgtccgccacccctctccgcgcgcgacacgtgtccagtcgcgtggggagaggcgcgtgcgactgttcgccaactagccttctcgaggtagaagaaccaaaggacttcgtttgggacagggaactatggtattcgtctggaactccgggcgaacctgaggtttcgggcaatatactatggcttggtgcctaccaaaaaatgcctattttgcaagaagtccattttgataccctcatagagtataacccgagtctaatatttgaccgtaaaaccagaaaagaaatacgtcaatcttcacctattaataccggatcaatttagctccatctattttggacattggttttgtcctatgcaacatattgaccagatcaacccgtgctaacgtggcttctacgtggccatatgtgtggtattacaaggtaaaaagatcatagtgagatgcacatgtcagcagcatcacctctacccactctccctcctccaggcgacccggctaccagatgaggcattgcagcgacaccagtgctcgatctccgccgcaaaattgcccggcatgtcagggtcttggtcctcttattcattctctgacctaagataatttatataatgaatgaaaatcaagctagatgcctagattattcaaatctgcaaggttgatgttggttatatcctataaatgtgtgcaacatattaaggaaaacatattctatacatataactttgggatacacataacatacacgcgaactaacaaatgatattgaaaattttataaaaacattgtcggtgtattttcaatagtattatacatatttttttacgtgagtagtattacacatattaagtctcaattttaatttcaatatattttagacttaaaacttttttgacaattttaaggatataagtatgtcaaattttttgtcttttttctctcttcaaaatatgattttgaagatgattttgaagataagactttatacataggtgtaatactattagaaatatatatacaatttttttctagatttttctgtttgacatttattagttagtgtgtgcatctgaagtttatttgcataagatatgttcgatcataatatgtatttcaattcagaacacgattaggagccatgcaaatatgaccaaaatttagaacgtgtccatgctaatggtattttctaataatcttaaaactatttgcatctgaaatgagagatatttttgtttctccatacataattaggttcattttattttgacgtaatttttttcctttgggatactagaatcatcattagtttaccacatttttacgatttaaatatacacataaatctaacatttcttattaggaagacatatagttatttgtcacaactggctcacaaaatatgtcccttcaaatacctggggaccaaacaagcaaggtgacaaaagaaactagctagatcttcatacgtgtggccagatcgactgaaaccattacaaaacttaaaattcatcagtaaagcttcaaacaagataaactaagaaaagtagaggagaaaacgacctgaaaaactaagaatggtagttttgaaacaaaacaaaatgaaggaataacttatagctaggagcgaaatttaacttgcatttgccatgcatggtaatgatcgccatggtggaggaggcttcggcgaagcatagctaggttgaaggcgatgtccttggactatcagtcacatatacacttcagctctgagagcaaggataataatacagccgatctgttgactataag

SEQ ID NO: 4000 - DNA, 711 bp, Oryza sativa
actgtggtaatccgctttgatattctttttagaaaatcataaggtacaattagaagtccgtattttacctcaagttagcatgcatgtttttttaaagatattccttctacgactccttttgtatttccaaaagaaaataagcttaaaatccaagccaaacgcggatctatatttctaaaagcgaacgaacttaaaaaccgactcaaacacgggtgacgtaccaaaatacagcaaaaacatctttaatttttataatagtagagaaatgcagtctaataacgaaacaaataacagaatccacctgtaaaccgcgagacgaacttattaagcctaattaatccgtcattagcagatgtttactgtaacaccatattatcaaatcaagcgtaattaggcttaaaagattcatctcgcaatttacatgcaatctatgtaattagttattttttttcgtttatatttaatactccatgcatgtgtccaaacgttcgatgtgtgttaacgacgaaatttggtatgcccgaagttatcatcggcctaaagtcagtatcggcttcagagtcctggaatcggccgatgagaattaccaagtcgccaatagccgaattcctgctatattcggttaaggaaattaatatattaaaggaagcttatccagaagtgaccgagttcaaggaggatgcagcacgacaagttatctattaattagaa

SEQ ID NO: 4001 - DNA, 1141 bp, Oryza sativa
attgaatatcgtttttctatatatattattttgtatatataccgatccccaaaagtcgttgttttatcttaagtgtgacagagacacctatttgtcgttaaatatttgttcttggcaaaaggttgttcataatttcagggaaaatactttgtaccagtgctgctgagatattaattcctggaattccacaatgttgtcatcgctccaaccagcaaagtcacaatctgatggtgctatgcatgtgcttgcctaactagctagctatgtacgccttcatatatataattttataaaagaaaaatgttgatatcgtacatgcacatgtattgaaattcgatcgattccccaaaacaaaataatttattaattattatgtcctttttgttctatttttattttgtaacatatgtagcaagagcaaaatgaggaagtaaaattcagcaaattcatcgtaacatgtctagttatactccctccatactcgtaaagaaagtcattttggacagcaacacggtctccaaaatacaactttgacttcttgttttaataaaaatatttattgaaaagtgatatatgtatacttttatgaaagcatttttcaagacaaatctattcatataatttttacatttttcaaactcaacaacttgagagttattcatgatttatattcccaaggtttgacttaaacattgtcttaaacgactttctttacgagtacggagggagtatagtttaaacaaaaccaacaagatgcaagagtacctagacatttgtaaaattcagccatattacttatcccaattttgtatgatttatttaaagaaaatcaaaatgggtgtggtttcttatatgtgtttttagcctattttttcttacgcatagtgttatggtctgattgtttgatctacggctgataagctgtgaaaaaaaaagaactaagcaaatgaagaagcaaaacttatatatctatattattatattttaaaactaaaaccaatgatgaaaataaactatgacaaagaaacagaaatcaattctaaaaaacttaaaattcaaattcaaattttggctatggataataagataacgagtaaacgacgagagactatttttctgacgcaagtcttcaaaccatgca

SEQ ID NO: 4002 - DNA, 12261 bp, Oryza sativa
tcctgcacccctgtccagtgattatatacatattgcatgcaatggacgataggatcggctctctgtcacgtctgatctcgatcttgttgttacaaattattctcaacacccagagaagtagaggtaaattcgactttaatgttcacttgattgaagcaagttacaattcgtcatgtagggttataatatctaccatcctagctagcttctcttcgtcaattcttcttccttgtttgaacattggatcttgaaacgaagataaattagttgagaaacatgactagaagcccaattatatccatacatttgacccgctggatagttttgtttggaagcaatgatatgatatgcaacatgtgggatccaatcattatttgattttatagaaaaacatctcaattgactatatatattgatattattcaactttcatatggtttaaacagttacatgctaaatctttggatattaatttgtcttcccaattactacataatcaattattagtaattatgacaggaatactcggtgaaactaattacctggccatttagtttcattgaaattagttaaattagataatgccccgcgttttgttgtgggatatatgttagataatggagaaatgatgaaatgatttggattgaaatattatgaaaatgatttgagaatgatgatttaccatatgtatgtttagttttagaatgaagtaaattatagatgtaattactatatgcttgcatgttgagctttgtattcttaatgggttgatgtggtatgcttgcatgtaggttttatgagtgctaataaatactatgcttccatattgagctttaggtgtttagtggaacataaggtttatagaacgaagagatatagattgtatcgatagccatggagccagctagctaagtaatttgatttctctatgttcatcctagtgaattcaaattatgtcatttggagctagctttcaagttaaggatgctgacctagttaaggcaatcctttaaaacttattgcttaattgtgatgtcattgggagaccaaaatatgtaatcttggtttacatgtgcatatatatagtaagcagtttaaaactcaattttagggttgatttcgaggtttttttttctattatagtttatttttcagtattgacttttacactgctaagaacatagatacataagttttccccactaattatttcttgttgtttaactccaatttcaaccgcttctcagcatagatgaattaatccaagcatttttttaaaaaaaacatccttcatatgccttatacctttttttggaatgttgcaattttttatgattttaggaaaaaaaatccatacttgagcaaaaacataaaatatatatactccttttctctgcatatcatcaatcaatcaatcgtcactctatctcagtggctgtcctgatagctgattgggccacatggcgcccttaagtttgcaaatagatccaaaggaaaaaaaatgctaagaggaaataaacacttggtaccagaaggggctagaagagggttaggagggtgaccaggttttataaaatcacgtggttattatgcagttatcgagattattacatgcgataaccttctcaatttttgaaaccacatggtatatctcacagtaaccgccgaactgtgaagggggggggtggtaatcccatcgaaagcggtttggtaaaaaccctagaggcgacatagataaattgatatagacaaactaaatactgcatcaatatttttgttttagaaagtgtgttgcatgatataacgttgtaatagaaaattaattagattataaaggaaaaggtacgaattacccccctcccaaacttttgcggtcatccgaattaccccccgaaccacaaaaccggatatttttcacccccaactatgcataccggacgaaatacccccctcaatccaatccgcggtggttttagcctacgtggcgtacacgtggcagtccagtcagcattctattttaaaaaaattgtgggacccacatgccatactcctcctccactcttcctctctcttctttctctcactctggtcagcggcagccgggggacggtgacgcgggggcggcggctgagggcggcggcctgggcgcggagctgcggcgccgccgtgctggtcacccacgacccggcgctccggccccacgccaagatggagctcggctgcctcgtgcacgccaacatcgctgccaacgacgacgcccacgcctgcacgctgcagcgggaggacgacgacggcagcggtggacggtgacgcgggggcggcggctaagggcggcggcgtcggcacagaggtgtgcgttggcgaggtggacgaggcccgcgcggccgcggacggcgtgcccgcgcgccacgagcgcacggttgtagcatcggagctgcctggcgcgcgtgcggagctcgtcggcgtcggcctccctctccggcggttgcagcggcggagccgcccggcgcgcgcggagctcgtcggcgtcggcctccctctctggtggggcagggcggcgcagaggcaggggggcacgaagcgtcggcggcggtgtacgcgtcgcgctcttcgccgaagctgtcgtgctggtccactggtccgcatccgcctcgtctcgcaccgccgctcaccacccgcctccgcacgacgcatccgccttgtctcgcgtcgccgcctcgctcgcaccgcccgcctcccccacgcgccgccaccatcgcccgccctccccgcgtgccgcccacccatcccccgcgcgccgcccgtccatcgcccgccccgcgcgtcgccgcctcgctcacgccgccgcccatcgcccgcctccacgcgccgcatcggcctagtctcgcgccgccgctcaccgcccgcctccgcacgccgccacccatcgccagccctctccgcacgccgcctccgtctcgctcgccccctgcctcgctcaccatgagacggtgatagtgagagaggaagagtgagagtgagaagtgagagagagtagtgtatgacatgcgggtcccataaatttttttaaatagaatgctgactggactgccacgtgtatgccacgtataccaaaaccaccatggattgggtcgaggggggtatttcgtctggtatgcatagttggggggtgaagaacatccggttttgtggtttgagggggtaattcggacgaccgcaaaagttcatggggtaattcgtactttttccaataaatgaccgttcaactttatggaccatgacatttctaatcgtgtctagcatattattaaaaccaaaagagggcatattattcaggttgagttgaacattttagagtagccaaattgaaagtgattgcataatcctcactaaggtacgaaattgtttgtcaaccaattaatataccatacaatatattaatattataaggtagatgtaactatgtaagaaaccgtgggtcatgtactgtgtgcgtacatcgtcactgatacagataacaggtacatttctccatgtatggccataatataataaaccataattgacctggtaaaactatagagtttaaccacagaagcttaattagctgaactctatctctgattagttggggtagttggtttctttacttgcaagttcagtaagtgacactcctgtgaagtaagtaagtatagtggatatatccatatcatgcagatgcaccttaatccaatgtaatagtgtcaagaaagacattgccataaataaataaatattattaagcagcataattaatcaattggactgcatctgcttaagctggtcaacgcgataattaattgatccatgtctgtctgtcgtttttccacaaccaggcaaagatttctggagatcttgtccctccattcctctcacgttgatttggacagaattcatgaagtgagtaaattaacatgattaaattagcttattgacaacgctagcttctcgttaaaaataactctccgaagcatgcttggtcgacagtaacatgcaagaatagacagttaaaatagacattcatccatccttgcatgcatgcgtttgggatttgcaagtttccttcttgaaaatgatttatttatcatgatcatgaacacttgttgattttctattgtagtagtagttttttttttaccactagtagttttactattgtaatttgaccacaagtttatttatgacaattgacaaataatatatatataataatcttacaattttccaccttttatcattgtatatatgcatatgacaattagtccaatatttagttatctgaatgacagcaatttccatagaatttcctagctagtccaacatacacgctgccggatcagatcattaactgcttctagagagtttttgtctatttaattttctttgggccagaagtctaccagctgtaattatggtacatcagcctgcaagacttcaattatatgcatataggtatcgtcatggagagttgaataaatgaacataactgtatatatatgttacaaatgaaaaagaaaagtatatgttacaccatataaatgtatgctcgagtagaagaattttatctttttttcctcatggttttgtatcaaagcaaaggtcaacaccatgacaagttacttaaccaaaatgacaaggaaaataattcaattaagaaattaattaatttgtggtagaagtccattattaacgttaattgtggcaacttgcttttttttaattatttgagatgtatatatctgaaactgagtaaatcactggtgtcctagcattgttgctgcttcatatagcatatccagactaagtaaatttaagctgagttctaacttctaagttcaggctggggtgggctatcatatcatttttcattagcaccattaccaaactactaaacgctgcaatttttttaaaaatcaaataaatatattttcaaattataataactaatacttaattaattatgtgataattactcatttcatttcccgtatcaaattttttttaaaaaatcaaataaattatgtgataattaattatgcgccacgtatcaattttttttaaaaaatcaaataaatatattttcaaattataataactaatacttaattaattatgtgataattactcatttcatttcccgtatcaggaaaaaaaaactcacctctaaactcacatttagctttagaggagcaagtttgttaggttgaactctttctagcaactcaaaatagcatcttcctcatttcccattagcacaattcctaaattaccaaatgacatgttttgtgtcgttaaaaaaaaagacatgttttgtgaaaaatttcaacatagaagttcttttttaaaaaaaaatcaaataaacagtttttcaagttaatacttaattatccatacgcaaattattattcttgttttgttttgtgtgtagggaaagatcaacccaatttgccttgtcgaacatacccctgatcaagccacacgaaaaaagagaggaggtcatgctaatttggccaatcttctacttgtcataggaggtcatgattaatgatcattttcttttctgattaatgaccctaatattaatatactagtattttagaacaagctaagcttagtcagacggaaaaaaaaaaggaagaatctggaagatatttgtacttacagtgggacccacatggtgacgtgtacgcagtaactccaccacagcaacttgcagtccaagatgggccaagctgccgtcgccgagggagcacggcaacctgcagctgaaggaatagtccaacgtacgtggcgctgacgtggacgtttgccagcacaagaggctggcagcttggcagctgacgtcatgtaatctaatggaaaatttcatctttgtactgtagaacttaagtagcttcaattttattaaccaccttgagattataaacattgtctccctctatttaaaattatttgttattctaaatttgtttttaagtcaaacatttttgacaaacaatttctataaacttatataatttaacatcgtaaaatttatttttttaccataagaaatattttcataacataaattgaaatattggtaactacatggatttctaaaaattaatcatcaacgataaacatggttgattaacaaaactagaacggcaatcaatttgaaacggaacaagtagaatgcttgcgtgtcttgtttcacttgtacgtcagtgaatttaatcaaacaagtgatgatgggattgtttgatcttattggcgatactgttgttaattacttggctatctcgaattctagatacattttttcttatactactactagctctgtccgtatcactccactacgatgtcatttctaatggatgaaatctttacctacgaactttggcgggttgagggcccccgtgccgctccaggcgcaggggcgacacgggcggcgaccaccgccgccttcctccctcctccgcctcgccgccgcccgagcagaccaccggaaaccgcgcggctgcgaggaaggcggcggcggggccttccttctccctcgaaggcgtgggtcggcgcccacgaccctgaccagatgggagcgacgacggtgcggcggtatcggtgtcggtatcggggcgtcgggctgggcgcgcggaggcgactgggtgcggaacgggggtggcggcgacggtgccggatttggcgtccctcacaagatccagcggtttggccccctcccgagacgacggcggcacccaaggaggtggggaagggagatggcatgcggtggccggggaaggtggagcagcagcaacggcgctcccttgcgtcgcccacccagggcggctctctagatccgggctgggggagaggtcggtgccggggcggcgcggagaccggcagggggcggcatcgcggtgggcgggcgacggcagtggccatcgatcaagtcgaagctgctcgctgatgggggtgcggcgatgcttggcaacgatgatatgttgtagtctctttcaaggagttatggtgctggccatgtgaaggaagtggctcctcggtggcttggctgatgtccattgttggacgtcggagccgcttttcgctttggcaactttcgtcttcagtgtcgctacggttgtgaagtcgacgctgctgggtcgctagggtgggtagctcggcaacgataacacctcttctgcgatgtgggagttgttgtgtcgcttttgtatttagcttggcattgacgtcctgtgattgggctcctccgtcattgttagttgtgtagcggtgggtttataattaaccgtgcagttgtatggttttcaggcctggttttccttataaagtgggtcaattctcttgttttaaatataaaagatgaacaaagttccgccttaggtttcaaaaaaaaatctttacctacttaaaaaagcgaaatctgcttccaaccaaaatttcatccgtccatcaaatccaagcgccgcttggtgattcattcgcgtcactctgtgtgcatgcatccactaacacccgattcaaactcccacgtgtgtgtttctattccgagttatacagaaatggattgcgacattttggatgtggattcagtccgattttgggggaaactgaaagaggagattgagtgaatcaaaagccctccactaattttggaagattgagaaagattcgacctgatttgatagggagcatcggctccagtatcgtacgggtacgagactgtcgttcggaggttgaagacgctggtgtagcgcgtgggtatagtttggcaacgagaggaggtagccgagtatgctagctgggtctgcggctccacttgttggctgaaccggagaggcagactgagcggaagtaagagttgttataccgctgagaaaacgtttttacttgttgcaacacactgacattttttctagttaaataaaacaagaaaaatacaattaccttggtatccaattattcatgctttaggtgcatggtattactctctccgatgagaaaatacatgacatatgggtttttcccccatggtctttgatgtgcgactttgctaacaattttatattaaagtaagcttacataatctaataaacttaacaggttgtaaaagtatatttcaaggaagatctacaatcaccatttttatgttttggttaaaattaatttactaacgaccaagtttcaaaatttaacctgatattaccaaagcatcgaatatttattaccggatggggtgcatataggagtattgatttctgcgttactttgctgtatgaactcctctatgtgtactaatgtctgactttatattttaaatgtgggctttaatgcttatcacaagaactggtggtatatgtgactcttgttttaattagaaccaccaaatagtactacttcacacgtgtttgatatgtcttcgtgaagttagtgggaaatccaaaaatcaaataattacctttatctgcaatatgctaggtcttagactcagtagaaatatgtttttgacaaagctccaattaagtctcacatgcgagtgctctttagacctaccgattggtgctgacattggtcgttattgcaaagttgtgaagatgataaggacaagatgaagcatgtcgaactttagagacaatggcgacacaaagttttgcgctctaaggtttaataataggctagacttatttgagcaggtttaatagcagagcttgtcgcctgcagtaaatttggccatgtcatctagagctttagtttataatacttcatgcagtagggagctgcactatatggtctgattatttgtcagtactttggatacaccaattagtttgccttctcttgaagttcacgtatagccagcgacaatataagcgttcattcacactctctttctagctcattgcttttgctagactcgatattttaccaccagtttaattattctattgtacctgctctattatattaccaaattttattcgtagccttatgtcccgcaaaaattgtaataattggtcgtgaaattctcaaaagttttgctcatagaattttcgtgaaacatgctaaattgcagtctaataaaactagacaacataacgggctttcacggcccagcccacgacatacccaccattggccatttgggcctggattgggcatctccgaatgacccactcacagtctcgctcgtcggagcagaagcagccaagaaaagcggcggccatggcggcggcggcggcggcggcgagcaccacgagcatgatgacgaggccgcagctgctccacctcttctcccgcttctccttcctcacctccctcccaggtcagcctcctggcctcttcttcttctactacttcttcacctcctaatcctgtgtccccttttctctaacctgttgtttttttctcttcctcgcctccggcttgcttgcagaggtcaaggcacggatcgccgacgccgtcagggacaagcaggtgggggatttgctcgccgattcttgaacgaacggcattcgatgccttttagctgttgggggaatttatcggatgggggtttctttgtgttcttggaataaatgaattcatgacatgctggattttatgaaccagtcttctttgggggtgcgattggaacagatgagcttagctagatatgtgagtccgtggattgccagagattttgcagaaattgttgtacttgactgtgtgaaattagcttagctgcacttattagtgaaaattacagaatgttttgatgttcctgtaggaggctgtagcggtgaccaccgagatacaggaggagattctccgcgagatgggaatcggtaatgctagtgtgcgttgtgtttgagaaatatgttgcaacaatctctgatgcaaattagaggttgatacactttgtgatgaaattgaaaacgttggaacttcattcattagaagctctttttctttttttggttaagtagctacttatatttgttgagttaattcacttgcttgaattgtcgatttcttgtatgttgtaacctgtaagaggcactggaagaagtgttcatataataattattacagactttagggtaatagagtggttcaattacataggatgcagacctaggaagagaacatctgttattgcgataattattcgttctaaatagcactgttgtcacttgacgtgatattttgaacatcagatccaagttttggtattggctgccttggaaaggtgaacgttatgtatgaggatgacatggaattgatggttaagttctatcagtttgttgccaagtaagcacattccaagcctctcgataattttagatgtgtggtttcatgtattagttatatgtttccatggtatttaataatatcggatatactaattttgttaaataatcaaccatctgcatactagagatatatttgaacatggttcaaattgatgaatctatctggtgttacttcaagttttcttgtagaaagagaaatttgatcaatcaattagggcacaaatcataatgaacagctagcataataagaaactgtagcaatacaccaatgcctgccatatggcaattggcaagaatagttagtggatggcatgtttgacttcaactgttgtcaactactctagactcatgttaatttctatcattcaatttgatagagaagagatggctattgatgaagctgagcttgaccctatagagtttgctgaaaaaatacatgctcagcataaattacaggaacaggtaaggcaaattcttattacgaagattttcaggaaaaagaaatgtctgtcatgtttgtttcagggagctaatgtcatggtggattactattacagcaactgaagatgttgattcagatgagaaaatataacccagagagccaatccgtcatactcgaaactgtatgtgctcttactactctccctagccgttttccatccctcaccgaaacatatctcagttggacaaatttatgaatttcgtccaagttcattatcagaagcaatttatgcttatttgtatctaatcatcgatgcagttgcgcaaacagttggagagtgctaatttcgataccgacgcgtcgatcttgactccggagcagatccaagagattgttgagaactagatcaaaaaaccatatcaacagctattgtgcatatgttctgtttaaatctgattgctgtacatttctattgctcatacaagatataccagcttaattaagtgttactcagctctcgccatggtttatggcatccattgtgttatcgtgttaacttttgtccacgtatagtactttctatacataattcaagattttataccccccaaaaaagatcaatcactgaaacaccactaagcgcatacttgtcttctgatcccattgacaagatcatggctactaacaagataaagctccaggaaggcacatgtgcttactgctagctcattgtgtgtattttcataacattttactgtatctaagattgacattatgatccacattacagtaaaattataacgagagttttttctttcatcacctagatgagcatgcaggtgcaggtaggcccaaagtgtgaccagcaacaacatgcattttttcccctcgaatctcttttaatttttgtttctttttatggtttaacatcgttgcaagaagcatcaaatcgacacacaacgaacctagaaacagcataaactcgttattttggaagtgcaatgcaggtgtaaaactgtccagtgggtaacttctgagctatcacgcaataactcgataactaacttgcaaatgtcttgcattagcaggaaaaatctgagggaaacatcaagctggagttgagacaggtcacattggccaatccattagtaaagcctgctccagggtaatcagtgatcaaacaaacaacttgtcctaagagacccttttgatggtcaaagaatctttttcatggttagtttggacataagggattaaactgtaaaatggatccaaaactttcctatctttccacaaccggtctactccaactccagaggcaatcaatcagactatcgcactatgtgagttgatctggggaggcagcagaaaggcagcattttacaacacattctcttaactgtaacaaaagaattgactgatcagtagacttgtctgatgttgatatttatccttgaattttgaatgtagtttaagagggctgcagga

SEQ ID NO: 4003 - DNA, 2370 bp, Oryza sativa
cgtgatgcacctcactaagaacctgtgcgtaatccttcttggcttcctaggtgtatacggaaagtcgaaagatacactggaagcacgtaatgatctgaagcatatggaacaacgtggcgaccttcacccggaaccaaagaagaaaggaagccattacttgagtccagtcagctacactcttagcaaggcagagaaggaaagtatgtttgaatgcttggaaagcataaaggtaccgtctggatactccacgaatatcaagcgaataataagcacgaaggagaagaagttcacaaacctaaagtctcatgactgtcacgtgttgatgacacaactgctaccagttgtaataaggggtatccttccagacaatgtccgggcaacaataacaaagatatgtgcattcatgaacgcaatttcgcagaaggtcatcgatccggatagattagaagcccttcagaatgaagtggtgcaatgtctcgtcagttttgagttgatatttccaccttcatttttcaatataatgacgcatctgctttgtcaccttgtgaaagagatccgtattctcgggcctatgtacctacacaacatgtttcctttcgagaggtacatgggcgttctgaagaagtatgttcgtaaccgtgctcgtccagaggcaagcatcgccaagggttatggaacagaggaggtcatcgaattttgcgtagaatttatcgaagaccttcgcccaatcggggtacctgaatcacgccatgaagggagactacggggaaagggaactctcggaaggaaagcaataacgacggtagacaacaatttattccgtaaagcccatttcactgttctgcaacactcttcattggtagctccttacatcgaggagcacttggctctagttcgcgccaggaacatcggtaagtccgatgcatggattacacggcatcacattgatactttccccgcgtggctacgacaacatctcatgggtaacgagtcgatcaaccaacaacttgccttcctggcgaggggaccgtctgggtcgatcgcgacattccagggatatgagatcaatgggtacacattctacacgagagcccaagacatgaagagcacgaaccaaaacagcgctgttcgtgtcgatgccatgggacacgatggaacaactgccacgtattacggtgccatcgaggacatatgggaacttgactatggtcctatcaaggttcctctgttccggtgccaatgggttaggttgactggtggaggcgtaatgattgatgacagtgggatgacaactgttgaccttaacaaggttggatactcggacgaatcttttgtccttgccaatgatgtaacgcaagtctttttcgtgaaggacatgtctaacaaaggaaagaagggcagggggcctgatgagcctaagcgtcaagtggttctcccaggcaaaagaaaaatcgtcggagttgaggacaagactgacgaggattacgatcagttggatgggcaaccccctttcacggtgacgattgaccctagcatcctcctatcaaatgaagacaccccttactcacgcagcgatcacaaggagggaacaatagtgaggagaaagtacgtgccgtaattattgtgtacacgatgtaaactattttggatgtattgattatccatataaatcacgcaagtggcaatttcatatgttaattagagtttttaacatttaatttactatcattcatatgctaattataattgactggagaatttttaaaagtattaaatttaatatatttttaaaactatcattcatatattagagtttttcacaatttaatttactatctttcatatgctacttatatatgactattcgaatttttaaaaggtttaaatcatgcatgtggcatttacatatgttaattagagtttttagcatttaatttaatataattcctacgctaagtacatatgatgattacaatttttattaattttaaatcatgcagtatgtacatacatatcttaattagagtttttaccaatataataatatcattcatatatatgctaagtatatatgattattggaatttttattaattatatttgcttattacgatttatccacttaatttattacagacaaaaataatttttcgaagtaattgtcattaatctttgtactttaaataatgttaatgcattaacttctattttataaacacatatgtaagcgaaaatcatatgcagtgctataatctttagtcccggttcttaaccctaaccgggtttaaaaagaatttcgaaatagcgggaaaagatatttagtcccggttgttgagaacaaccgggactgaagatagtctttagtcccgg

SEQ ID NO: 4004 - DNA, 5985 bp, Oryza sativa
gccaaccgcagccccgatgccgccacaccgccgttaacgaacgagaacgagaacgatcgaacgactgagagtgagaacgaacacgtcaacgtacgttgccgcgagaacgtgaacgagaacgagaacgatcgaacgaacgagaacgatcgaacgaagacaagcgagaacgagggaacgaacgtgaatgagaacaagcgaacgaacgtgaatgagaacgagcgaacgaacgtgaacgagcgaacgaacgaggacgaacgttaacgtgaaatgctatatatatatatatatatatatatatatatgttacttcgcatttatcctaatacattttttgtatcttgcagaaaagacgtgttgtcggagtcgtccgtcaagcctgagtggaagagctagccctagaaggaattggagcaggcaagtgacgtaataatataaatgatcgttatatttgtaatgcaattaattaagattattagacctgtaattagacttatcatataagattgtgtagtgttctaatattatttgagttttaatataagattattttattgcaaattagacttagtatgacattattgactacggaattggtgcgactcctagcaattgactattgtagtcttaattagacttagcatatacgcacgaaacacttagcatacatgactattttagtcttagcatgtaatattatttgagttttaatataatattactttatttgtaattagacttagtatgtaattattgactacggaattggtgcgacaagtagcaattgactattgtagtcttaattagacttagcatatacgcacgaaacacttagcatatacatgactattttagtcttagcatgtaatattatttgagttttaatataagattattttatttgtaattagacttagtatataattatttactagctagggttgtataatatacgtcacctagacttagcttatatcacgatttgtaattagacttagcacgtaaggttgtgtagggttctaatgtacgacatttacacttagcatacatgacttagattgttaaaacataaatgtctcgtgacttagcatatgtttcttgtatcaacagatggctgaccgcgatgaggaacagatattgtacgatacaatcgcggagggaagcagccagtactggaatgaagaagaggggaacgaggatccaaaccagtacttgaacgaggaagggaacgtggagagggatgcggaggggaaccagcaggggcacgtggaaagggatgtggaggggaaccaggaggaggaggctagtggtagtcagccctccgttggacagaagagggcacgcgggcaacgaggtgcagcgaagaagcttgagggtcggcacatcataacggaagtggaagaagatggacgtcctagtgccccggccgaagccgccaagaactatgtacgtcacagcggttgggttgtgcgggataacgtgcctgtcagtacggtgtactggcgaagaacaagggcacgcggagatcatgagagctttgtcccagattcggagaaagagatgctgtggaccacaatgctcgagacattcacccttcctgcgggtacagaggacaaagtgaaaaggtggactctgaagaaaatggcagaacagtttcagaggttcaagggagatctgtaccagaagtatatactgaaggggcagacaccaaacttcgacacattcccaaagctaagggatcactgggacgagttcgttgcatataagacaggcgaacaagggcaggcgatgatggaaagaaacaaagaaaatgccgccaagaagaagtaccatcactacttggggtcaggaggctatagcatcgcgatgccgaagtgggagcagatggaggctagcttgattgagaggggtatcgaaccggcaacagccaattggccggaacgatcgaagttctggtactatgctcacggtggaacgctcaacccagctgatggctcactggtcttcggcgatcagatacgagaggctgcgcgacgactaacagatgcagtggaagcctcctctcagggcacgttccgaccagacagagatagggacgagctgacactcgccctgcagactccagagcatccaggacgaacacgagggaaaggggtgattccttggaagattggtttcaaggaggacatccacacgtacaggagtcggatgaggagcaagagagataccgaggcgaagattgcagacctagagtttcgggtatcgagctacgaactcaacatgcaagaggaggtggcaaggaaggttgatgaacgcatggccgcacatcggtcccatgatccccagccgaccattcctcctgcaatggtgagcccgtcaggaaaccgtagcagctgcgcctcaacggggcaggtaggatcacagagcatggacgccatgcaaacacaggacgaatcgacctatcccgttgatgacatcactcagcggacaccatgtgagctgcatattcctttcaagaacttatcaataaaggtaagatttagccattccgctagttgctgcttatatatgttgattactaataaataatatctcacaacatgaaggtggcgtcgggcatggccatcccaacggacccttcaggtacttaccactgcaggccgattccagcaggatactcgaaggtcgaagttgagttggtcgaaggcgcgtacgaggacctcgagctggattaccctggaggagacggtgagacgcatctacgagacacatgccatgccattattctatggcgcaagcggtacatcatcctccctgggcgacaagcggcgtctcgtgcaccatctcctccggctccgccatctccttgtcaggatcctgcaccgtctcctcctcatgctccgccagcaccgtctccacctcaggctccagcatcgactcctcctctggatcctgcaccgactcctcctcgtgctcctacacctactcccccgcaagctcctcttccggcaccttcaaagtcaagggtccccccagctccaccgcctgcccacacaagggcaacgaagaaggcgaaagttgacgccgccaagaacaaggacccggggtacgattgcacgcaagaggagcttgacgcttacgttgcatcagaagtcaagagacaattcaagcctcgaagtccagaaaagaagattcctatagaccccagtgtcaggaacttcttcaggggtatgtctgcatctgtcaaggaggccatcaagctatcggactatgagcgaacgctgaagaaagcatcttctggaaagtccaaaccagtccctcagcttggagagcaatcaaaccaggagatcgagccgttggtgaccggtaaagaaatgacgatagaacaatttattactgacaccggtctaactacggatcaattgctaggagtcgcaccaatcgaaaaggcggaagtgaaatacatgtacgaactcggtaaaccgcttgtcaagcctgagctgctgcagtccctacccacacaaatgtacaagttccatcagctgtacatggagatgagcgccaccggtagagagatgatcggagcgaggatcagggacacggacttcttgcaaggagatgacattctctggatcaatttcaggggaatctacgaactataccagctagacgccctcgacgtctctattatgagttgctagattttgtaagtatatcgttcagttagatttcttactatacgtctcctttaattaattaggtccttgtatataagtagactatagaaaataatatactcccttttatcgttgtagaatggagattcaaagggcccgacggcggagggttttcgatactggattcatcgaccctcggaaagtaaacgtcgcaatgctcgaccaatatccacaagaaacagaggacaatctcgtccatctcctgaaggcgcagcattacaagacgttcatactgttgccatacaacacagagttagtttaattttactgtcttcctacataccaaatttcattcccgtacgaacttgctaagtgtttcatatgtaatgcatcccacgcacattgcagattccactgggtgcttttactcttcgacctggaggcctgcaccgtcgacgtatatgactcaatggataaaaaagagtctacgtttgacaaggttttcgaacttatagacaggtaccgtcataagttcctttgttaattaagaaaatcttgttatgttaattgctactacgaatcatagctttaaactccatgtagggcttggtattggttccgtcatttggtccgcggcaaatggagagaaagacttaggcgaaagttcaaatttcctgtgagtacacatgctctacatttatatttctccgattcaaatacatacaagtgtatattaattagatctctcgttgtttgtcatttatttgtagtgcgcaaagcaaaagcagggaactaacttgtgcggctattacgtgtgcgagtattgccactgccttgcagaccaaatcatcaccacaagagagctcgatgtacgtacaaataaattcaaaatttcattacgtagcgatttcttgtttaattactaatcaatttcatacattcatatagcttattcgcatgagggataacctgaccacacacaaggaatttatcgcggcggttcaagaacaactcatgggattcatcaacgaagaaatccttgatcccaagggtgaattctactacgacggaaacacaattcaccggtccttagcttctgagctagcagctagtactactacgtcgaaatcgtagctagctaggacatataatggattgtaattaatatatgactacatatgtttctatatgcatgtgtacacattttctataatgtaaatatattttggtcatatatatatctatatacatatgcatttgcataacatatatatgtataaatacatatatattatgcatgtatatacatataatataatataatatatatatatatacatatatatatgtatgcatatatatgtattgaaacatatatatgcatggtttatactagatacaggtacatatatatatatatatatatagaccgttcagcagcaggggcaagctcaaccagaaatggacagatcgatctttagtcccggattggtactcccggtttggaaaccgggactaaaggggggttacgaaccgggactacaaagggtttctccaccagtgaaatattaagatgattgcttaggtttcagtcaataatttaatttagcaaggtaaaacgaaaagacaactattccatctaagtctagatgtatgaaaaactacaaataaaacctatctcatttggaaaacccaagacataaaataggatcaagcttttttggatggagagggtatttacaccattgataaaattaatacatacttaattactccaaggttaatagtaaacccaacagttagctattcatttgttacaacattaataactagccttatcacattatccaacaaaatttcttagagtcttgtgtgcatctggctgcatatatgcaattaatccttttcccttcttcctcctctcctcttttcttcaactccacacaaaatataaggtggcaactcttaatcaactatagtttacttatatcacttattatgtatgctcttagttgtagctgggcatatagcactagtagcattaacgcactaaaatccaaggaacaaccttttcgatgttttcatcagcatgacctaattatattgtcaaccaacaatcttcaactggaggagtattagatttatattccttctgtctatattctggacaggtctttgtccaagactagaagcaacaatattagagtaacagtacctgaaggaaagaaaaagtatacattgcaaaacgacgaaatgaagatggatcgtcaattcatcatactcttgtctacaaggggatgagaaaggacat

SEQ ID NO: 4005 - DNA, 22526 bp, Oryza sativa
gtctccttctcatgggtggtgtatagcttttggcattatcaactgttcaactccctgtcagtcaagtttgtcacctttttcttttgtgttgtgattattgattacttcttatatttgttatctatgcaaacgctttgcacaaacataaagctgtcgcagttggcagaatttgtgttgcttctgtgccattgaaagtttcaatcaattggcatcactgactgctacactgcagctgtgcctgttcttttccatctagatctagaatcggatgtaacatatcctaatattataaatcggtactgtgttggttttttatgggacgaagggagtacacttcttctagctactaaatgctatatttttcttaaaaaactttctacatatatatttcttaaagttattattttaaatctattttttaactttataatagttaatttatccgtttgtacctctcgaatcattcatctattaagtattccattcaggtcaaaagaagacacccaattgaagtaaaacatgctagctgtatgatactttataatatatgattagtgtattttgcttgcacttggatgaaggggctattttaatattagaaaagattttgactaatggtgatgcctcgcttcgggatctgctcaaaatatgtttcttcttttctaaaaattgtttttgggtacagatggaccgtgtaaacagatcattgttcaaagccaactaggaaagtaaaataaaaattatttacatgttaaatgttaatgactagttattgactgctgatgaatgtgtttaacatgtgaattatatattatgaaaatatttctaataataaatctaaaagtataaattttatgatgttaaactatataagtttatagaaatctatggtcaaagattaaaatgttacttaaaataaaaacaatcctaggacgataaataatttgaaattgagggagtaccgtgtttgtactctagcagtctgactctaaataattgaacaatcatgaaaacttggccagagaacacaatccaataagtaaggcccccaagcttaaagttattccaaataatgtatttgactgatcattctgcaagcagtgaatatatatatatatatatatatatatatatatatatatatatatatataatttatttggtgctctatggtgcccgggctacatgattcaaattgggtatatactcaattcaaatgagtatgaaatttttaaaatgtttaggtattaacattaactactttactaactagttcaaaacaagtttaaactaaatttaaacttgtttttgttagattttgattctaggtatataggatccaatcatataattagttgggtatgtaatcatggattgtgaaataaagttaaatttgagttgctttgtttataggtataggtatgaatcgaattcttataactaggtatatactcataatttaaaaattttgaaaaatttaagtgaatttttatattttataccatggtgccccatatgggtgtcctatatatatatatatacatacgtatatacgtatatatacgtatatacgtatatatatacgtatatatatacatacgtatatatatatacgtatatatatatatacatatatacgtatatacgtatatatatatatatatatatatgaatctcaagtgaagtcaatataagaaaacgttttagaatcaaaaaaagaagaagaaagagaacatttcaatctgcaaatttccctcatgtacttcttgtttcatgcattccattccatgttactccgtgaacattcctgatcatccacactatttggcattgtatttctctgaccaatgagatcacgacaagtgcaaacgaaaaaactggcaacatctacatatgctctcccatgtgcattttgcagttttgactgcatcaatccatccaacacaaacactgtatatcttcatcttgtgctgccatttcagtttttaggagtggtcagtcctggcttgcacagaaaaaaaaaaagaccgtgaatggtcactcacaggtggggcctagccgcctaggaccaaccagccaaacccagcatgaggaaagccacccatagatatagcagcctacttacacataaaaataagagcttatcataataagataagacatgactagaaattacatattcagcttaccagggtttaagtcctaaattcagtgcatttttcaaaagaaattctaacactttccgaacgaatcatctgaaacaacacacctagaactctcatctcgagctggctcaagcgagattataaaccctcattggtactcgtgagcttccatttcagtttttaggagtggtcagtccttacttgcacaggcgaaaaaaaaaaaggccgtgaacagtcactcacaggtggggcctaggacgatccagccaaacccagcgggagaaaagccacccatacacatagcaacctacttacacataataaaaataagagcttatcataataaatgagccattggttatatattcagcttatcaggatttaagtcctaaatttgatgtatttttccaaagaaattgtaacacattccgaacgaaccatccgaaacacctgaaactctcatctcgaactggctggggacgtccaaaatccacgagactcgagtgagatctcgcgacatcataaaccctcgttggtaacagtttacaccaatttcaagacacgtgtataaaaatatgcacgcggctactacgaacacggtgcgtgtgtggttgtgtgcgcgcatcgtccagagcgaaaagtacactccataagagaggctggggattagatgataaaactaaaactaaacaaacagagcctgggctgtgggccattcttggcttggatttactgggacagttcttccctcttggatcaggaattcaggaggggggagcttttggccgaattgatcaggaaagatgcagctagctgcagcgttgcggtggaccaccggacggccggcgacgaccactggttgtaccgtggtgatggcatgtcccggcatgggaagctagcaagtgcatttcagatttttccaggtcccctcttctgctctgttgctgttgctgtgtgtgtctctttgttttttatgcttgttcatcggtcatatgctaagggaatcttttaatgctgatatatgaaggcccatgtgttagagcaggtacaatagcaggctataagcaagttataaacatattttaaagagataaaagaagatagagaagagcagcgggctacaaatctgtagccaactgcagcacggactccaaaacgtaatgcgtgtatgacaggtaggaccagacattaataatatagtaagaactattgtatgaattggctatagataaattggagctagtagttggctatactattaaacttgctcttagtgtgggtgggtgggggtggaagagtcttctctccaagagtaggactatcatttttctagtggttttatagggtttttcaccaatttattttttcacaggtttggaaaatagtttttcgaaatctaaaataggcctgagattcaagatactggggataaatacgaacttcattataggttgctaagtgtcatgtgtaagatagtatatgagttggcagctcttaaccacaacataccatgttgtaagctaaaagatttgtaaaataagattgttcacttttttttttagtattatcaaaagttcacacttagtaagataaatcaggtggctatacaggcatagatgccacacgaacaaacggagaaaatttttgtacattatatctagaagaggcagtatgttgaaccacatcttggattaggagggtggccggctgactcagcaccaacgagtgccattgttcgttgctgtaaaccgctcttacatgcttcatcttggtttgatggccacacaaatttaaatgaagatcaggaactgaattttctctttttatatataggtgtatgatgttgtgccctgttttatctaatcaaaagggtttcttaccactatgaaaataaactgtaaggcgcgttgatatcactatcaaatgcacaacctttttttttttaagagtgaacttcataaaactataactattttatcaaaaatgttagtatgctgaaaatttagctagacattttagagaacgacaataatattatataattttattagaaaacctcatctttacatctttgacaagtttgggtctcctgaaatacttgtgctcttgcatcccacatgacatacacacataggagataaaattatagttttgtaataaaatcgtccactattgttgcggttttgtaaaatacattcccttaaaattatagcaaaatgatagttttcatcaaacaattatagttttgtaaagtccacttttttaaaaaaaataatgaaactagtacatgcatgtacatctcgatggccagtgcattgtgtagtatttcctttaggctgataatccttgtcgttttagacaaggctattgttaaactaaaaaactttgactataaataatatttaaaacatttgtcaaataaatatggctcccatatgtataggttgatcttaaaaagtgctctgataaaattatatacttattgatatttctatatatatatatatatatatatatagagtaataaaaaatagttatcaaatttattttttgaaactgtgtccttgttcaaaatgataagtattattagtccggagggagtagtataatccaaagttcaaactctttgtttaatatagaaaaaccttgctttttgactgacatatttcctccgtcctaaaataaatcatcttatagagtttattttttttcaaaataaatcaacttctacattcttacctaccattggtctacaaataaaaaaaattatttcttcaataccctttacctatccacccatgcattaatataagtttataattaattaggggtatttgggtcgtccattttgggaatttaggtttgaagtatttgtggaacagatcgagggattatttctctagctatctagctaattaattcgattcattcatcagtttttatttgtagggataaatgagccatgtctgtactgcaaactgcaaacatggataggtcaaaaaccaaagtccacaatagctgaacagctagcggcgacaaggttccttccacgctatgaataagggtgctgcatggcacggcaaaatcatagtacgtaagtacatgctacatgcatattatgattgcatgctggttcacatgcggccattatatactccctccatcacataatataaaggattttaagttttttttacattgtttgatcagtcatattattcaaaaagattgtgcaaatataaaaaaacgaacagttgtgcttaaaatactttggataataaagtaagtcaaaaaaataataataattccaaaattttttgaataagacgagtggtcaaacagtgtaagcaaaaactcaaaaccccttatattatgagacggacggagtatatccgagtgcaacaagaaaccatcatatgattttttttttctttgtgatgaacaagcctgccattttttagtgctactttatttggggacaaaaaggttccaagaaaaaaaaaacatgagggaactaattatacctagtacaccaacaaagttagggtatgtctaataatagagtcaattatcattatttatcaataagttatgaaaaaaaaccatcgcatcgttatttacctttatttcctagaaaatgaaaactatttcttaattagcacccgctggctaggcaatagcaatatgtaggaaggtccttatattgtttttccatatagctcctagcatattacagatttatggtaagtttatcgtacatgttggggtttttttttatagagacaattagacaaacatttatatgttatactcaaccatcattttttcattgtgtttcaactgtttctaagattaatttgaaggttaccactcatctagtttgccagagtactccaaattctttcgaacagtgagcctatatcttgcaaaaaaaaaaaaaaaaaaaagaaaagaaaagaggaccgctctttccagccttggacacataggatccacagtaaagtttgcaccccgagatggatctagcatagaggcggcgggatctcgagcttccactactggcgtgaggatagatgattgatgctattaacttcttgatacacatttgatcattcatcttattaaaaattacataactattagtatttattttgtcgtgatttgatttatcattaaagaaaatatgacttacattttcaataaaaaaattaaataaaacgaaatgaccaacttatgtaaagaaatcaacagtatcatctatcaaaacagctattgcattttggtcatcaatatgcaactgggcattacttaggacatcaatgcaagcgaagagaaacacagctagctgccgtgctcattgcgtagtagagtaactggccattgcattttggagtaaatggattgatataattttttaaagtaattctcatataaaaaattttgtaaaaaagcattatttaataattttaaaagaaaaacaatgaaggtgaattggaaaagaaggacatgaagacacggaccattatatcttgtctcacttgagcattgcagccattgtgtagctagcaattagctaggcattcaggtttgcagagtaacaatcatggctttgatttgacacggcatctgtgtcatgcgtgcttttcttttaggactgacggatacgtgtacggtatacgcttccatcaccacaactggctacagctactactgtgtatcctacgcgtgtgccctggacagacagacacaaggcatgtctcggataggagtggctgcgttcgttgccttgaacttgagggaaattttctcgcactccaaacaaaagaaactcgttatcatatgattaattaagtattatttttttattttatattaaatttatttttagcttctttcatttatcttaaaataaatttatttttttaattattgaagaacttttaaaattacagaataattatatttggagtagataaagtgatcaatagttgtattgggatttgattaaaataggggtgttctagtctttttctgcaaatacactatccgtcctaaaatataataatttttagccctcagaatttatcccaaaatattaacaacttttccaccaacattctcttcccaaccaatcacaaccctccaccattcacttttcctatctacctccacactccccatccaatcacaaccctctaccattcacttctacctattttcttaataatcatgtccaactctaaaactttttatattctgggacagagggagtagaacataccatttcgtctctccacattttatactcgtattgcttatatactacttgcagagagtaacttttgccggtctttcaattgatgttcttgaattaatacacggatcactctggtttaacactttcaggagaagaatatgtgtccatctcaggaggtcgtgcccatgttaggatggcaatttccctattggaggtaggtacccgcccctacggggacgggacggggctggttttccacccgtgggttggctggggacaggacccaccacatttgcgggggcggggccggataaagggttccacccaccccgctagtccctgtggggcccgaaattaagataaggccaaccagaaaagcccatctagtccatgtaggggatgataaacgcgaattcccaatcccatccagcccccacacatgcaaacgcgagcactcgttcagacttctaaacgcatgaaggttgtggtgttgactcacagaagtcctcttctcgcgattgcggcgcagcgccagatgcctgcacctcctcgcatcgccggcatcttgctcctcctcgcgctgctgatatctcactactcctcgcgtcgccgacatcccgctcctcttcgcatcaccggcctctcccttctccttgcatcgccggcctctccttcctcctcatgacgccggccaccttttcctctttgtgccacatacctcctcgctcctcttgttcctctcccaactaagtcttcttcttccaatggcagagtgagtgacctccagcggggccccggtcaggtagcattttgtacccaagttcctcttcggggctggggccgggggatgaagtcaagggttagggcagggtcgttcttgcccaacccagccccgaccgaccccattgccattcctaacccacatacggctcatctatgtattgtccttgccaaccgagcatacgcatggcctcaggcgcatgggacctctgctagtgggcctcgagaagctcaacctcctcgttgtggcaggtctcaccctccctcaccccctccccctacggcacagatccactagcagcagcgatggatgggcggatccggcggcccctactcctcctgcatggatccaacgacttcgagcgaccatgacgacaacgacagtagcctcaagtgtgatggtggtggatcctgacgtgatggcggtggcggcttcaacacgatgacgatgcaggggatccggtgtgatggtggctagggttttgggttttggatctatggtttttgtatttttgggttttgcaatttttattttttttgtcaaaattatttttgtagattgatggcttaagcacctgcctacgaaaattgtattttttttcgcaagcagttgcgccaaccacatgcaaaaatattgattttcgtaggcatcttggtgtaggcgggtcacctagccgcttgcgaaaattggttttgaccgtattaaaaatttgattcctatagtagtgtatgttcagcactctcctttcacgacctctattctcttgtttttcacgtgtacgctttgcgaactactaaatagtgtgtaaaactttctataaaaaagttattaaaatatcttattaatctttttttatgtttttagctaatacttaaataattatatggagtatcggatgtgacacattttagtactacaagtctgaacagactctaaacatattaaaacatattaagacatgtcatatccgatcaaagtaaatattttgagacagatagagtattatttatctattgtgcatatatgtattttatatatgttgatgacttagcaagttgacaacatttgtgtccacttgtatagaaacgctatacatgcataattaaggctgtgtgtttggtatttcggtttggtaactacttgaggcacataaaataacttactattgttagtgtataattaattaatattagcctaaaatataaaaaaagattaatataatacataaataatttctctatagaaaattcttgaacacgcttagtagttcgcgaagcatgtgtatataaaaaaaaggagaaagtagatgttgataaaggagagtgccaaacatctcgcctacgtgtccaatgacatggacgcctagtttatttcaatttgatcgtgcataatactccttccgtttttaaatatttgatgccacttttttgaacatatttgaccattcgttttattcaaaaaagttaagtaattattaattcttttcatatcatttgattcattattaaatatactttcatgtatatatatagttttacttatttcacaaaaaaattttaataatacgaacggtcaaacatatgctaaaaagttaacggtgtcaaacatttagaaacggagggagtatgcgtgaaggtcaatctactctcggagtctgattcttttactgtatactagcattgtcttttatttatatttatagtaatcattatattccgaaacctacatacgtattttatatggtagcgatgcgttttgtatttacataataattctagttctttatcggagcaaatatgttggctccagtttttattatagaaactttgtaaattgagcctttcccatacaaaagcttaatttatacacgtgaactttttcgaaataagatttcaggccacgcgagcatcgacgtgtgtgattccgattcagcttcaaactttcggtgtcaaaaaattgtatataaaacctttgcagaaagtttgcatatatatagaaacatagattgcgcatacacacaaaccacgctaaacacgtcctcacgcaaaaaaaaaaaaaaaaaaaaaaaaaaaaaaaaaaaaaaaaaacctcaaaaagaccgcaaaaaaaaaaaaacacgtcctcacgcgccacgtctgtcgtctgagcaaaggttgacacattagaactgctccatgtacattaattcattcccaggagaaaaagaaaagagatactccctccgtattttaatgtatgacaccgttgacttttcgaccaatatttaaccatttgttttgttcaaaaaattttttgccaatatgaaaatatttatgtcatgcttaaagaatatttgatgacaaatcaagtcataataaaataaatgataattacataatttttttaataagacgaatggtcaaacgttggacaaaaagtcaacggcgtcatatatatatatatatatatatatatatatatatatatatataagttttttagctaatacagtaaattatcacttaatctattatataaggaaggagtacatcctaatgtgcccagctctcagcattcaaacacgaaataaataaataaaactagtcatgacaaatataaagctgccagatataagccatagcttacgctagatccataccaaaaataaataaataaataaatactcctatactccttacaaacatttataaaaaggtatggaaaaaaaatagagagagacaagagctgtgtttgtgttgtgtcgtgattggtatttaaatccggaaaaagggtccagccactacggttttattagttggcgacaagccaaagccgcaaccccacccccgacgtgctcctccgccaccgccgccgccgccgacgacgaccgccgcctccgccgcgatctctcgcctctcctccctccctcctctgtacgcagtgtactactacggtactaccgccgccgtagtactcgctggtgttggggagcggccggatggaggcggcggctgcggctgctgcggcggcggaggcgcaccaccacaatctacacgggtgcctggccgtcagggcgccggtgccgaggtgctcgctcggcggcggcggcgggggcggcgcggcggcgatgggtggatcttctggtgaggctgtctctctctcctgctgcgctcgcttgtgcttccattggcttctctggttttttttttcttcggttgcgatgtagtagtacgacggttttggtcgcctcccacctgcttgtgttattgctcgtgtggctggcggttgaagtttcttagtttttttttctctctctctctctctctccgaatttttgttttttttactcagaaaagggaagtttgatgcattctaggatttctttttgggggggtttatttgtgcgtcagaattatggggagatttttgcactgttccaaatgttgtgctgttcttgctggagttttttttttttttttttttggttttaccttccattggtgctgttcttaatctactgtgctcttgaacatttttctttcgattgatgctgctttcctctgctcctgccgttctaatccagcattcttgtattttatactatacattttcctttccctttttcacctttcttagaacagttccagtatctttggccactggtgtattctgatgatttttgtgatgttacctgaatatctcaaatttttatttttttttcttttttcattgacaagaagtcagcactggagacccaagaggaatcttataaaaaaaaaagctcttggtattgtcaatttctgtacttgctaccgcttttggccacatacttgtttgtggtggctcagagagaaagttgtggcataatcacacaaggaagctaatcattgatcttgtccttttatccttttgggtgccacattgctaacttctgtgcaattactcttcttttcggtattcgctagatttcaggcgcccgaaaatgtttcgatagtatctaataatgtcgcgcttcattgataatagtatcgcaacaagggactaattatctgcttcaataattatcagcacttaagtagctggttagtagattcacttgctgtccttcacctccttttttgtgctaatttcggtactaaatgatggcacctttcctctgtgttcttatcttggctccaaaagattgatatatattgatatgatatgactaaaccacatcatcaaccgatgttgattgtacagttgcaacatcaaaaaaaatgctggaccattagcttattgatgatggtggcaacccaactgttgcttttgcttttaagctgagttttggttgggttcatatgcgcctaatcttatcggttggaggcagcttagctgctctaatttggtgagaaatattggctgtgatggcatatttgttgggcaacttgagtagtgaccgatgagaaagctgcagagagaggggcatatatgataatgatatatctctgggttaagaacgttgtcgcctaacaccatgtgggaggtatcagtttggtcggctgcaaaaatgcttttgccatgtctgtcttatcctctggtgatagatccactggcttataaatataaataaggcatttgtaagcttgtttaagatggcataagcaaaggtttgtgtgtgtcagagtcactaggcctagctagctccatcagttttggctctgggatggtgctggggcagcttgcactgtggtccaagattgccagttcagtaatccttgttttttttcaatggtttaatcttgcctctcttttttttctttttgttgcattcggaatgcagatgttaattatggtttggtagtgtatattaatattattatattggtgatttttgccttgatagttttgaaaagtttgccattctcttctcttctttggtgaatatgtgtggtgtaatctgatacataaaagggattttttttttggtgaatcttatgagggaatgtacctgttcttgtgcagatgaagcatcctgtgggtcaccaagatggatagggaagagcctctcttgcgtatgcatcaagagaaaaggagcctatgagagaatatgcatgaaccttacaccagtgcaggtatgggcttgcgagatatctttactgtgcaaagatttgcaatgcttttatgccaatgtgcacagacagggcctttttctgctgtcagaaaaggatttatctgcagatcaaatcaatcaatagataagcgggcctgcttttgagtaaagatcacatcgcttaatcgcagactcgcagtgaccactcaaaagggattgtttaagctttggctttaagttattgtttttctttattcatggatattagtttttttttcaatttcagtatgtggtctgaccactgacatcagaaaatttacatttcagaacttcctttgaaactttatctcttcatatatatcactaatacagatagttaaaacaatcatctcttccaatttacaggaagagaggcttcagaggctgaggcaccgtatgaaggtttattttgatccttctagacgagatcatcaggtaaatcttgtactagcaataagccaataaatgaattcatacaatatgttacatttccctctgtctaactgcagtgtagatgtagacttgctatcacacactatccaatgctgtagctgtagataattattttggcactgaacatgatcagcagataaaatcatgcataacaatcagtgaactcctcagttttggtattgatgacactgatttgactagagtaccacagagttacatggtagtaacatgtactcgtatactttgatgtaagtttctttgtattgatatcacctgaatcctgataaatagcaaattatgatgataggaagcattgaaagctctttggcatgcaacatatcctgaccaagaactacaaggtttgatttctgaacagtggaaggacatgggatggcaaggaagagacccatcaactgacttcaggtactccaaactaaaacttgccacctgacagattagctccaaaaatatgttcagctggtgtgaagttaagtgaaaatgcactacatggtgcagaggcgcaggattcatatctctggagaatcttctattcttcgcgaagacattctctgtaagcaattcttcatcattgctttcattatctgaaacactgtagactgaagatcgccctcttgtttaatactgatcttctttggttggttaatccctgtaggcctcatttcagaggctgctaaagaaacaatgtggcaatcgagctacttgggagtacccatttgcagttgctggtgtaaatatcacattcatgatcatgcagatgctggatctccaatctagtaagcactgacccaattctgccagtaaatccagtctgtggaccgcagttgtactaattagacaataatattgtatgcagctaagccaagaacgtttgttcgagctgtttttatccaaatgctgtcaggtagggccagttaagtaaatacctttcctgcatcatacaatataccaacattttgaaacgaatttgtccttgctttgttcccccagaggatgagtgggcatttgatctcctctactgcgtcgcgttcgttgttatggacaagcagtggctcgacaagaacgcctcctacatggacttcaatgtaattttcctgtcaatgtacatgccatattttctccgtaactcatcagattgcattgttttgaccgatcttgcgattctgttgtgattcaggagatactgaagtcgacacggacacagctggagagggagcttctgctggatgatgtgatgcggatcgaagacatgccgtcatacagcctgctctgctagtagtggccatactggttgaacaatcatgattgagtcaatggttctgacctctgagtgtatagccccctcccttttgttgattccagggaagggaatttttgatggcatgtagagcaatggcctcctattgtcatgctgaacttgtcccactgtaaacaactcatctgggcatcaccacaatgaattagaattgctagcatccaatgtcaaagctggtgttaatctgtcatattttaccccatggatgtaacaacagaatcaacgagtgggtaaaatcaacttgcaacctctggtgaatggtgttcaatgaatcctcatttccttacttaacttgtcaaacttttccgatatgatgtcagccttgtcaacaatcctctgttcatgaacagaaaatcagctactatgaaattgccaaatgctgatcagttctgacatgctatgaaattgtcgtttattcttccaatgccgacgtcagctgtcgtcgccggccaccgtgctggagccggggatcttggaaagccgcgcccgcttcatcaccttcctcagcctgtccacgtcctgccacctcccggcctcggcgtacatgttggagagcaccacgtagacgccatggttgccgggatccagcttgagcatctcctgcaccgccctctcggcgacgtcgatgtcgccgtggttcttgcaggcgttcagcagggctccccagatcaccgtgtcggcgtcgcaggtcgtcatgccacggatcatctcctcggcttccgtgaggaggccgctccggccgaggaggtcgaccatgcagccgtagtgctggatggtcggcgccaccgcgaagtccttctccatggacgcgaacacgcggcgggcctcgtcgagacgccccgtgcagccgtaggccgacaggacgccgacgagcgtggcaccgttcggcggcacgccgtcccgcctcatccggtggaacgtagcaagggcgacctcgccgtggccgtggtgcgccagcccggtgatcagggcgttccacgtcgccgtttgccgctcgggcatccggtcaaacaccgccgtcgcctcctccatggcgccggtcttggcgtacatgtcgaccagcgccgtcccgaggatggcccccaccacgggcgccgtcacccgcctcgactccatgagctcgtgcacgcgccgccccatctcgagcccgcgcgaccccgaccgcgcgcacgacgacagcacggacgccagcgctgcgccgtggggctcgatcccgtcgccgaccatctcctcgaacgaccgcatggcgtcctcgtgcatcccgttttgcgcgtacccggacaccatggtggtgcacaccaccgcgctccgctcgggcaatccgtcgaacaccctgcgcgcgagggggacgaggcccgcgagcgagtacgcccggacgaggccgttggcgacgtaggcgtcgcgctccagcccgtgcctgacggcgagcgcgtggagctgctcggaggcgcggagggggaggcgggcggatgccttgaggaggaaagtgaaggtgtgcctgccgggagagtacgagccgccgccgccgccgctgccgcggcggaggagggagaagaagcggagggcggaggccgggtcgggggaggaggcgagggcgcggagcgtgatgttgagcatgaaggagtttggggcgcaggggagggaggcgaggaggcggagcacggctcccggaggggagagcgcggcgtgggcggcgaggaggcgggacgccgcgaaggcgtcgtcggcgaggcggccggagacgagcatggccgcgtggacggcggcgagcgcgcgcggggtcgcgcagcggtcggccaggagggacaggttcggccggcgccggatgccgccgcgggcgcccacggcggcggcggcggcggcggccattggcgtcgcgtgcgtcgccacactgtacacggaatcctcctctctgcgtcgccctcttcccaaaaaaatacgtatatagggcgtgtttagattaaaaaaattttcgttaaagttccaacttttccgactccgtcacatcaaatgtttggatatatgcatagaacattaaatgtggatgaaaaaaaccaattacacagtttacatataaattgcgagacgaatcttttgagcttaattacgctatgatttgacaatgtgatgctacaataaatatttgctaatgacagattaattaggcttaatgaatttgtctcggagtttacatgcagaatctgtaatttgttttgttattagtctacgtttaatacttcaagtgtatgaccgtatacttaaaaaaaaattggcacacgaactaaacacaaccatagtatcagattttaaacaacaagtaatatgattttatgaatttagatagatcatgaatattaggcatccatttataactgatggattttactgtaattttgtaaaacgtccatataaatccatttaatttgtgttcaaattgataaaatccttcatctcctagaggaagccagcaaatctagttgggtaggaggcagtatggaggttaaggcgttcctaaggtgtcgacttgatgtccttgagactgtaaagtgtcgctttaggatatactccaagttatctctgaggctctaaggcatcgcaccaaggtaagacagcttgaggcgacacctgggagtctcgcgctctatatcgctagtgaaaaaattagctttcgtgaaaagaagtttaagtgaaaacgagcccatgcactataggaaacatagagaggggcatctagcaaagcaatatgacatttggtgactttgctccctccccttcacatctgacagtagcgctctttgcatctggcaacgacgtacccatctctttcgatggtggagactctcccctcaacgagtactatctcctctcccccttcatcatctgctgagctactcctttctgttcttatttctatgctcttctcttcctcaatgctcatttcttgggccctccgttgctctggtgctctccctcgctgctcttggcttcccccctctccctaactactcttggcttcctagttcctcccgcttccttaactatttgcttcatgtgcatttgatgtagtacatagaatactgttgatgttattggttattaaaatgctaaattattatacccatctaacacttaaaatactcattatatcccaaaataaacaaatttagtactggatgtgacatattatagtactatgggtgtaacatgttataatactatgaatctggataggaggtttttcaaagacaattcatagtattaggatgtgttacatcccatactagattagtttattttgaaacagagagggtatgtactactatcagggctcaacaatttgcagcaacaaggtatataaagtgttgttaaaatgtagttatattacactatatttttgttgtcatattatattattacgattataggctgctttcggctgggctagctgccatagcggctgcggctacagctgttgtgaatggctgtagctaacagccgttttaaactatcacagtcgctgcggtagcaggagcaagtgcctccgaacaaagccttacctccgaacagacttgccaaaccactctccaagccgtattttaacaaatgtaggaaaaaatgccctccaacagcctctctaactgcctctccaagttatccaactggccaaaatacgcctctccctggccaaatctggccagcctctagctagccaccccagcttgccaaaggtgggccccaccctttttcaccgctccatcccaatctcgcagaaaatcaacgctccctgcactcgtcgtcggtcagccacctaccctcgccatccaccgtcgcgtggacgtcaccgcctcccctcgccgttagtcagccgcctgcccttgccgtccgccattgcgtggacgtcgccgccgcagcaaagggagaggggtggggaggagcttgggaatgtctcgccgtcgccgctcatgacttcagtcgatcattcccatctctgaaatatagagagggtgttgatgtccctgtcttgctttcatcacctgcttcaacccatcgaaaatcccccaaaaccaagatccccaattgctcgaaagagaagagagaaagaaacaagaagttgcttgaaagagaaaacgagaggcgcaaacaagaagggccactgccgccccgtcatcgccgtgcacggccaccgccaaccgccgcccgtcgctgcacacaaactacatctgccgcaagcaaaaacaggcttagggaatagggggagcaaggtgaggaagaaagaagtggtatagaggctgacgcgtaggtcccgctgtcatagactctgaatagagaggatgaatggagagatggttggagatgctctaaggatgaattgactagccaaattaaatggagagttaactaaatagatatttggcgtccgatttaaagagactgttggagatgctctaaggcgtgtagggccatcttacctcgccttaacgcctttacaaccattggaagcaggatttactgaaataattgttttccagtactatgcatgatgtcggtttcaggtgtttgcaaacagaaatgtagggttagtagacagtaaacaaaataagtaacaactttcgcaacaacaattttattattcctctttgctaaaaaagagctacaaaaccgtcgacggatggcacaataatgcaacaatatgcccacatttacaaatttatttattttgccaccattccggattttccatttattatttgcattgttcttacatatgctaggtagctcgccatcaaagcactcctgacattgtctttgcgtaccttcttcagatctcactaaacgacttgatagtccggaaaccatgattctcagggagcggtgcatttcccgggcgaatggagattattacctcaaaacctgaaaaagaaaatgtcgggaaagaaaaatataatatgaaatcttgacccaaggaaacgaatgatagcttgaaatgatcacatgattaggaatggcacccagagaggtcgactggttaaagctaaagcatcttatccaccaaataaaagcatgaacattcccatgaatatttgaccagaactagtcattacctgcactttttgcagcaacagcttcttggaagacatcggtgataaataagatctgagcaggactgtccaccccaagtgattgcgaaatctcaaagtagctccttgtttctcttttgttactgcggtttatgcgagatggaatcataatttcactaccatttttcagtatatgcagagaaatagaaatggaacaagaaatcatacccggttgtggtgtcaaagaaaccacagaggtattgtcgcagatcaccataagccgtattgccaaataatagcctttgcgcctcccggctgccacttgagtatatgtagacctatttgcaggtatattatttgttatcatgtcatctaatactaatacacctttttttgtattttttgcaatggatgattcaaaaatttgaaattgatattgtttagcactatctagggtcaacgttcttgacccaagttggcagctagtaataactatagtaaaccatgaaaacatattaggagccatgaaaagtttaaagttcacacttccacacgaatttgactaaagagataccttcatgccactagcatgccagtgctttagcgcctcggggacatcatcgaaaacaactccttgcagttctttactttcaaaaccagtcctccatatgtggccctggaatttgcattaaaaatgctgaaatccatcaaagaaacaggaatatgcttgcagcaccgaaaaagaatgtggactaatctacctggagttgtttcaacgacgtaatcttcctgtctgctttaatcatcgattcaacattagcaactaatgcattgataacctcttctttgtcagcatcgtcaggtggaattggaacagacccaacaattccatttttcaggtcttcttcaacctgaataatgaatgctaatatgttatatcttgcataaaacagagatgggcacattcacgtggcctagtggtaaaactcatggttctggtggtgaggactccagccactttccaccatggtggtaaaacagttaactacgtccacaaataggaagttgaggaaccaaaattggtatggtaacttagatcaaatctaacaattcaaaacaaaataattttcacagggctaatcaaatagtatgacttaaataccatcgacaaatacttagatggtacaagcttgcagccttacaggatcaacagcttcatgggatgtgcaaaattgatttatcataacttacttggatgcgcaatagtttgatgtcctctttggtttcatcagaactatatgttgaagtcagatgctttcgcacattatcacgggcatagggaaacatcacatcagtcacaaatgatattggagtagttgttccctcaatgtcaagaacaacacaatgctgcaagagaacacaaaggttagctatttgtattccagaaacatattatatggatgagttgaccagatgtagcaaccacaaagttaagaaagtacacaaacaataacacctagtactcactgctgcaaaacggtacactataagatctaaaaaaatcatttagaaggtagattttgcaaatactcagaacaaagaacagacctttgatgatttggaatcagggcatccatttggaatactagagcttagaacactgcgtggtcttttggcactgtttattggaccatgctcaggagttgtccaatcaatacccaattgatagagcttgatggcagcatcaaaaaggtaatgatagcattcagcctgaaaagcacaggcatagcaattaagtaaatatatgtcatggcataaagtccaggaaccattatccctcacaatgtgtgcatgaccacagttatatttagagtaaattgcacagttggtacatgaacttacaaggtggatgcgatttagtacatgcatatgtaaatcgctcatttcagtgcataaacttgtctaatacgtgcaaactagagccaaaacaatatgttgtaactaatttcactaagttgagcactgattaggatgttatgtaggctcacatgtcaatatgatgttacgtaaatatgcatatagtcaatcaaacatacaataagtcatgttaattatacataaagggagtatgcaatggatacgaaataaatgaagaacaaggttaaattatttacacatacgacatatctcataccctcacgtgtgcgcctgacattctataatcagacgaactcaacatgaatagtcacaagttttggactagcacgcacgctctagataagttcatgcaccataatgagtattttacaagtttgtgtactaaattgcacccacctaacaagtttatat

SEQ ID NO: 4006 - DNA, 4389 bp, Oryza sativa
cctgcagccctaaatcctaattaaccattcattctccctctttcatttagtcctaaccctacatttattttcaattccaatcccacctctcatttccaattatccaaacatagcctacattctcaaaaacattttttcatgcataatacctcagcacaagcaagccacgccgtactacttcatgccatcacctcgagctgcgacgtcatcgccgccacgtccttcccgcgcggccgccgccaccggtgagctccgaggcagaagccttctcttttcgcgttgtcgcttcccccccccctctctctctcttcctcaactccgacagatgccgcccgtcgtcgagcgccgccttcccaccgtttcggagctcggtgccacgccatgagtccgcctctgtctcctcatgccagtgctgccactcgcagatgccgccgagcgttgtctccgccgaatgccgccgcgccggagcgcacccacgacgcgatggagcgctgccttcaccagagagttcatcaccactggcggcatctagaagccgagcagccgcggccatgacattagaaaggggaaataaggaggaacaagagaatatgacaagtgggtcgagggatatttttgacctttcatgctctttatctctcatattcaactggaaattaatattttaatgtgtgcggtgtctagcagcaaataaccacgtttagagaaagttttccccaagagtgagtttatggtatcctatagctaaaaccatagagtcgcgatgttatgtagcaaaatttgcctatagtcataggttcatattacatattgtcccatacaacgttacgtgataaggaaattaaaaaagcaactcaagtacatttacggtacgatcaattcaaatgataaaagggctattaactcattagaatcggatgagaaatttgaaggcgaattaaacaactgatggagagcattagtgttattctaaaattgcaggcgtagttattcttatttaatcaagagtaaagtgtattgctgcggttccttaatttaacttgttcgtttatgtcatctagattgccaaactctcatatctctaaacttattgattattccggtttcatattgccatggccatttacgtggcatgttacgtggacactaaagtgacacgccacataaacattccagtcccatattttctttttcttcccctctacgttttccttttttttctttttctcacaccgacggaaacaaataacagaagaaataggggagtaacaaaagaaaatgagtcagcatccatgtgacataccacgtgagctccacgtatgatctcggagttgtggccgtttgaaaccggaatatcatatttagacaagttcgaggatcgaaaatgcaatttaagtgtttgggggtgctgtatgacacggttgaacatgtttagggacgggcattgcactttactctttaatcaatatatggggagccatcctttttatttattaaaaacatacatggagccgtactcataagcatggacggaggattattcaacaacgacaattgagatgaaacaaactaatcagaacgaaatatcaattggatgatgaaattcgaaattgacgggctcccaaacagcattttcatgctcgatcttcgatcatcagcagcaatgaacgcatctttattgattttacacgaccggaccgggaacgtgataacctgaaaaataataataacgtacgcattacaactgatcaacagaaatttccagaaagagaagatctgtatatataggaaatgaatactatgggcggttttggctaatttgatgcctgccctaccaaatagttggcaacttaattagatagcatttgcagacacttagtttgttgccaatatttactaaagcttacacaatatttgcagacattttttttttctctctcgaaatctaggaaaaatatgtttctcttatctttgttttacagattacaaatgtggcttcgaaccaaaaatatattatcgagatccaactaattaagcacggaacatgtatacaacatatgtttttggggcatgcatagttgttgattaattttcactaccacaaaaactatttttcagctgacatcatctggatctaaacttctatatatggtggatacactatcgcatataggaatcgatttttacatacgattaacctaattaagtgaccttatctgaatatcatcatcagcacccacggtgtgtttctacatatggctcttttgtggtccatctgtaaaaataaatatgggtgttgccgatgtttttttcttcaagtgtctcctgacctaattacgtatgtaacaactgatacatggaacatatcatatatatgtgcacaagattcgcgtgcacaccagttaacaaatgccacgaaatttttttaaaagaaatcgaacatttactctgatatatatatatatagaagtatatattgtgcaatgcatgtcacacaagcttactgccgcagtaggagccagggaggagtgggcggtggcagtaggcggcgacgtagacggccttgtccatgcacacgtactgctccacctccggcgtcaccattccgcacaggcaccccacgtccaccctcctcaccgcgccgcagcacgccctcgacggcgccgccttcgcctccgccgggaaccgcaggtacccctcgcagctccccatcagcaggtccaggtccttctcgcacttgtccgccgccgacggcgacaccgtcgccgccgccgccatggccatggcgatgatcaggaggacgacgaagcacacggcagctgatgaagacgatgatgcaattagcctcgccatggctgaaaggaaattagctagttaagcaagatttggttgctgagtggtgtttgtgagtgctttggaatggccgaatgggggctgtatttatggagagattagcatggaagttttgtgcaagttgcctctccatgcatatgcgtcttccttgataattaactgactagttaaattagtttgttcaatgcctacccacttctagtaaactgatttaattaattaatccatgtttgatatggcatgttactagctctgtcctacagcaattaattgtttaggcgttccttaaaatcacatgatgtatttcgagcttgtttggttggtgccacgttttaccacacttgagatactccatcttataatataagggattatgctataaatagtacaagagtttatatatgagacataaagtatgatcttgggatcataaaatctcttatattataggataaacataattccttatgttatgggatgaagtagatgagtctaaccaaatgttgctaatgtttggtttgttcttacaacttctacgtgccacactttctttatgttttggttcagctagtgatagtccctttttctagccacagtttgatggcaatgggggtgcacgatcgtccgtcaggtgaagataactattaatttggcggacacctgagacacacggtccagctttcaatcaacacgatccaaactctgcaaccacagtaacatgtttcctctggttctcaaccatgccaaaactcgattgacctcgccgagaaggctaacccctccatgcccatcgaagaatacaaacaagaacaagaaagattagaagacaattgtagataaattattaagaactcaaagttgggggttccacaaaacgatctagctagcggcgaaactacaatgacagaaataatctaagcaaagttcagctctaaacgatgatgactactgaataaatatgggtagtaacatcctagggttaggcctagggcgctcacctccttgggcttagtacacggcacaataacaaggctcaagatccaaatcagactcgaactaaaagatatacgtgacttgtgatctctgactgctaagaatgagtttttatgtggaactagtatcatcttaaaatagaatccattacctttccaactagtactcatgggcccaaaagcccttctagatcagcggccagattcatttgaagttgatgttgttatgaggtccaaattcaaattcaaattcaaaacatgcaaaacttcatctcttgacttctagcagtaaacttggtgtaacaccttgcctccaaaatccgcattagtccgctctacacgttgagcggacccacgttcgcatggtatcccgcttacactttcgtcctcgcctcgtgtaaaaaggataacccggggataccatggttggagcaccaaggcttataagcaggccctcacccacctaaacttccaaggtggtactaaaccaccactacacatccacttctaggccacatgggccaaacacacactactaggcttc

SEQ ID NO: 4007 - DNA, 6124 bp, Oryza sativa
agcccggcgtggtggcgcgccgcaacggcgggagcggacaaagttaggggagatgaggccgacgggagagggggaaagaggcgacacctcgccgccgctccacctgctccggccgcacaccgcccacactcggagccgccgcttgcccgccatcacgctcacccgccgcttgccgtcgccgcagccgcactcacccagagacaccgccgctccgcctgctctagcgcgctgacgccgcccctccacctactccagtcgtgcgctcgcccatcgccgcccgccgccggcaaagagggaggagaggaaagagaagaggagagaaaagagaagaaaaaataaagtgcagctgacatgtgggccccatgaaatttttttatttttttttttgctgactaggatgccacgtaagcgaaaccacccacctatacttccaagggaccttctgtgaacggtttaaatgagtttagggccgaacatttctggttgagggacctcaaaaaaatcccgctgttaagttgagggacctccggtgaacttattccaaaaagatataaaagggaattcggcctcggggttcgcaggcccggcccgggtagacatctatgcacatgcccgctgctttggctgggccgagcgtatccatgtacaagcgtaggaaaaagttcactagaggtctctcatgtcgtcgccgagttacaagatcgtccatgaactaaaaaattagacacaacttatcccttaacttacaaaactggatcactttagatactaagacggtattgttcccggttaattttggctagcgtgacggttgagtcagcgtgagacctatgtggctcccacatgttagcacctcaatcttccacctctatcccctctcttcccatctcaatccaagattccaggtggccagcgaccgaaggagataaccggaggagggtggcgctcggcgggagaggcgtgcagcggtcggcagtggcactcactggcggcagcggtgctcgctggcgaagacaacgatgctgagccgatcaaagatgaggaagcagaggcagcgttcgctcacaaagatgccacgtggatccagcaccggatcttccactccaggacaccctcaagccgaggtgcttgggatgcggtagcagggacaggtgacgggggatacggtggcctcttgagatgcggcgacaaggacagtggctgggatgtggcggtgaggacggtggcgggggattcggcggcctacacatgagatcgagcatctgatgccgtgtcgcctgctcatcgagcaggatgtgatgtgagagcgagatcccactattgctactatggcttctcagtgtcttggtatctcgtccgttccgcctacgatggctccgcagtgccgcgatccatggcggccttggctgcttcggcctcacgggcaacttcttcgagcaccgcgccatcacacgcaaccatccccaccagcaagtccgtcaatgttgggcaccttttccatgcaagattcctgcttcgccacgcgcccaccctggctgctgtgtcaatggcgcctccgcctacgccatcgtccttgtcactagcgtgggagaatgacaagtccatctagggaatggcttcttttcacgccggggacaggcgccgcttcgcccgcatcaacctcgctctctggagtcgtgctctccatgtcatcgatgagggtggtggcgcctcaccgcctgtgggcctcctccactcctgccggggctacctctctgcagcattgaaaagggaaaggggaaagtgaaacaaagggagaagtaggagagtttgtgtcatattgacatgtggtgttcactaatttttattttttcatttaaaatgcactgaaaatgtaggtctcacgctgactcagccatcacgtcagctaaaaccgggaacaaagtaccttagaactcaaaatgacccaattttaaaagttagcggatggattatatttttaggttcagagaagactttggaactcacggacaaataagggacctaaggtgaacttttccacaactcgtggtgcatattggacggcctttggttcaatatgggagtttaagattacgaggaattgttagcgagcttataagaatttagagttttctgtttctaatttattttttatcctgttctcataatatggatgaggaggtgcttttgattctgcgagaagctacaattatcattaaaaaaaagagaatcaaatgactcgtgattcagttgcactggaagaccgagcatgctgccattattgtcgtgcgagccgccaacgaggagggcagtcaaacactgcggcgatggatgcctacccttatgctcaccctcgcagcagagagggcctagccgtggcccgtggtggtggcagtgagggagaaggctgacagaggaaagacaacgaccaatggatcccacaccgatttttcaccttgtgttgccacgtaggcaaaattgacaaagagataagaaaccatcaaaataattgcaaagctaagaagcatatttggactattgtcgaacctaatacttcgtccgtcatataatatagcaatctagtattaaatgaaacattctatattacatcgaatctggagaggagagagtatatagtagtagcaaatatttaaatttccctttctcacgggtgtgattatgcagatgggttaggttgcaccgacgggtgtgattatgcagatgggctgggttgcaccgacgtgaggttgggcaatagtggtccagtccagagtccagactcagcccaaacaaaaaaaaaatgaaaaaactcccaccgcctgtttggttggaggtagtgtttagaagggattatgagtttagagggatgattaggatacatgggaattttagtggggataggatggggaattgaggaaggaactccctccttttcaataccgataggggcaggtaattggaaggcaattcctcctttatctaaccaaatctcagccatctgtttttattaatgacctaatcttcaactaaactccctatcaattttcatctcctctactaaataagatattagaattaaaaatcaaattcccatattaaactcatcattaattccctttaaactctccatctccgtccatcaagctaccaaacaaccgccagcgtaatcgaggaaagaaaagaaaacccagcgtataaaactggcatccgacttccttttgcctccgctgcgtctcctcgagcagagcagagcagcggcgtcgccggcgttgctgctcccgcgccgccgcatcctcgctcgccggtgacggtgagcatccatctccctcctcctctccggcgacacttctcgaatccgcgctaaccctagcaattcttctcctgtagatccggaagattctctctctgtgccttgaataaaccctcttaaaccccccatgtcacgcgagcctgcggcggcggcggaggcggaggacgtcgtggcccgtctcggcaccgacgaggcgactgggctgacggaggaggaggcggcgcgccgcctcaagctgtacgggcctaacctcgtggtcgcccatcacccccaggttcgctttgttcctccttccctccccctccctgtttcttttcttttgccctaattgatttcgacgactttcgtggggattgcgctcactaacgcctcacaatcattctatactgttgcagtatgtgtgtggctttgcatctgctgtatgtttcactatctcttgacttcaattggcgagtatatgccctccatcatgtcgaaactctagcaagcaatgaatcgaatgccttttgagcttgtgtattgaactataagcctcatcttttagcttatgcttatgcttataagctaaaatttgaattttcaaccttaaatttggaattgattttgaggtttttcatcttagtatattttcggtttgcaaatatgccgtttcgcttattccgtcaataagcgaaacgatggagtcgtatgatgtcctgtgagagaaaaaaaagtgagaaaagatttttttttttgaaatttttaataaaggttacatacattagcagtttgatgttggtggccttcaacattgtgcttcaggtgggtggcaagcttcttgctacactaaagtgcatcgtcctgctctggggatgggatcactccttcaccgagtacattaaatacgagattggatgggagtcatgggagcatcttatcttcccctgctccagggagatgttatgtgtcatgttcatcaatttctcgtcatgggcggcattggcggctgcacttgtgtcccttgcccttaactcagctggtcagacaacctatgaactgatcgttatcgtctccttacttgtgggaagcctgtgtgcatgctgtgttgccaagctccttgccaatcgtgctaaggcaccgctggaagctaaagcttttgcgcgaaggaccaaggttctgagggatggaatatggaaacatgaggatgcgaccaatcttgtccctggggatatcatatatctcaagtgtggtgatattgtgccagccaatgcttttgtcctcaacatggcacagatcgacaccaaaaccatccgtcatgaaaggagtgttaactatgtgatgggctcccttatatactatggctgggctgtctcctgtggcgaagggactgctgttgttactgtgacaggcaataacatccccatgagcactctgaaacagctttatccaaaacgattctctcggcctgggcagcttaggaagggtgtcatggctgctgccactttttgcttctgcttagtacttgttggcatcacaagtgaggctcttgttaaattctttttccatcaaagcataggcacgctgcacagtggccactttatgccacttattggtctaataccaatgtcgattcctgctgtgctctacctggcattggcattggactctcagaggctttccaaattgggggttgccagccggggaacttttgctcttgaagacttggctagcatggatgctatgctcttcaacatgactggcactttgacatgcaacaagccctattttgacaaggacaagattgaagtgcttacagaaggtattgataaagatcatgctgtcctgttggctgcgcgggcttccaaagcacacaatgaactgtataaagaaccgattgatgcagccattctaggccttatggatgatccagaacaggtaccttcttattaggatctatgtgcttttccttcttgttctttttccagaaggcttaacaaaccaattgatgcaggcacgagttggcattaatgttatagagcaccgctcccgtatgtttgttgcaatgacattgatgtacatgactacttacatcgatgaaaatggctccaagtgttctgtgctcaaaggtgaccctgcattggtaagcaaccaatccactgtcagcaaatccaatgaaactgcccctcctttagtaccacatgcattacttgtttacatttcctcacactagcttataagacatgttgacccaaatcatagcacctcccagctcattctatgagaaagcataaacgcaagcccactgcaaggttgctgggctgagtggattttggctgagcttgtggaagcaaaggaataacatagatgtattcatctcaattatcttcttttcttggcacagatgcttcgtgactgcagttgtagcgaagaagtcagagagcatatacgcaaacgtattgataagctcggtcttgatggatatcaatgtattgctgttggacgtattgttaactctcggttggacatcattattcttctacctttcatagatgatctcagaagcgatagtgcagaagctgttgataatcttactgatatgggtctgagtgtaatagtacttacaggtgatctttgcaatgtctcctatgtttatcttgattttcatgtcattttttatctgcattttatctaagtgttctcacgtttgttttgctatttcagaaagcccaatgacaattacaaagcacgtatgtggaagacttggaaaactgggcttaaatgtgttacatgctgactctatgcgggagttggtaagcagcaaaaatgagcttttct

SEQ ID NO: 4008 - DNA, 16970 bp, Oryza sativa
ggtacactacatgagaaatggtgtattttcttagtactaccacatttttgtaaacatcacagctaacttcatgagaaatataaagcagaactggaacattagctaagattcatggggaaaagagacaagtgggttcaccctaaactcttttgcaccaggatcaagcatggttgcaatgcaagtttccatcccatggctatgaataacagccccagctcctctcatcagataagcctgcaaaataccaatgaaaattagacaatttagactaaaacaagttgaagcggacaaattaagcaaaggatagcactgataaccttcatgaacagaggagcacagtcagtacattttggaggcttgtttggccatggctttgatacaggtgaggagagcaccttcccatctgctgcagcacatacatgtcctctgccaccatcctctccttgtgcacacctgagaatgtgattaaaattcttatatcgtttcttttggttcaaatcgcaaccttagtgctcacagaagttatggtcgactggtagaaaatcacgttctgtttaatgattcaggttattagctttgtttcatccccatgatagattagtggcgctcgacaaacctctttccacatcaataggcatgtccaaaattgcaaaagcatgttttcatcaaaagaggataacattggttctttatagcaggcctagataatgaaatgctcaaggtggtccaatactggacattacaactacgcacaggtttacacaagtatttttaaagtaaaaactgtaatagtaacacttcacatgcatcatgcactgatgctcaactgcattgagacataagctaataagcataatagttcacacttgaaagctagaaatattttaagttactagtttgtaaataaaattgatcttggctccttagcaacttatctttgtcatagaaattattaacataacaagaattttttttccttagtagtgtacaattattattgcatgttttattctagtctgactttgtacagaaatcacttggttttccagctcccataattcaaactgttaattcttcttggccagtttctgacttaacagtgaaatatctgagaacgttccagactattaaccacactcggataaataaagttgaccacagtgttcaaccgctactgcagtgcttgctgagccatttcacaaaaactgcaatcagtcaaacatacgaggggtgggccatatcaatatgaaataagcacctagcctcctaaatgcttaagtctattccaactgtctggacaagcagcctacataagaataataaagcaaccgtagttccaatttttttagtaacaagcccaaatcaacacccaactaagcttatctgatacttaggccctgtttctttcagcttaagattattataatctagattattgagttagattactataagctagattgttataatctgtagtagaataagcggttagttgtttctttcctagattaatagagcctagattattgggtttgcaaatctaaagagggagtggggtggcatggtgggtaattttttacccaataatctggaaaaagctcacctaaatgagcttatcagattataataagctgggcttcagattataataagctacttcaataagttgtctgtttctttcagcttactcccaataatctggattataataatcccaagctgaaagaaacagggccttacacccccacaatcttgtacgttaatacagatcacaataactaacatgagcagcagagcacaatcttcaactgtgcatgccaacgagcaatccccatatgcaaaatcacatcagtcagttcgtccagcaggagcagagcagtgcaagatagtacaggagagaggtggtccttcctgttcctgactccactttgtattgccacagagcaacacaacgcatgagtaaaccaaattaaacaatacaaagctcgactgctctagatacgtagtagcagcacaagagtgatgagacacaggcaagtcaatgccatcgaaattgttaatttaaccgaactccacgcagcagactacgttcctacccacccacccacccaccctcgtcgatcccggaataacatcccctgccgccgtggcaattcatcgaacaggtggagggagggtgtgaggctgaggaaggcggaggaggaggaggataccggagggggacatgacgatgagctgatcggcgagggggagcgccgggtcgttggccttgacggtgatgctgccccccgttccggtgacccacccttggccgtagaagtggcggcacagctccgccaccagctcccgcgcctccctcaccgcctctccctccaggtacgcctccgactccgtcgccgccgccccctccccccttccgccgccgcagcacgccatggctctcctccgccgccgccgccgggattcgagctcgccttgatgctttttgtggtgatggtttggttttttgtagtaggaagagtgagagtagcagtagggcggctcgattagtgcctcctaattaatcgcgcgattctgattaactaatttttttatgtgggaccggcatgtcagtgacgtgtttggagggaatcgcggaaagcagagaataattgttactagtactagtcctttttctcactggtgtgtgagcgagctcgctaacacgtgtatcagcaggtagggccagtgatcgttgtgggtcccacatgtcagtgaggggatctcatgcgggtaaggcgttcatggcgtagctgtgagaggaggtcggggtcacggggcggccaggtgagtcgtgaacggcatatttcgtgatggcatagcatctgatttttttttttgtatttttctcttgtcgtattcagagacaagttttgatgtcgtgcacaagtgaatttattcgggtttatctccatgagaaaggttcaaactgggagtactgaagaggatgaatttggcagctgtggaataaattctatttaaattcccttcttttttgaaagggatttaccaacaatgctttaaaatatagttagaaataatatttactgaatttttagaatagttaataaaagataactacctatgtttcccgttttaacttttttataaatcaaacttttttagatttgattaagtttgtagaaaaatataacaatattttcaacacaaaacaaataaattatcaaaatatgttcaatgttagatataatgaaaataatttggtgctacagttgttgctatatttttctataaattttgtcaaactttctaaaaaaattgacttaaaaaaatcaaagcgacttatattttgaaaaaaggagtactttcatatgtttccaaaaataattttatgtggatatttcatttatcttttcaatgatctttaaaatggagccagataacaaaaacgacgggaaagaaaacctccaaaagtaatcccaaaacaaaattccaataaattcaaataaacttttggatctcataatcgaaaccactcgaaataagttcactagaggtccctcaatttaacagcgagattttttaaggtcctttaaccataaaaccagaaatctttacccttaaactatacaaaaccgtctaatttgggtcctaaggcagtatagatggctggttttgatgacgtggtatccttgtcagtaaaaataataaaataaatatgtgggggcccatacgtcagtgagagaaaatgatgtggccccacatctcttttttcttttctttttctctgctcttctcaacttctcggttcgcatgcgcaggcgagcaaatggcggccgacggcggcgcgctgggaagaagcaggagaggggagagaggaggcggccgacgccagagaaggggaaagaggcggccggcgcgaccgcccgtgaggccgcaacggcaggagcggcggccggcgtcgcctctccccatccggaggcgggagctgcaccggctccgggcgcgggcagcgcgcagccggagcaggcggtgtcaacggtcgagcgcggctgtggcggtgggcgagcgccggctccgggcgcggccggagcagtgcggcggcggcaagtggcgggcgagcggccgacgaggtagtcggcgacggagaagaatacttcaataagcttcactagccgccgcctccggagacggagagctcctcgtcggagttctaatccaacgtggctgctgcctcacaatttatatatatatatatatatatatatatatatatatatatatatatatataactacttgtctataaacgattgattctgttgtgtttgagaattaagatggtggatccagtgagtagcgtgaagcatatcacggagatggctctgaagatcaagcatgcggtggggacggtttagagaaacaagtaggactgcctccagatcagaaggcgagtgatgagagtgagcgatatactgtcgctgctgcaggaaacggagaacatcttgagcaacccggcaataagcgccgcgttggaggatctcgccgacacaaatttctcactgtgctcctaccttttttgcctctgtaacagcggggagaatgggcaaaagtgggagcggcagcgatggcatcggcatgcggtgggagcagcggcggtcgtggcggcgcgtggtgggagcggcggccctgggggggggaggggaacggcggccgtggcaacgtgcggtcggagcagcagtggcctcggcgacgacggggaacatgggtgacggtaggagcggggaggagtcggcccgcggcgggagcagcggtggccgtggcagcgcgtggcgggccgcgacggcgggagcggcagaggcgtcgactcgaggtgggagcggcggtgacggcatcagcgcgcggtgggagcaggggaggccgcggcggcgtgcggcaacgtaactgacatgtgggccccacctaccagtcatcaatactgccttgggacctaaattagacagttttgtatagtttaggggtaaagatttctggttttatggttaagttgagggatctccggtgaacttattccaaaccactcccaaccacaacgcgagtccattgaactgggccagactaacgtaaatgggccgggccgaggcccaaagacatttccatccagttttgggcttcccccccgaactcaccagggcccacctcgcctgccacccccacctcctctgcgcgggaaaccgttgctcgttggcgccaatttttcccgccatttcgccccccgcgccgcctccctcttaaccccacctcctcctcctcccccaaccctagcagccactcctccccaccttactcccccccgcttccactcccccgaaccttccagaaccttctcccgctcccccgccgagatggtaagctccccttcctcttccttcagcgcggcggcggcggccggatctgacgcctcgccgtgtttttttttcttttttgggtaggatgactcggagaacaacgcgccgtcgacgccggggtcgccggggttcagcacagacaggctgccgccgaacaccaccaccagccgcggcgccaccgacccgtcctcctactcggacgacgacgacgacgacgtggttggcgcggaggaggcggaggtcgaccccaacgtgctccccgaggacgacggcgtcgtcgccgccgaggaggaggaggacggggaggacctcttcaacgacaactacctcgagtaagcgagaattcccagatctgatgttcattctagttcggttgacaagtgagatctggtttgattagaagtttgtttttgtggcttagtgggagaattagaagttttagtgtttatgttaaatatttgctttagggattggcaaatttggccgttgactggctcatataagagggattgaccaattacttgactaaattgtgtactttttggtcaaagaattttaagtacaattttttactgtagtggtgctacaaatacttcaatggtgtagaagcaaacaactcttatcctactgtgttctgtcacattgaaatgtccacaaagttctttcattttgattagataatctcttgctctgtttaattacctataagtttattaattttggtttacatgtataaattagttgaaggatttattgatcacttcgcctgttgccttgatgcttattctgttaagttatgtagttggcacaataaacggatacaatacatttggctgttaatttgcctaattgatattgtttgaattaacggtcctcttgctacacagtttcttttagcagttcagtacaaagggactacctgtctttataaatccatgaaacattataaaactctcaagtcaatgcaaactcgtcagatgttgcaagttattgttaaattccacagttttgattaacatattgcatcttttccctccttttatagtgattaccggaggatggatgagcaggaccagtatgaatcggttgggttagatgactcgatagaggatgaaaggaacctggatgagatcatggcagatagaagggctgctgaagcagaacttgatgcaagggatgtgaggactggtgcagcacctgataggaaattgccacggatgctacatgatcaaggtaatggcattgtgaaaaattgcatttccatgagatattagaactgaaccccacctttctgctgttgtactttatattcttgttacttgagaatttgagatatgttaatttgatatggttagctttagtcgaatgctatgttttaatgcttcttgggtcaactatatgtaactgaggttgtatactccatttgcatttgcttcttttaagtctgattcaacccgtagtgtggttgtgaattttgagttttggacttcagtgatgattttttcttaaatattcaatatggagcatcacattactgaatatattatctgagtttgacattgtggtatggttgtgaacttgcagtagtaatcctttctatatttactaaaattagtttgcttgaaacttgtttattctttctatgagatattctttctggtcagttggtcttggtaattgtaagttgaagatagtgtttcttttatggtgcagacacagatgaggatatgagcttcaggcgtcctaaaaggcacagagctaattttagaccaccaagggaaccaagaacaccaagaagtgatgatgacggtgatggtgccacgcctagttcacctggaagatctcagcgtggaatgtattctggaggggatgtacctatgactgaccagactgatgatgatccatatgaggtattgatgtttgaactaaaattaccttaagttcctttagattttccaattggtcgccgtcctatttgctgagcatattttatatgcaggatgaatttgatgaagaagatgagatgaacatgtaccgtgtacaaggaactcttagagagtgggtcacaagagatgaagtccgccgctttatcgcaaagaagttcaaagaattccttctaacatatgtaaacccaaagaatgaacaaggagagtttgagtatgttcgactaatcaatgagatggttctaggtatgattctcttttcctttttgcatgaaaaaaggccacatttgttggcattgtaagaaatgcttgcttacctaatgtttcctctcctctttgcagctaacaaatgcagcttagagatagattacaagcaatttatttatatacatccaaacattgctatatggttggctgatgcacctcaatcggtgctagaagttatggaggaagttgccaaaaatgttgtttttgatctccataagaactataggaacattcatcaaaaaatctatgtccgaataaccaatcttcctgtctacgaccaaatacgcaatatcaggtcagtacatgctttctttagtatggtatttagaagtcaaattgattgattgtctgtgcttatatgctacttgccaaatttcaggcaaatccatctgaacacaatgattcgaattggtggtgttgttactcggagatcaggtgtttttcctcagctacaacaggtcaagtttgactgcagcaaatgtgggactgtcctgggccccttcttccagaactcttacactgaagtcaaggttggatcctgccctgagtgccaatccaaagggccattcaccatcaatgttgagcaagtaagttgcctgggacgatggtagttctgatacatttgggctttcttctctgtcttaatgcatgaacatgtttttggttctaatattcaaactgttctcttttaataacagttgatttatttgtctcacagaccatatataggaactaccagaaactcactcttcaggaaagcccaggaattgttcctgctggcaggcttccaagatacaaggaagtgatacttctgaatgatttgattgactgtgctcgaccaggagaggaaattgtaagtcttctgcatgtaccttttttatttctacatcttattgtagaaagcatgttctaattgactatctgcccatgttcaggaggtcactgggatatacaccaacaattttgacttgtctttgaatacaaagaatggtttcccagtttttgccacagtagtggaggcaaactatgtggcaaaaaaacaggatctgttctctgcttacaaattaactgatgaggacaaggcggagattgagaagttggcaaaagatccacggatcggtgaaagggtttgtgcttaatccttaagccccttgactcaattataataagctaatcagtattgtctgacaaatgacttattgtttacagattgtcaaatcaattgcaccatccatatatggtcatgaagatatcaagactgccattgcactagctatgtttggggggcaagagaagaatgtcaagggaaagcatcgcttgagaggagatatcaatgtactcctcttaggtgatccaggcactgcaaaatcccaatttctcaagtaaggaataggcaatcagtttcatcatctctctttttattgctccattaactcaatatttcattatctaaaaaattaactcactgttttgtaggtatgttgagaaaactggacacagagcagtgtacacaactggaaaaggagcttctgctgttggactcaccgcagcagttcacaaggatccagtaacacgggaatggacacttgagggtggtgcactagtgcttgctgatagaggcatatgccttattgatgaatttgataagatgaacgatcaagataggtatgtgtaataccatttggataatgtgtgcttttaagcatttatgttctattgccctaagatatctttctcttattgtttcagggtgagtattcatgaggccatggagcaacaaagtatcagtatatcaaaggccggaattgtcacatcccttcaagctcggtgcagtgttattgctgcagcaaacccaataggaggaaggtgatgtgatctacttgctcaggatgttttcaaacaattgttttgagcaatatacttaattttatcatgttattgcagatatgattcatcgaagacattcacccagaatgttgaactgacggatccaattatttcacgttttgatgtcctttgtgttgtgaaggtttggagctgattttgctgtgtaatatatttttgcagtcctggtatctatctgtactgattttttctggtgcaaatgcaggacattgttgacccatttacagatgaaatgcttgcaaggtttgttgtagatagtcatgcaagatctcaacccaagggtgctaaccttgaagatagggttccaactgatgttgaggatgatccattggctgctgccagacaagctgacccagatgtacgaaccctttgtacttcgcacaacagaaacatttttttactaaatttcattgtttttaacaaaatcctatattttttagatcctttctcaagacatgctgaagaagtacataacttatgccaagttgaacgtgtttcccaaaattcatgatgctgacctggacaagattagccatgtttacgcagaacttcgtcgtgagtcatctgtaagatatccttgtttcttgtccatatcaaatgcatcttatcaaatacttaaatatcttgccgaattggatattgatacctatgaaaactggaaaccaacatgatatccaacctattttcttgtttcagcatggtcaaggagtccctattgccgtaaggcatatcgaatccattattcggatgtcagaggcacatgcaaggatgcatttgaggagctacgtgtctcaggaagatgtcgacatggctatccgcgtcctgcttgactcatttatttcaactcagaagtttggtgtacagaaagcacttcaaaaggtaaattttgattttgctgttgtattgctattctatcatcttccaactgatgcatacctagcatgagtttgaactgttgtaagctgccttagttttttagcaaatgttacttgcattatgcggtctattacttgctgaactcattccgagctcaaacctatgccccttcctttctttgttttcaccaatgtaactgtagttcctcaccatttctgcaaattttaaagtatgtttcttctgcctctacagaatttcaggaaatacatgacctataagaaggattacaatgagctgctcttgcttcttctgcgcaccctggtcaaggatgtgctgcacttcgaagaaatcgtttcaggaccaacgacgcgcctgactcacatcgaggttaaagtagaggacctgaagaacaaggtatgagccaagatctccgcctcacccacacgcctttctaaccaagcttattgcgcaaaaatgcttcgtcatccagatttcgctcttgattccggtacatctgtctgatgcaggcccaggagtacgaaatctatgacctgagaccgttcttctccagcgcccacttcagggacaacaacttcgtcctcgacgaagggcgggggatcatcaggcaccctcttgctgcctaactacagaagatcatctgtgacccatctgacaatgaacaatttgagctacctcatgggattatcagacatagtgtaatcatcaaatggcaactcctttgtgctttttagagactgttgcatgttatccagctgcatttggatagggtgtaccgtgtgtactttcttaacattgtaattctgcaagtatggtagaaaatgataaatctgtgtcaatcaatgtatcattgttttgcattattgttttcatttttttcctcatccgatgaagctataattttgcacatgatataactttgctgggatggacatgacatggtaggcatcttcatcactgcgattaacatggtaaaaataagtcagctacagcagctacggtaacactagctccctaattaacataactccaccaaaacgaatcccttgatattaacatggtaaaaataagtcagctacagcagctacggtaacactagctccctaattaacatatgtatatgtaaaactatatgtatacataaaagtatatttatttaataatgaatcaaatgataggaaaataattaataattacttaaattttttgaataagacgaacgtcagacatatttaaaaagtcaacggcgtcaaatatttaaaagataatatattctataccactgactttattcgagttcaacaatttgctatcgacattgtctctttttataatatactggcgacctggtatatttagtttttataaaaaaaatatttctatgtggtatatgcaaaagaatttgcttatacaaaagataatagcacagaaatatctgtagtgtatgaaagatgatttatattaaaaacaacaataaagaagtattttatatatcatatcacatacaagttacattttttttaaaaaaaataaaaatgtaaaaaacctgaaacttttatataaatttccatgttatataagaaggccacataaatgagataaatcaataattaacattgtatgtccataagggtattttgggtatttttgaaaagaagtcccaacccaattacgtattgtagaacaattgattgataaagttgccggtatattatagaaaatgacaatgttgatggcaaaccattgaactcaaataaacttacagaatagattctcttagtatttagggatggagggagtagaagttttgtaaaggatcactaaaatatttatccaatcaaaggatcctacggcctagaccatctggatccgaaatcggacggcctatgtttattggatgacgtggcccaataagaggtattacttacttccttcactactttcaattcgtacaaaatccctcaaaaaaaaaaggaaagaaaaccccccttttcacactaacctctactctcccccgtctcagttcccgatctgcagcggcggaggagagagagacaccgccgccgccgccgccgccctccggcgaactcggccgggaggcgcacggcgtgggacggacaccagcaccaccctccctctcttcctctccttcctcaccccccaacccccgacccccgacccccgacccccgtctcggttcatccgcgcggcctccattccatctcggcggctcgaatccaaccgaaggtacgccgctcgtctcccccccctagccctccctctcaatcctccggcggcgccgccgcttcgtgaggccgtgcgcggcgtggattgccttttgagttgggttggttagataaacccttccggatttttttttttttggtttcgtgcgcgtggttgcggtgctaatatcagttcgtttatttcattgaggtttgggggttcagatgaactcacatgtaccgattaatggtgaagcttgttgtggagtggcagtggcggggatttatcattgtgggaaaatgtaggataatttcttagctttcccttgtccgtaatcactttatactactggagtagaacgtagaaatccgtgcacttcggatttcagagcgtttgccttgcttcagcgaacaattttacttgttcatacgtgttcgattgctcaagggatgataacgacccattgcaggtgttatcgttagttcagatgttagattgttagggggataaaaggtgttaggtgcaaggtcatgcatatctaagttatgttttcgtgcatttgaagtatatatatatttatgcaaggtcatgcatctctacattaagaatgcagtggtaatcttatagatatttatttatgataatggcttttgtatgaaattagactccttcactgtatctttgattccagtagagtatgtgttcacttatgctggaatgacaggataatatccactgagaggctcaactgcatgtatttcaccagtagagtaaactagcaatagttttttttttttttttagaaaaaggcagccgcccagcttttgataaaaagcataaagagttcgtacaggcaatagtttagttctggcatttgggtaacaccacatcttgctcttcgctttatctctcttcataactttaaccagtccaatgttttgtgctccttaagtagtgtcatcaactatggtaatttttgttattcttagctcaggatccagatgttagttgcagaggtgttcagagcaggagcatacatctctagattttcgcgacatgcatgccaagtatatactgctaccgaaactctttatagggacagaaatttacttgtcaatgcttttccctgcattaaagtacagttacttgccttgagagaggggtactatgtataatttctggaacaaaattgtaggagaaaatcgcttcatagttctgtttttatgattttccttgacatgggatcctctctacttatttatttatttttatttctgtttagttctttattataaaacttaacgcctgttcatttataagttatagcactcactgcgattataagcctgcttaccctttttttataattaatttattttctaatatctgagcgaattttcatctaatatgttgctttctggaattcaggttgcaagattttcgggcattagctgtgcacccatttctcaattcagaagacctcaatctctggagggcagcagaaaactaaggtcttgctgctttattcaaacccgactgatagccatggctacaaccctctccaatggtgtttcacagaatggccctcagaggaactatcaggtagttgttgctgctactcgcgacatgggcattggaaaggatggggtcttgccatggaagctccttggcgaccttaaatttttcaaggagcttacagtgactacagctgatcctgtgaagaaaaatgctgttataatggggaggaaaacatgggagagtttaccccttaaggctaggccattgcctggccgtttgaacatcatattgactaggtctggtagttttgagtttgcaacagtcgaaaatgttgttatctgtggaagcatgaactctgcattggaactactatcatcaactccatactgtttatccattgagaaagtttttgttatagggggtggacaagtactaaggtgagctgttaacttttgccaaagcatctagtatgtaaattgtgttgtttctgtatactccacctcaactctattcacctttatctgtaaaatttcactgtagggaatctcttaatggaccttcatgtgaggcagtccatttaactgacattcagtcaagcattgagtgtgacacctttattcctccgattgacttatcggtgttccaaccatggtattcatctttgcctgtggtagagagcaacattaggcattcgtttgtgacctatgttcgggttagaaaaacaatggcagaaacacatgactcaaatggcaaggaatcagctaatgatggtatcaagagtgacaaatttgaaaccgagaatttctcttttctccctaagttgatatttgaccgccatgaggagtatcactatctcaatcttgttgaagatattataaggagtggtgctcagaaaaatgacagaacaggaacagggacattatcgaaatttggttgtcaggtattttctctttaatgttgtgaataattaatttgaataaccagaaataacctgtctttaacttgaataaacagaaaatataacatgtctttcttttgctcatcagatgcggttcaacttaaggaatagcttcccattgttgacaacaaaggtatgcatgttttgcactaaagcacatcagtttgcatctaattgatttattttgataatgatgaacaaacaattctgtggaaatgagaaatgggttttccttaaataaaaagatggatttaacagaaaagaagcatgcggggggaaatgtggttatgaaacttatgtttctctggtttggatatcttcatagtgcttcagaccaattagttttcaatacatgtcaaattggctgctattgtgtcttattggtttactttcaatcttttttcatcacacatgcccttttctttgcctattatttgtaactaaatagctaattgttgcatggtctgaatagtacagtctttgtaactggctatcatctttactaaggcaaaaataagatgctcagtgtgatgttggtgctgagttcatacttgtaacttgggacattcttctgtacacagtagaaaaaaattgggacattcttctgtacatgggagaaaaaaaatattcattttctactgagtttccacacctccggatcatactattaattgtatcattgtgtcctgggttactgccttcttttttttccctaccagtctattttactgatgttcgtatatgatttggagatttagtgccacattttgtagaagcatagtacaattttgtaacgcaacttcttgaaaaatgtatatgtagaaactagcccctcttaagctgtataatgtgagtgttgggtttccttttctttattattgaaatataataacatgatgctctttaacagaaggtattttggaggggtgttgttgaagaactcctgtggttcatcagtggctcgacaagtgcaaaggtgcttctgcttaaaatttaatatttcattggaaatgttatatccatacgcaatctatatactgtctcgatgctttaaattacttatccagacgagccatgaatgcttatcagcctaaaactggatcctcgtgttctttttcatcatatgtccatgcacaaataaagcccatgatgttatcttgtctatagcaactccaacatgtaattttgcagctctaacaatcttagagtaattttacaccaggaaaatctcatatgaccgattgttcaaattcagtgcgatatttatttacctgtgcagtctggtctatttattcagaagggcctcaattacaagcttggcaaaagcctgatggaagtttatgttgtccctagatatatgaatattttctgtggggtggaaaacttttcttttcaattttttgagcgttgaccatacttaaatcacagttttcttttctttttctgttatgtaactactttctgcatcagttatgttgggtgtatccattaactattgcagcagatgaggcataagtgaatattgttagattttagtttcttcacatgagctcccatgcttaccactttggtacaatgatacatttttctaccttcaggttttacaagagaaaggcattcatatttgggatggcaatgcttcgagagagtatcttgacaggtatttatcttggatccacactagtcgagaaacaatggatattgctgttcttggttctcgtgctctgatccatttggcaaaattttactgtgttctagtgttggcttagcacatagggaagaaggtgatctaggtccagtttatggatttcaatgcgacactttggtgctgagtaagtttttctctcacccc

SEQ ID NO: 4009 - DNA, 1722 bp, Oryza sativa
ccacgtaagccagtcaacccagtcagaggcgctttggacctaaatgattcacttaaacaagatcgcggacccgaatgacgattttcctagatcatggacctaagtgacacctcgctccaacatttaagggaccggccgtgtactttactcttctttttttatgcagttacacataaatcttcatgaaccatgctgtttcctgtactgtaaaataattggctgtgccttgtgattatctagaatgtattatgggaacatttatttgatgcaagaaattaatgcccttcagttcatacagtacttttcagttaatcagtagttagaaatatctccattatggaacagtaccatcattaatttgaagatgctgaacatccttttccattctgacatgactcctgaggcatatcaatcgtttgtctaaattcaggtctttctcctggagagtttgtccatgttattggtgatgcccatgtctatagaacacatgtgcgagctctggaggagcaaatccagaagctacctaaaccatttccagtaagcaactcaataatttaaatttatttcattcaaaagcatggaacattcagatatgaaacagcactcctgagttttgtgatgattcaccttacttatcaatggtgatgtctataaatccgtttaattatatgaatactatgtgcaggttttgaagattaaccctttgaagaaggatatagattctttcgtggcatcagacttcaagctggtcggttatgatcctcaccagaagattgaaatgaaaatggcaatataatttggtattcctctagcatttatactcgtactgacgcttttcatgtttcaatatttgcttgctgtctgatagaagattatggtaccagtacttatgatgcacgctgtactgttgatagagctcgcccatcagttttcaacattgttctggtgtccatgatacaacctttctgttgcaatactgctctcttttatgtccatgctaactagataaacatatgattactgagctgcaacggatgacaagtggggtttttgtgcataatattgctttccctctgactcgtgtccataattttgcaggtggctaagctgggacccccagtcactatgtgagcttggagaaacttaagcaggaaaaccttatgcgaacatcgcactagcttacttttttttttttagtggtggtgctggatgttcatttggacctatgttctccatttatccgcgattgtacttttatctcggtcgccgatctaaaccctacgaaaacaccggtcactggctcccccttttatttggacccagtgaatgatgttagagcttgtttcgagttgacaccatgttggaagaggccaaccgggcgttatgtgtagctcggcgatggatgtcatgtaccctgactgcgacacacattttggtcattttggtgaagcttcggagtgcctctggtgttgctggacgacacctactaattgtctccatctgagatttttctttccacatgtttggaacaccagatgatgggtgatgatgctgacctgtggatttggagttgttcagcatatgttggcactttttctgatgtttgtgaaatgagttgtgttgcgtgcttggaaattgcgcttggtggcggcgcttgcaggcaaggactgaaaatgagatcttttgacattgacgttaccttgttatttttcttaaaaaaaa

SEQ ID NO: 4010 - DNA, 2901 bp, Oryza sativa
cagccaacggtgttctatagagaacagacctgcggtctgcgactttggcgcagccaacggcaacagtgccgcagcggcagataaaacaaccagtgtggctttccgaacacatcccatatctttaatcagatgcatggaaaatcatatacacagtagatattttgaattatatcgtgtaataaaaataaaatgtactttctccgtttcacaatataagtcattttagcatttctcatatttatattgatgttaatgaatctaaatagatatatatatatatatatatatatatatatatatatatatatatatatatatatgtctagatacatttacatcaatatgaatatgaaaaatgctaaaatgacttacattgtgaaacggatggagtagcaacaaacagtaatggtcgaaatcacattctgaacactcatggctggacgacggactaccatgttttcatttgagaacttattgggttgattcccaacggaaagaaagaaattgaggacgattaattccatatctttattatctcaaaatgttctttactctgacctcaactcctattacccttttttttttgtctgtacgcttcacaaattactaaacgacatgcttttttttaagaaaagaattgctacaaaaatattgctttaaaacatcatattaacatgtattctttaaacttcttttaaattaatatttaattaatcatgtgttgacgagctatcccattttttttcgagggaaagaagtccccaaccatcatgtccaaacaaacataacctcaatcttcatgctaaaggtaaaaggtattaggccatgttttccatgcaaaaacttttcatcgtgtcacatcgaatgttttggacatagattgcatgtaaattgcgagacgaatcttttaggcctaattgctctataatttgacaatgtgatgctacagcaaacatttgctaatgacaaattaattaggcttaataaatttatctcgcagcttacagacgaaatctataatttattttattattagtctacgtttaatactttaaatatatatatccgtatattcgatgtgacccctaaaactaaacatggccttattattacctgaacaaggcctgaatgtggtcggtaggactgtccaaggatccagaattccagatatatactactacctccatcccaaaaaaaagtgcagctatagatatccgcgtttagcgttttgaccgttcgtattatttgaaaaatttataaaaaaattaaaaaaatagtcacacataaaatattattcatgttttattatgtaataacaataaaaatactaatcatattttttttaaaataagacgaacgatcaaacattggatataaacagtgtcaaaattgtacttattttgaaacgttgggagaaccactagtaggagggaggaggtgtcaactcctattttgcaaccgccccttgttggctggagaggcagaacataaatacatgcttgctgattgctctgacctcttgttggagccggagggcaaattacttgagactagagagtagagactgatccactcgattggatccaacggccgccggctcttggacaaaccgagcggccaggacagcagggagccagggagagcctctcctcttaacaaattataatattaaagtttttgaggggctggagtgctaaataacccctcaccctttggccgcctcgacgagtccgccccgtcccgtcacggagcggccagccagcagccagcgggcaaaaccgacgaggcaagacgttttttgcggagacccccctggagttctctggtttctctacttttaggctgcgttcgagcgcaggagaaagagagaaagattgtttcgttttccacgcgcacgcttcccgaagtattaaactatgttctttttgcaaaaaaattttataggaaaattgctttaaaaaatcatattaatccatttttaaagtttaaaataattaatactcaattaatcatgtgctaatagctcacttcgttttacgtatcttatcaatatcctcaatcccctccttctctaacacactcttagcctctcgacctaggttctctctctgaaaaatcaatgtaaccgtagctctaaaagtcccaagagcaactttgtgttattattgtttgcgagacctttttattgcagtgtgtaagaacttgttttgaaaatgcacgaggaacttcacctgggatactttagtctcatttgattcatcggaatttcaacgggatatttcttcgtcgctattagtatatgttagaggatggttgttagttgttggattcaagatgagcactcagcaccatatgtttcacaacggaatgcacgcctttatcattctatttcccaaccaaatggctcgagtatcaagtcctcgtcttcgtaaaaaaacaaccgcacattttactcattttaccactatcgtcatagctaaatctctagtttaaatccaaacataattgtttcgatgaataccacgaatcgctcctcccgattaatgtcttcatcggttgctcatataccctaataattagataagacttttatatatttatttttagggatttaaaagttaatattgaaaaagaaaccacattaaaatatcttaaaatcaacattaaaattaagtttcaaaatttaaattttagcttttgctttagattattacgccaaccgatggaaccataaagtttgcacaaaggttttcttcaaaaataattttgcacaaaggtccattttcaaaattacctaaaactcaagggaccccatccaaaaccccaaaccatatttctatatcccctcaacctctctctctcctctatctcttcaccattctcaaccccccccccccccca

SEQ ID NO: 4011 - DNA, 3958 bp, Oryza sativa
cgcaccgccgccaaggtcgacgccaccgtgtcccgcgccgaggccgagggcgcgctcccggtgctcggccaccgcgacccgcggggcttcgtcctctccctctccaggccccgcaccgtcgtgctgctcgtccaggccgggcgcgccgtcgacgccaccatcgacgcgctcgtcccctacctcgacgccggggacgccatcgtcgacggcgggaacgagtggtaccagaacacggagcggcggatcgaggaggccgccgcgagggggatactctacctcgggatgggggtctccggcggcgaggagggcgcgcggaacgggccctcgctgatgccggggggccacatcgacgcctacaacaacatcagggacatcctcgagaaggccgccgcgcagacggaggatggggcgtgcgtcaccttcgtcggccccggcggcgcgggcaacttcgttaagatggtgcacaacgggatcgagtacggcgacatgcagctcatcgccgaggcctacgacgtgctccgccgcgtcggcggcctgtccaactcggagatcgctgacgtcttcgcggagtggaaccggggggaattggagagtttcttggttgagattactgccgatatattcacggtggccgacccgcttgatggcagcggcggcggtgggctggtggacaagattcttgacaagacggggatgaagggaaccgggaagtggacggtgcagcaggcagcagagcttgcgattgctgcgcccacgattgcagcatcactggatgggaggtacttgtctgggttgaaggacgagcgtgtggcggccgcaggggttctagaggcggaggggatgccatcagggctactcgagacgattaatgttgataagaagatgctagttgacagggtgaggcaagctctgtatgcgtcaaagatttgcagctacgcgcaggggatgaaccttctgcgagcaaagagtgtggagaaggggtggaatcttaacctcgcagagcttgcaaggatttggaagggcgggtgcattatccgggcgaagtttcttgataggatcaagaaggcgtatgacaggaaccctgagctggccaatctgatcgtggacagggagtttgcaagggagatggttcagcggcagaatgcatggcggtgggttgtggctcgtgctgtggaggctgggattagcactccagggatgtctgctagcctttcatactttgacacctacaggtgtagtcggctgcctgcaaatctgatccaagcacagagagacttgtttggggcacacacctatgagcgcattgaccgtccaggttcgttccacacagagtggactaagctggcgagaaagagtaatggtgcggccatttgaggacttgaatggtatcagtaactctgtgtggtgtctctttgtgggttctctttgaattcactactgttgtctttatgattctaggtctgaattctgtactttgaataatgaagtgtcatgtgcggtatgcatggaaggaacattcatgtagcttgtgcttttatatggtctaggtgcacccattcagttttctcataaatttggaatgcaatggttttaccctcttatcaaatccctgtaattttgatctggcatgtgtcattatagctagtaagacacgtgatgtttggccacctttatgaatctgtggtagaatgttgaaggtatacctcaaaaattgcatgataagtcaaacagcgtctctccagaaagtagcagtggaagacctgaataccggattgcttgggcatgatggaatctctctctaaatcaatgttctgcgcttatttattttctcactttctgtacaaaaatatgagtgacgtgaagccaaagggtgatacatttatatgctttcctgcactgttcctggtattgaacacatatctttgattattagtagtgctgacttatatatgtatataagcatttatgtcatctgtaggagatctaattgttaatttgtgacgttaagttcttggtctcagtggtaagttattttttttacattgagcctgatatttttcctctttattggttggttggtaaccctgccgtgatctgttttgtactccctgtaaagtagaagcactcctcatgaatgaaatgacatactcatttatactagagctgtcaatgggttgtgtggaatagggttcatcatgtcatgctgtcaggttttagtgctttccttaatgaacctggataatattgcctagtttttccatcagggtggtttggtcaaattggttcatgcaatcttgagctactaagttctcatgtcagttttctctatcgtatggttgaaattgtactcttaacaaattcatttgcatggtcacctccagcagcattatggtgaacctatttagagctattgttgccatttgtattgtataactggttaacacagaaaatggtgtggagacaacatggtgtttatggcattccctgatgcaaaactaacagtaagctcatttcagttttccaggagcggagttaatgaatgttaggctaaattcttgcatcaatcagcaagtgattgaaacattccctaatgccatagttctgcaaactaagtgatacaaaatcaacaaaatgcgtcgaacaaagtcctttgcacatttttcatattagaactttagaagttccaattcgaggttaggttgaccttttctgctcattgagaaccgtggttagcactagcatagctgtcacgcaaagcttgcttcaatcattgcttacagtttctggctagtcaatttgttgtcatttttttattgccattaagattttgactgtattttttttctttaatctcgtattgttgctccaactccatttgatgcacaggttgacatgatattgtaatattatcatttatcttctggttaacatcgtgcatttcatataagactgaacttgagtatattaggatatagaagttgagtgcgatgttaattaagtacagatgaaattgaaaccttgggttagatttgggcctcaaattggtcctcgtgtcacatgatgaaattggccagcccactgttgtgcaacatatataaggatgtgccagataaagaacctagttgggctaatgggcctatagcactccacatttgcatgattcttacatggaaatatgaagcttgcatgattctcagtttattgttttccttttttttttcctttctagatgacgaaacaatcaataagaaaattttcttttgcagtttattttggtctcaactcttattttgattctagtgctgcaacatggtcaacattcttgaatgctaataataggattatatggtaccacagaggcaaagataagttctcaaatctctgctgcacttttattttgttatcatgtggtttccacatggtttgtgtactgatgatgacagattatctaatcgctcttttctctccaggaggagctacacaatattgtcaattgtatgactccaattgaattggaatacagtaatacacaacagagattgtttattctgatttcagtggctttaatggtatggagctaactactgcagtccaattatggaggtgctgcaacttttttttttttcactttgtatgatatgatcaaaagaaaggctaattgtcgtgatttggtttgcctctgaaagatatgattttggggatgtaacagctaacgcatccattcatttactttagcctgtggagatgttgacaaaaacacatggagtctggtttacttgtatttcccataagcaggtgataactgataacccacttatgctttttctcaagatttatcttttcaaaaaataaataaataaatgaaagcatttgccatttgttaaactgttcgaaaaattgatttattttttatgattgtggaaggcatgatggcttatctaataggtaggatcgtcag

SEQ ID NO: 4012 - DNA, 20018 bp, Oryza sativa
ttagtcccagttggtactaaagataccctctttttagtttcggttggtgttaccaaccaggactaaagatggatctttagtcacggttatttcaatcgggactaaagatgggcatctttagtcctggattcctagctctggttggaaacccgggactaaagagtgttaccaaccaggagtagaaacggtttctccagcagtgtttcccatccatcccactcgttcactctccccactcctcacactcaatcatctccccactcttaacactccctctccaacttcaccactcatctcctgtctccttatactccctctcttcccaactacgagcgagggcggttattgagggtgagagcaacaggcttcaacggcgggctcaagttagagtagaggctgcgggctcgagcaagagggatctcgccggcggcggcaatgggagagtcggatccagcgccccctccccttccctcgcggatcccggcgcctctccaccccgccttgcgtgaggatctgtcggcggcttcgagcgacaaggacgacaacgacggcagtggcgctggtggcttctggattctagggttagggtttcggggataggtttttgttttccgatttttttttgcattttttccttttcgttatcggatggcttaagtgtccacatgcggaaattgaattttcatatgggttgctctacccgcatgcaaaaatatggttttcgcagccactgggcgccggcggttgccacctccgcctgcgaaaatatgatctaaccatatggaaaaaaaaccctttttctctaatatagtgcatacaaattagctggccatttgtcaatctatcgtaccattgaaatggtcagacaaattgtaaccctatacacctcttctatatgtgcgtgactcggccaccgcacctcctcatgtccaaaaacaaaacttaaccaaatcagaggatgcaccacttacagccggacaaccagcatcgaccgtacagtgaggtgatgaatctggtcagttaaccaaggaacaaaccggatcttgaacttaacacacaaatttctcgtcaaaatcaagcgctgtgttcgatcgatcggcgtgtagcatgcatgcatttgcgtttgcaaattgcaattgagcgcgtggaattagcggaaaccgggtgctacgtatacgtaattgcgtgcgtacgtccatgcatcagctgcatgcaatatgcagagtcggtgcgcacatgcgcaatatgcaaagagctaattggctctaaattacaaattaattaattagctccagatctagctactatcagatcactctcggatatactccctccgtattttaatgtataacgccgttgacttttcaaccaacgtttgactattcgttttattcaaaatttttatgtaaataccaaaatatttatgtcatgcttaaaaaatatttgatgacgaatcaagccacaataaaataaatgataattacataaattttttgaataagacgaatggtcaaacgttgaaaaaaagtcaacggcgtcatatatttaaatatagaggtagtaattaatttgatcgaccgtaccgtaggtacgtactttgaattcgtcatgcaaatggagctgatcaacagaccaagggatcattgcattccccaagctagctgccggctgatcgatctggccgaacactgacctaaaaagagaagagagggcaggcccgtagatggacagggccctcatatatattttagttttcaattccaacggaatgtgtgttttggtatgtttgatgacattcttatcattttgtttacttccgctactactactccttcactaaatctcgctaaacaaacatgtttttcttcatctatgctttctatataagtgagaccacaaacagacaccacgtttagccacgtcatcaaaaatagtttcaaccgttagattgataattctttcgagtattagccgttagataaaagtcccctctacttcctcaccaattaaacaacgccattaatcaccaccccatctaaatgctatctaattaatcaggtagtcaattggacaataatacaatcaagatatcatatcatatttactattccaaccatcattcaatcaattggatccatgccactacaaatatgccaaattaaaaaaatatcactattattcacgtgccactgcaattttaggaaattggatccatgccactccgtcgcattttccatttgacgccgtctctctgcgtcctccgcccatggtgtgccactgatgtggctgaggtgctctggcgtggccaccgatggcggcagcagcggtgcagccgaccgtgcgaagctccacaggtcgtcgtcgccgccgatggcaccgccgagcagcctcgtggcagtggcggagtagtaagcgaggccgtcggctgctgaggcatcggtggcggcggcggcggcgtcgaagcagacctggtcgtcaagagcgtcggggtagccgttgaggtgtgcgacgcgacgaggcggtccatcatggcccagtccgtgtggtggtggtagtggagcagcaggtggtcggcggcggtggtcgacgaggccgcatcgcagccgtgcttggagtagacgagagcgttgtggccgccgacgggctctcgagtggcggcagtttcatcaagccgtggccgtcgagcacgatgtcgattggccggagataccttgacgccggcctgctgctgccgccgccgctggcctgcggcgaggtgagctcgtgctcctgcttgcacgacctgcccatgtactgcaggatctcgtcggtgtatggtctccctgaggcggcgcgtctcctcgtcctctgcccaaggcacgccgccgccgccgcagcatgagctccagcccggcgtgcacgagccctcgaggacagccagtgggcggctgtggatggcattgatggagtggttaggagcctcggccgatccagcggggtaagccgccggagatggggaggagttaggattactgcaacacaaacttgcaagtccatcaccaactagaggagatggggagaaaaatgtgtgtggggcccacggttggccaagtttggctagtggagggaagattttgacaagctagatggcttagagcatctccaacagcctctccatcccaccctccaagccaaattttagcaactttggataaaaaatgcactccaacagaatgactatcccctagccaaaaaatagcaatggccaaagatgggctcaagctagtcaaatttggcaagccgttagccatcctcagcaactagccatatgtgggcccgactatctttttcccttctctttccccaccatccgcacatcccctgctcgtgctctccctccctcagcctattgctgctgcgcccctccttcctcacccgtgcctgccgccgccacggaaggagtgcctctgcttcgtcggcggcgggatgggagaccagcagtgaagagtgtgaccgccgcgcgcctcctcccaatccctctactccatgggcgccgacgagttcgccgagatgctggtgctcgacggctgcttcctgctcgagttcttcctgagaagagtgaggggcagctcgccatgcccggcgttgtcgccggccatctggaagcagccgcccgtcccgtccccgcgctccagcgacggcgctggcgaggaaggctacagtgacattcaaacaacaaaagtactaattactaaacatactgggagcagagcatattttattcaatcaagtggagaatttataataaaaacaaagattgttttcctcgttgtgctatactcctaatcttgtggagattatgggtaccccatacctacacagcatgtacatccgattgagtatgtggtgccatgtatagatagaatatcttaaaagggactcgggttaaattccaaacttgtatgtcaaggaaatacccgggatcctagtcggttacgattacatcatatctgtaactacctattccgttagagatatgggctgtactttgtaatacggactccttcccctatataaggaggggtccgggtgcctcttggggcacgattttctcccagatcatacgatcaataacatactcggcggatcaatccccggacaggagtagggtattacttcttgttaacaaggcctgaacctgtataaaattccttgtctctcaacccatccacttttctagcttgatagccacccccttttagtattgccgaaatcttgtttcaacagttggcgcgccaagtaggggtagcgtcaagttcttcattgattagtgcgatgggtttcgtctccggcatcgacaactttgtcttccctcccgggcaggcgttccggttcggcagcctcgacttcatcaccaacaacttcggcaagatttctctcctcgactcggattcgaaccagtcgggaagaggccaggtttccgccccgttcggtatcccgaactcggccgagatctactccgcgatcatctcaaccgagttagctccaaaccactcggacgagatccaatctactccaacacgacccgatcaagacaatagagcttatcccttaatcctaatgaaactccccgatgacttggctgccgtcttcaccacaagggcgtcctctccccgaggcctaggcgggatctggcctcggccccgatccagtctagctccagggaagtcggcgtcatactccagcctctcggcacggtttcgacggaacaattggacggctacctcagctcccccggtgtcgactcccgaccgacaaagatcgtagagtacgacgacttcggctaccgctacgactaccgcaacctcgacgacttcgacgaaggctacaaagataactacatgcctctctacttcggcattttcatggccgacaacgagacggaagaacaacgccaagcctgagaagcagaagaatagcgcgtgcgacaagaagctgaacgtcgccgactggaggaggagcgtcaaacacaagagcgagaacgactgtagcgtgagcaacaggagcgcgaacgggctgcaaaggaggccgaggaccggcgacagcgcgccttggaggccgggcgacgagcacgagaactcatcggccaacaagacgtcgaggggacggcggtttttcgcaccccccagcagaacgcggttgcagcgatcacccttctcgacacccttctcaaggaagacgcactcaatcaggccaatcacgtcgtcaacatcttgaaccagactaagaccatgatcgccgcttcggtcccggtcaaccccgcaagcgtccatacgccgactggcagccgagttccgcctcttcgatctcaagactatcaccaaccaagcgtcagtgtcgtcggcgcaggatccaatcacaggagcagggatcacggtgaacgatctgtccactcgcctcctgaccgacgcagggagcatcgagccgaacatccccactccccacatcgcaggcgtcccgtcgatcttcgcgaaactatcaaccagcgtcgcgcggcaagaggctacatcccccaccattcaccagatcgttacgacgacgatgtggatggagttgctgccttcacaagcgacctgcgtcgagtggattggccggccggcttcaagccgactagaatcgagaagtatgacggcacgacaaaccctgagtcttggcttaccgtctacagtgttgcaatccgcgcagcaggaggagacagcaaagccatggcaaactatctgcctgtggccttagcggattctacccggtcctggcttcacagattaccccgtggcacaatcggatcttgggcagagctttgcgaccacttcatcgccaacttccagggcacctttgaatgtcctggcacccaatttgatctctacaacgttgtctagtagtccggagaatcccttcgagattacatccgacgtttttccgagcaacgcaacaagatctccgacatcaccgacgacgtcatcatcgccgccttcaccaagggcattcgccatgatctcttagtcggcaaatttggccgtaagcctcccaggacggtcaagcagatgtttgaaaaagccaatgagtacgcaaaagccgaagatgctatcactgcaaaagccaaaaaagccgaagatgctgttcatattttaagccgtcactgataatggcactcaattcactagcggagtatttaaagatttctgtaaagacttcggcatcaaaatttgttatgtctccgtagcgcatcctatgagcaatagacaagtcgaacgcgccaatgatatggtacttcaatgaataaaagcacgagttttcgaccgactgcatccctatgctggcaaatgggtagatcagctgccatctgtactttggtccctgcgcacaacacccagtcgggctacgggccagtcaccgttttttctggtctatggcgcggaagcaatgttgccaagtgaggtagaattcgaatctttgcgatttcgtaacttcagggaggagcgctacgaggaagaccgagtggatgatctcaaccgactggaggaagcccgtgaagcagccttaatccagtcggctcggtatttacaagggatgcgacgttatcacaaccgcaatgttcgatcacgagcatttttagtcggagacctggttttgaggaaaattcaaactacatgagatcagcacaagttatctcccttgtgggaaggaccgttcataatttctgaagttacttggccaggttcttactgacttaagcgtgaagacggtactcatattaacaactcgtggaatattgaacaccttcatcgtttttatgcttaggcattacttttgtatcttcctctttgaatgctaacatcaagttactccttgagttatcagtcgggggctactataataataatggagtgtgatttttatcaattcaatttgcttactggatctatcattgctctgttcgattttttggcttagtcagtgaggactgaaagtttttaagaacttttgtggtttttaggctcaataaggtttgataaaacttctaagaaatcaggagctgagtttaaatcatcaagcacagcataaattcatcagtattgtacaaattgtgcctccattatcatcatcagaatacaaaatcaatcagtttcagttttttcatcatcagagttatcagacccaatcggccttaggtcgttgtcctggaacctctcaactacatcaacggctatcttgtcagcagctttttgcgcatcattgatgaggtcaagggcggcttcttcacttgtcccgtctgcaaagccatcaacagcatcaatgtcaatcttcgggtacaaggacttggtcatcgccaacgccagactcgctcccatacttccagcttctttgatgttcttaaaatatgtatccggagcaattctcagcttgtcaaagatttcggcagcatcaaatgaacttggaccattgttattgaaaaacatggcttggacgagtggtgtagtagcattggcgacttcatctctagctccttcaagcctcttgattttgctgaccaagacgtcgaattgagactgggatttgattttgcgatttgcacaaatagattcacatcaacgaatgagcaagaagatgagaatggtttcaaagtttcagctacaagtaccttcgacatctttcagaaccgagtccctttgcttcgtcagttcgcccttgtctttctccagagccttgattcgcttttctagctcggatatcttggcagcttgcactgtattgctttccactgattaatcacatatggatagcagcgcgaaacaagtcagacaagaataagagttacctttggatgaaccactcagctcaaagttggagtcttgaagctcggcaatccggtccctaagttcatactcagtctttctggcaagctccttagcttcacgaagttggtctctggttgcttccagggttccaagatgggggaccaatctctcgagagtttcagtctttgcctcattcctaagatggattctctgcaccacaaatttatctttgcttaagtaaagtggccgacaagatgattgaggctgtgtgtgaagagacatacatttacaagacgagtggcctgactgagtgtcttcttcagcagacatacttcctcgtcttccttttgtttatttatcacaattccttgtggttgcatttcgtcatcccaccatttaactaatatgggtgggcgagaatcttcagccgaccgtatccggaggacttcttcttcatcaccaaccattgggccttatacattcatgaacaatgatgaagcaattgaagaaagtttgttggatcagagtggatttagaagaattgcttacctgttatgacttctggttggggacgagcaggcccttccaccctaacaggagagctcgatcccggatcggtgctggcatccttttgaggagggctgctagtttgagcctccacttccgggatgtcttcattttgttctgtacccgattggtttccagtcgggggctcctaatcagcaccgactccaacttcggctgactggtttccagtcgggggttcgttgctggcctctacattgtcggttgctggttgattactactcgggcgatcttcggcagtcagcccgatttccgttgtaggaccagtctccacgccagtcggctcaaggtcttttccagaaggatcgatgtcagatggcttcctgcaaatttgaaatatgctatcaacactacttcaatagtgagtgaccagcgaaacaggggaaattgctaaatgacttgtacctggatgacttcctaatttttggtataggacgactggacgttttcttcttcaggttagcttgtcttggctgtttcccagtcacccctttcttgccagccttttcagcatcgtcactcagaatcaatttcctcttacgggagtctgactggttagttgactgtgaggtgttaggttgagtatcggaccggatttttggcctccactagcctgaccggtttgccgacagggtgagcggcgttgagcaatcggaggatctgacttcatcaaggcaaattcctgtgcatgatattccaagttttcaatcaaccttgtagaagataaaagcatgtttttgaggaaggctgagatgtatggtacataccggtggagaagggttgaaagcgttgtatggcacaactggcagcaagtgcgagtagctgactacgatagcatttgagaagattttatacactctccttcatgattttgaattcaagatattctggatcttcacggttagggtcatgcttgccatcaaattcgaaggctgtgcgagatctctccttaattggtgctagccggctcttgataaaatgtcgggtgatctgttccccttgaagcccctgttctttgagcttcagcatatgatccatcagggcaagtgcttgagcagcctcatctcccatgggaagcgagttccaggtgtcctgataaactggagaaagacaggagtactcgggaagtgcgggctcggggttttgcacatagaaccaatttgcatgccaacccttgttcgaggttttgaaaggcatggagaagtacttttggcttaaagttccccttagttgaaaactggctcccccaacaacgcacggtttactcttgttcggctggggcttgaggaagaagatgcggcggaatagagcaaaatgtggtctgatgcccacgaaagcttcgcaagcatggatgaagtttgcaatatggactatggaattggggtttaggtgatgcaaactgataccataaaactccagaatcccttggaagaatctcgaggttgggagagaaaacccaccgtataagaaatgagagaataccatgacttcatgtgtgtcaggggtcggaaacgcttcgccgcatgccggatgctactcgatgatctccttcgccggaagaacaccgtgcgccaccatctccttcaaattttcctctgtaacatcagaaggcgcccattgactctcgaagctttctctctcctccgccatggatacgaattggatgatgcgatttggtgtgaaattggccgggaatggatgggagatcgatgcggtggttgcgcggaagattttagtggagctctggaggacggattggagtggatttgtgaaccctagctttcgccggtgtggcttcatactatagcagagagtggggaaagtggcaagagtttcggcggggaagacgaaacgacggtttgttctcggcgtttatttcgctagggtatcgagagtactaatgggcctgggcctaaatagtacttcaacccaattttgctatcggcgtggctagttgtgatccttaggaacttaggcatttgtttttgctttggcaacacttgctcacgacagtatagctcaatgctgttaaaatcctttttgacgcagttagataattctttgggattactacaatgcacataaaaaggtgcccaacagaaaagtgttatactaattttataggcctttttaggctacaaagctgttcgggttttgttgagatgactggtttttgaatagtcattctcttagcatgttatatgcttattttgatcgtggcgtgagtcatagcttaggctatttagactcatcgtttgtcatgctttataccacatttgatggatctttttcagagtttttactcggattcttatcatatgtgttgatttatagacctttggagtgtttctcactcgggcctttttatatctccttttttgtgtattaaagctaaagtagtcgactgaatgttttattaaatgtcgcatatgcttagctatatgataccttggacgattcggttgtaaaaccactcagatgaattcgatgcacctgattttctctattttcagcccttcacagtctttgaatttggtactcgggagatcgaggcagagtaagttgaagtactcggattattgttttgaattatgagagaagactattttgtcgactgtaaaggtctcaggggctactgtggagattatggtaccccatacctacacggcatatatatccgattgagtatggggtgccatgtatagatagaatatcttaaaagggactcgggttaaattccaaacttgtatgtcaaggaaatacccaggatcctagtcggttacgattacatcatatctataactacctattccgttagggatatgggttgtactttgtaatacggactccttcctctatataaggaggggtccgggtgcctcttggggcacgattttctcccaaatcatacgatcaataacatactcggcggattaatcctcggacaggagtagggtattactacttgttaagaaggcctgaacctgtataaaattcattatctctcaacccatccacttttccagcttgatagccacccccttttagtattgccgaaatcttgtttcgacaaatctgaagcaatcttcgattgatacgataattttaaaaagttgtttcacaaacttcaatagttcaatcacatattcagcatagggacttatttcgaacccggacattcttttgttcctgctattcaaactgtttccaattgaaatttctgcaaaaagatgtcgtgaaattcctgtgttccaaatggggcttaaagtggatatgcaaccttgtagttaaattaagagggtaaaagatgattatctaaattttcctgttcggtgctgtaaggagggcgcggcggcgagggaggctcgacgaggcacgcctgtcggggaggaggaggccggcgaggaacggatccatcgtcgccatcgccatattttgttccgcatgagaggatgaagcgtagggaaaaggaagaaatatgaggaagaagaaaggattgcagaggctgacatgtgggtactactgtcgtagactcctagtagggaggactacaagattcctaacttttaccaagggggtttaaaccgtcggccacttattaaaactgtcggccttacatattactgagtgggtaccgtcggcaaatccctttcagccacatgtggtcggtaattgatcatattaccgagggtacctcggtaaccatgtacccgagggtttcgtcccgagggtttatggtcggtctttttttcagagaccacgcatggttctttcttgccgaccacatttcccgagcgtataccgtcggttattcttattctcaccgagaggtttttatataccgtcatccattcattacccttcggaaatagtatttgccataggtttttatataccgtcatccattcattaccctcggaaatagtatagctgagaggttatttaggtacttggaaaagtaaataaaaccctcggtaatttgatattttctgaaaaaaaaaatgcaaatttaaattgtacccatttttaattaatcttataaaagtaacttactgcacatagtcacatcataacaaatttcagcttaattaatctataaacagatccacgggaagttcaaccatagatataaataaccaaattgttcaaaatatttatcatccatcaccatagcaaaactaagtaattcatgacatgtcttgcatgaaagactttaattgaaacaagtctgtaacatttaaaataagatagattgagaagaaaaatctctaaactacaagggtggtccatcttctattgccctattcttcaggaatctcatttccttcctcaagatcaaaatcattgccttcatcatcatcaatctgatttcctccctcttgatcaaaatcactctgcatatatgattgtatcttacacattaggtattgcactttatttagataatgttaggtactgcactagagcaaacttgtattcgctatcacaagaatactttgaaagaaacttattttggagggtttctaaattggcacacatgggggagttcctgatgaaaatttccaaatctaggaggcaagtagcatctatgtctaagtccaaacttaagctagtaatttatcattagaggttcaacattgccgaggatttggctctcataattaagcagcagtctttaaaaagtaaaattacagagcttacccaagcttcttctgccctctggttgcatagctgttcattatttccttgttgcattctgtgtgtgtgctgccaagcagcagcaagtccttgttgcccaccttttttatgttgctacattacaaataaattagtatatgcaacttttttatataggaacaagctctatggattgctacaaattaacaaagtactagggactgcttcgtggcaaccaagcctcgcgacccgccgcattggtatacagtatcacctccagcaaacctgtttctcttcctatataaagatttcttcctaaattcaggtgtactccagtgctcacaaagtaaatgccaaccctcttcagtaactgaaaaatcatttggtttagcagaaaccaaagcttgcacagtaggccaatggttaccatcctcatcaacatcctctgctggtactttgcattttttatataacttattagtagctcttttcttctcttcgaacaacatttgtggcacattcttcttgaaattttgctccaagactttatcagcttccactttgtcagtgggatcacatttaaaacaatactgccaaatcaagcaagaataatattatttttccacactgttgagactatcacaaatctgaggaaatcttacccaaaatcctttaagaactcggtcagctggtgacatcattctttcatttgtagacctcttgtagtccctccaagtaagtgcaggtgtcctgcattctgggagaccaatagcaccaggatagaacctatgcaacagtgcaccttgcactgtcgatggtctacgagatgagatatgaggatacacttcaaaagcgctacaaacagaaaagtaaattattagtatatccacaaataaagctttttgttaagcatacacttgaagaagtcaaaatgaaatttatttaaaacttactcgccagctgggactattctaggacgatcatcctcctccattagcaggttgcctgagagtgtcattcaaaattttatatactatattaatccagaagttaaaaaataagtatatatgggagttttctagattcaacagccatgggcatgattgtgcagcgaagaatgacagtgtatagattccgaacagaaaaaaaatggacaatctgcaagggaagtaaactaaatgaaaaaaaagtacatgtcttgaagaattctacagtgtgccagccagtgtgcaagtaatatggggatactgtgaagtgaagaggaagttcgctatatccctagataaaagggggaagtggattgggagatttgagaagaggagtaaattcagaatttttaggatagagcaagcactgggccacctaggcgaagggcagaggccacaggacaacagcatccactacagatctttgctaattatctgaatttaacacatagttgttcatccactacagatcgttgctagaaaaatgcactcaacaaaaatcgaaaatcagattaatgtagagaataaggccattgcaggaagaaaactttgagggagggagagatgaccataccttgacgtggagtggtgccctcgcgtgtgcccggcgaacaaattccgccggtggggagaggagaggaaccagcgatgacgtacggagaggaagggaattcacagattcaatctaatgaatcagttttgcttccaactatttcgaaggagaaaagacgcaagagtaggagtatatacttatcgcgtgggcggctaatttgcgcgcgtattattttaggagatcggaagtggtcgcgaaaaaggaaactgtcggccacactctgcgaattggaaatttttaggtcgctaacgcgttctttaatattttggtgcctctttgttcattgtacaaggctgagcttagatggtttggaaccattatttatgtgttggaggtcttgagttcaaacccaagatttgacatatattttttaaaattttggattgtatatattacatcatgcttacaaaatagtagataatattaataaaatatggccacatttttatgctgttgattttttttggcacaattttaatactattgaataatgttctcttcaatttgacgtatatgcatgccgtttcataaactacttatctggtcaaagttataaactcttttaatgcaaacatacatgagcatgcatggtttaatcatgtgaaaaataatcttataccattgcatttgtaaagaaacgagataataatttatgagattgggtcgcaactacaaaggtgccatgaagcgggtacatacactgggcagggggccgagaagaatgaaatgaaaaaggagaaaattgactatgagaataactcgcacgaagaggatatatgagaataagatggataagcatatatactatctttgatgctaagcacaagatgtcttatatatgaaaccaatcaaattgaagataacaactatgtggttaatatggtaaagactagagagtccattaatatacccctcggttactaatataccccgtcggtcactaataataatttccgagagttatattaaacccctcggttactaatataccccatcggccactagtaatcatttccgagagttagattaaacccctcggttactaatataccctgtcggccactaataataatttccgagagttaaattaaacccctcggttattaatataccccgtcggccactaataataatttccgagagttaaattaaacccctcggttactaatataccctgtcggccacttataaccatttccgagtggtatcttataactctcactcactgatatatcccgtcagccacatgctaaatagccgaatgttctcgtaactatcctcattaaaatttcaaatggtcggccacctaaatcttcctgacggtctgtaggattttttgcttggacgcttggcaaatcttaggattctagtagtgggggtgaatggagaggatgttggagtaaacaacgaatttaacttgacaaattagatagagagttggccaaatagacatttggagagtgagatttggagagactgttggagatgctcttagccattcggttggagagaatgttggaggacgtttcttttggctagaatggttaaattttggcttagagagtgaaatggagaggctattggagatgctcttagagctaactgcttactctaaaacaaacacaacagcaaaaactattgtttaaatataatttataaactactcgatctatgcattgttctttaaaaatacttttttgtcacattatattatctctcctgacttgattggcagtgagttgctcatctgcataggagcacacaaagcgctggcgataatatggaactctgctcaatggtgctttctctcacctccacgtcactgctatagttgatatgaaaggtttataaccagttattgtagcttctagttgatatgaaaggtttatagccagttattgtagtttcttatggaactctggtcgtgtttagttaagtacttttcaaattttttatgaagtatacggacacacatttaaagtattaaacatatactaataataaaacaaattatatattccgcatgtaaactacgatacgaatctattaggtctaattaatccgttattagcaaatgtttactgtagtaccacattgttaaatcatggcgtaatcaaaagattcatctcgcaattgatgtaacggaaaaattgaaagtttgaagtgaactaagcaaagcctctggtcttagtctaaagtgaaatatattcttttgtttaatgacatttcctgagaacaatgcatgtctcattataggttaagctggcgttggggcttcttatttatgtatgtacggccctaagaggaggtatcaactatattaatgtaacaataatattaaaacactaagcttaattttagcatggaaaataaaaggttgtatatattgtacgtgacaattgactgcaactatatttacatgcagtctattgtcatatacaatatatacggccttaatattttccatgctaaaattatagagaatatttacaatatgtacctttataacaatgtcagctactccctccatttcacaatgtaagtcattctatcattttctatattgatattgatgttaatgaatctagacatatatatctatctagattcattaacatcaatatgaatgtgggaaatgctagaatgacttacattgttaaacggatgaagtatatgatatgcaactatattttacatgcagtcaatcatatgtttaccatcagtgatggatctagaaaatcgatttgttggtgtcataacgtgtctatcggtgtcataatacgctaattatacttagatcatggtgttctaatatatccataagcagtttcgctatagttttagcggaaagtcatcagtattgccagacgatggccattatactgtaatccgcccatgttatcatctattattcacagaatggtgttgtaacatgtagagtttcccatgttaaaaataggaggcccataatattcactcattctagttctcttatcattctccgcgacattcaggaattcagcaaccccattattcctatacttttgggctccaacgagaaatacacgtatatccaacttcaatccatctacaattaataagatagtaattatcagaaaaatacaaaatacattataaaagtataagacaagatagcaattatcaaaggtatctttttctttatacctccaaattttcaacgaagaaacgccccatagtccttgcacctaaaatgtgaacaatgcagagggttggaatgacaaacagttatatgatagaggtatatatagggggtaagacacctctaatgggtaagtggataaatcggtctgaaatgagtattagtcatctttaatgggttgctagctaccttggtacctgtcacaggtgaaaagtcatcttgtaatgggcaccatgtacgccttacaaaggaccttttgttgggtgcacattttaggtagggagtcacctacgatgggcctcggcccaaggcctcatctgtaacaacatccagttcaacctatcacatatgtggtcatccgtgacaaggcactagctttgtcctatcatcccacaatgcatacaagaccatcacaaagttcagccatgtactatctccttcattgtgcaattccaccaatctggtctcaataagaaaaattaagtgattatccagtagttccggaaatttcttaaattaaccaatcagcaccataccaactatccatttgcaatgtgcacatcactactaccttaatgttcttcccaatttcatagctattttcttgcataattaaggtgcagcaatgtcaaccattaacgagtttagatggcaatgtagtatagaatattaagtgaacatttaagtcaatcgttgtgtagttggccttgtttgattatgatggcccccgtatacatttgaggctagtgttacataatcctaagagatgataggctttgggccatgctacatgtttaacaacttatgaaaccaaaattaacagtacagattgtaccgcacaaatccaaatggaccaatttaaggaccagcagagatcgatgaaccatccaactttggaattgatcaatgattagttaattcaatgagtcacagaaccagatttagcagaaaagtataatatgacaccactacaccaggaaggagtgatagctactaattaatcaatcacttagtcatgttgcagctgtttgcaatccaacgaaatgcctctttcagggttacctgttaactactctttggcaaaagatcgaacatttggtgtgcgtcaattaaaaaaaaaacaaaagggcaacaaattcggtgtccagttgactgcttcggtgcctagcctgattgctaggatcgagttaaacaagtgatcaatcaccggtggtgcaggtacttaccggggacgggacgtcggcaagcgatccagaaccaaaggctgctgcgacgacgcgcgcgcgcacgggagatggcgttgggatgcacgcgtggccgggccttggagcactggagcccgatgatgatacgcgcgccgagagcaatgtccgtttcaagcgaaaaagataggaataagttcaccggaggtccctcaacttaactgcgagattttttgaggtctctcaaccacaaaaccagaaatgttcgcccctaaattcattcaaaccgttcacatgaggtcccttggcagtataggtgggtggttttgctgacgtggtatcctagtaagcaaaaataaataaataaagtacgtggggaccacatgtaagtgagaaaacggtgcgggcccacatcccttcctttttcccctttcttctctcctctcgtcttcttcgacaagccgagacgggcagggtgacggccggcgagagcggcggcggcggcggcggaaggtgagcgcagccgcggcaggcgaagcaggcaggagcagggcgacggccagcgagagcagcagcggagacggagagcgagcgtggccgcggtaggcgaagcaggcaggagcggggcgacggctggcaagagcagcggcggactgcgggcaaccgcggtgggaggtgggggcgggatccggaggtggcggcggaaccgcggcgcgttagggtccccgaacacgaggtcatccttgagcccgctgtccaccgagcggggtctgtgggcagaacggaggcgggcggcgcggcggcacgcggagcggcgttggacggcggcgggcaaagcggacggcgggcgtcgggcgagcagatgagcacttcaggcggatgaggggccgcaatggcggaggtggccgaaggagagcgtggcggcctactccgccattc

SEQ ID NO: 4013 - DNA, 782 bp, Oryza sativa
aaaaagtcaacggcgtcgtacatttaaatatggaggtagtatatatttgaacaaacgttactacactatgagttttgtgtgttcttgtttgaagatatacttgtttgggtgaagggaaagagatcgagcacaaggattgcatggatgatcaatgaagtttatttgggaccatgtgaagtccttccccaagtgtaacaccccagcccgtttgaagcctagtagtgtgtgtttggcccatgtggtgtttggcccatatggccctgaagtggatgtgtagtggtggtttagtaccaccttggaagtttaggtgggtgagggcctgcttataagccttggtgctccaaccatggtatccccgggttaacccttttacacgaagcgaggacgaaagtgtaagcgggataccatgcgtacgtgggtccgctcaacgtgtagagcggactaatgcggattttggaggcatggtgttacagttggtatcagagcataaacctccgctgtatgatgtatgtgctttgggccatggtctgcaccggagggggttctgggcctctgccgtgtaaacggtgagctgccggggcgtcagcccttaagggggggtgaatgtaacaccccagcccgtttgaagcctagtagtgtgtgtttggcccatgtggcctagaagtggatgtgtagtggtggtttagtaccaccttggaagtttaagtgggtgagggcctgcttataagccttggtgctgcaaccatggtatccccgggttatcctttttacacgaggcgagg

SEQ ID NO: 4014 - DNA, 573 bp, Oryza sativa
cctattctcgtcctgacgccgcggcgagccaggaggcagcgagttattttactcgatatctcgcgttttctcgtcactcagatctgatctgatctgacccctcacagtgaggtaacccctctcgcctcgccacctccccccctgttttctccatttctcctcccaatttttttctccgcatccgcagaaattctgtcccctcctcctcctcctccatttccgatgtattttattcgatttcgagatttgttttccggtgcatagagctcacgtacaaccgccgcgccgaacggtgcatgtgaactgttcggcgaaacgcgcaagtgaggagaggtcgcgaggagcggctgctgcggcggcggcggcggcttcgattcaggtgggggtgggtgccctagggtttcgctgccgggatggatggccgggagcagcagcagcagccgcgcgtgagctcgccgccgccggccggcggcggcgtgatgatgcctcatcacccctactgcgccgcgccggcgatgcccgccgggtcggcgaatgttatgcacggggtgccgctctcgttcaaccccatgg

SEQ ID NO: 4015 - DNA, 514 bp, Oryza sativa
cgcgcgtcgtgttcctcaacgagcgcccccagccgaggcccggcaagggcgtcaccaacacctgcgaggtctgcgagcgcagcctgctcgacaccttccgcttctgctccctcggctgcaaggtacgttacgtccccccgttggccgccgccgcacgaacacctggtgttgcatcgcattgtgctgacagatgccttcttggacgcgcagatcgtcggcacctccggcgactaccgcggccggaagaggcacgccggcggcggcatcaagaagacgaagaagctgcacaagggcgcggcggcggtgccgtcggactcggacgactcctccacgaccacaagcggcgggagcgacaagagcagcgtggtgcagagcttcaccccgtccacgcctccggcgaccgccaacagctaccgcaccggcaagcgtcgcaagggcgtcccgcaccggtcgccgttcggcagcctcatggtggagttctaaagcagggcagaagcaatgccgccatgccggc

SEQ ID NO: 4016 - DNA, 758 bp, Oryza sativa
agcttctgaaggtactgcatatcccatgcttgaagtttgagtatcttcatgcttttaagaacttctgtcgttgacttcattctaccatctttagctgccatgatcttggcctgcaaccttttctgcattctggtcagtggaatattgcaagccattattgccagtgttgctgctaaaccagcccaggctccaacccctagattttgatggagaacatagacagcaagagaaagctgtatgggtaacatccaaatatagttggtgtaccatataacatcagttatcctttgtacatctacactcatgtagttaatgatctctccacttgtgtgtttctgccttgaactgcaggataggcggagtcccttttgatagatatgtgatatcaaagccgcccgcagccgcatcccgagctgtcgagccccgaaaatccattgtctctgagcaactgtttccacaactttggcactgagaaaagcaacagccagaaggtaacctcttttgagtccatactgcctctctccccctaggtacttcaccaagtcattgatcagggatggtccaacataggatgcacttgcacttaagactgcaaatcctgcattcattatagcttttcttctaataaataggaacattgctgtgtaaattgatttagtatttagaccatgcctgttctcaacatcatctatgatttttttgaatgaatcagaaaggaactcagcggagtccttcccatagacatttggcacatcatt

SEQ ID NO: 4017 - DNA, 781 bp, Oryza sativa
gcggaggcaccactcggcggcgacggaggcaagccggcggtgaagtcgtagacgcccaacagcggcggcataataggccagccgtgtaggcggaggcaccaatcggcggcgacggaggcaggccggtggtgaagtcgtagacgcccaacagcggcggcataataggccagccgtgtaggcggaggcaccaatcggcggcgacggaggcaggccggtggtgaagtcgtagacgcccaacagcggcggcataataggccagccgtgtaggcggaggcaccactcggcggcgacggaggcaggccggcggtgaagtcgtagacgcccaacagcggcggcataataggccagccgtgtaggcggaggcaccactcggcggcgacggaggcaggccggcggtgcagatgacgatgcccatcaacggtggtgtgaccaaccgaccgtataggcgaggacaccagtcggcggcgacggaggcaggccggtggtgaagtcgtagacgcccaacagcagcggcataataggccagccgtgtaggcggaggcaccactcggcggcgacggaggcaggccggcggtgaagtcgtagacgcccaacagcggcggcataataggccagccgtgtaggcggaggcaccaatcggcggcgacggaggcaggccggcggtgaagtcgtagacgcccaacagcggcggcataataagccagccgtgtaagcggaggcaccactccgcggcgacagaggcaagccggcggtgaagtcgtagacgcccaacagcggcggc

SEQ ID NO: 4018 - DNA, 601 bp, Oryza sativa
caatttgcaaccattttccactttgcggcgaaaaatagcatttaggttgtgtttagttccacactaaaattgaaagtttgaagaaattgaaatgatgtgacggagaagttggaaatttgtgtgtgtagggaagttagatgtgacggaaaagttgtaagtttaaaaaaaaagtttgaatctaaacagggcgttagccgcatttgtgctctatcaatccgatatccagtgcatgtgtattatcatattctaatcgatagactagcgcgaagttttcatacgctaaatcaaaacagtaaacaaactcacgagggagttgagcttctccacagcagcggcggcctcctccgccgttgccatcgtgacgaacgcgaaccccttcttcttcccatccttccccttgatcaccttcacccaaaaaaaaaaaaaagccacgcgtgtctcagaacaccatagcccagaactcaagctacgcctccataagcatggcaactgggccgtaccggttactcacctcgacgtccttgacggcgccgcactgcgcgaagagcttctcgatctccggcgcggtgaaggaccaggggatgttggccacgtacagctt

SEQ ID NO: 4019 - DNA, 513 bp, Oryza sativa
ccatcacatcaactgttgtttcagcaaattttgtacctgatatctctttccagggaaagacaatcagattgtaaacttcagctctgtttcagacggcccaaatatatattttttcctgtcattgccacaaatggtaacattacaaagtcgttttcactattcatccgtatataatactctatcgcatgcgtgtacatcgaagtcagaagtaacaaaagaaaaggaaaaaacatgaaaatgatggtctattccaagtgttccacggcattgccgacaccgaattggggatcactcaatcctctgatggtacacattaaggacatagctgttcagaaggtcaccaaatgtcttggttgagaacttctgcacaacatggccccttgcttgtttacccatcttaactgctagatcgtgatcgttcacgagcttcagcatggcttttgaaaattcaaaagcagagggctcacagagaaaccctgtctcgtcatttatgactgtttccactggcccacc

SEQ ID NO: 4020 - DNA, 555 bp, Oryza sativa
  unsure (1)..(555): unsure at all n locations
atattgaggaatttccaggtctctttcatgctatcccaataatgaatcattaattcctccatggggcatacgttcctcggccactttgtgccattaatgtgcatgccccctccatgtcattatcattgcttgaatcatagtaacattattactgttctagtttactctcgctgacacaactgcttcgctctagaatcgcgatgatgctaggtatgctaggttgatttgatctgtcgtctctgcacttcactgtcgctcacttgcttgcttttaattggtcggcgtgtagggcgaccaggcgtccattgtcggcggcgccattgatttcgtgaaggagctcgagcagctgctgcaatccctcgaggcgcaaaagcgcacgctgctgatgcagccgccgccgccaccgcagcagcagcgggagcccaagtgtgatgccgcggactccacgagcgcggccgatcaggaaacttcngcngcngccgccgccgcggcggcggctgatggaccgccgttcgcgcggttcttcacgtacccgcagtacgtgtggtgccacaa

SEQ ID NO: 4021 - DNA, 668 bp, Oryza sativa
ttgggataagtttttccaggggtctatttgcgaaataagttttttaaaaggaccaaaatgtaaatcatatccatcctgtacccacactcgatgagacggcgcggctgcctggtgcgcgcgagatccctgagcgacacgaacacgtgccgccccacgccttcctccacctcgtccccctccgagtagtagtagcagtactcgggccccggcacgcacgggtgctcgagaggcaaacccagcagcaaatcctcggccatcttggtcgccgtcgcggagcgccgcggcaggaagggcagtatcgcggtgtggaagccgtcggtgtgctcgacgcacgggaggctgcactcccggcacagcaccctcctgcagcagctacccgcgtacacgcagcccatgcccctgcagccgtcgccggccgactcgcatgtgcggaatacgcaggaagcagccgcaggctgctcgccgacggtgatcttcacgtgttgcggctggtagtagcagggccatccgccgtcgtcgtcgcgaagagtcggggcgacgtaatctggcggttcgtcgttctggatgggcaccaagctattcccgtacagcatggggaatgccatcttgcactggggaagctttaacttgtccagcgagtccaggtgtcgatgcttctcgtctcgaga

SEQ ID NO: 4022 - DNA, 527 bp, Oryza sativa
ccctacaccaaaacgcatcagtagtggaatggttttgcagggtgaaacacagcgaagaaaaacgacaatatccaataacatgtcattccaatcttaattaagattcgtacacgccgaatactagcgagaaaagaaaaaggtgtacaaacattcataagaaaaccgtacaactaggctgacaactgacaaagcatgctaaataagctaccgattgagaaaaataaaaattagctacctgacaggccaagccatgcgctggggctacttatttgttcctgatctcttttgttcaggcattgtgatactgattactactagcgcaccggattattggccaacgctgccggtggtgtcggtgcaggaaacactgaatccctgatccctacactctactgggtcaacagctaacagagcttaaaaacacaggattatctagtcggtcatcatcttcaggtcgggatcgtaacggccttgatttccagatagcgaccagctaacaggagcatacgaagaatgcatgggatgac

SEQ ID NO: 4023 - DNA, 1481 bp, Oryza sativa
acgtgccatctctaagagataacacgctagctccggcttgagacgagtgcctagaggctttcgtcttgacgggatggggcaaggcgtgcgtcagaccgccagtcgccacctaacccgtgatttgaccggtctgtgactggtcacagaccggataaaggaacgcgctgtactgcgttgcatgcagcgtgacacgcttgaccagactgcaataaatgctgttaggtgagcacagctgtgctcacttatcccatatatgtggcgcagacttccttaaggggtcggggtgcctcggccctcggggccggggcaagcgcaacccgacccccccctcgggggaaatcaggaggagggcggacacctcaccctcgggcccgacgtccccgaaggtgccaggccacgtgggcgattgcgtctgcctcaagcctctggtcatgatactcccggtcccatatcaccgacagtagcccccggcgttatgccagagcaatttcccttcccaagggaagcggtcaggtgtgacgccacccctaaagcctggtgacaggtgggaccggtctccgtagttgggcaaaatacccaacggtctcaatccatgcacattggtattggtaactttggttgtccataatgggcggtctattcaagactgccacaccacttgagcagcgcgcgaatctgggtgagcagattggtctcgcccggagatacggtaacgccgcttcggtcggcgagcgtaattaacgcgcgcacgatacaatccatttcgattgccacaaccgcatatccacttcatgcgccgtaagcgggcgaatgggattagtggaagcgtgggcacgggaaacgagggagcgagatagcgagatacgagggagcgaggtagtgggcgcgagaaacgaggagccaggcccagcgatggcaagggtataaaagcatcgagaaaaggatttgcttccttcctttcgccattgttcctcttgccttcgccgcctgagctctaactctttctctgctacgccctactttcgccacacgcgctcgttctcaatcatctcttcctccaccgccatggcacggggctctgctctgctcgacggcagtgtactaccgccttcccgcatcgtgagcgagaggcacgccggactgccgcgccgcttcatgccggagtccgccaccggtcgggagatagtgatgctgggcgaggggcgcccggcaccagactacccggggcggtccatcttcttcctccccttcgcaatggctgggctggtcccgccattttcttctttcttcatggatgtcctggagttctacgatctccagatggcgcacctcacccccaatgcggtgatgacattggccatcttcgcgcacctgtgcgagatgttcattggggtgcgctgtcacgtcctgataaattcatcccgaaataaaaatcatcttctaaaaggaataatagaattaattaaaattcgaaaagaaat

SEQ ID NO: 4024 - DNA, 21935 bp, Oryza sativa
taagtgacttttaaatgccgtttactgcaaaacttaacccctatattattatctccttgtacccccccttgcattaattatgcatctccggtgtggcttgctgagtactgtggttgtactcattcttgctcaatccttcccctcttcagtaagagaagctttggagaagatgtcttaggtggagtcctggcttataccccagttgagcgcctgtgaagatggagccgtaggcccgctagtccgctgctgtttatttttgattgtcaggcctgatgcgcctttgtaataatgtaaatattatcgatataataaagatgtgtcttttatatcatgtttgtatggtgtaccccggcttttcctgggacggggattaatacactagcgttcgggaaaaggcaattttcccggtcgcgacaagctggtatcagagccatctcgactgtaggataagccaagtggataaaacctaaggacatattttataaataaaactatttgcgaaagttcctctttttctccttcccctaatgctatttgcaaaaggtttactcttttctttcttcggatttcaactaagtactagatggtcagctttgcgaagaagaagatgtcgtcagttgtttgccgaagctccggaagactgcaggatccgctagcgaagcgaaggaagcagtgaagccagctgtgaagcaggagtgaaggtcttggagaacccgtcgcagaacctaagccaccctctagtgtttcgtttgtcgtgtgtttccttgcttgtgtgtgtagcgcgtggtttgcatcggtgggtggtgatgtaaccatgctaggttgtttgcttaatcaacttgcagaataagcaaaacaaacaacacatcaacaaaaagagttagttcctttaaggtcttgtctctagttctgatctattctctccttgtatgcttcccctctcaacctctaccttgtgacagatggataatcctggtaaccaaggctatgggaatgatggatccgatgactcaagaacccaagccaatgggaatgagagaagcatcaacgcaacctcaccagagctaatccaagttgtggttaaccaaaccaacatgttggcaacagcctttcaactattacagaattggaacaacccagcaggggcaaccaacgttcaagtgcctacagtccagcaacagtgcaagttatcagaatttctcaaaactgagtctcccacctttgccattgccgtcgatcctaaggaagccagtgagtggttgcgcaccatcgagaagaagctagggttgattcagtgcaccgaccaggagcgggttggcttcgcaactcatcagctggttggaccggcttcagagtggtgggatagctacgaagcatcaaggccagaaggacataccatcacctggaacgagttttcatctgtattcaggagatcacatgttcccgcaggaatgatcacactaagaaaacgagagtttcgctacctgaagcaaggggatttgaccgtcacagagtacctgcacgagttctatcgtttggctcgctatgcaccagaagatgtggaaacggatgaagaaaaacaagagaagtttctccaggggttaaaagatgagcttgcagtgcaactactcctagaggattatgaaaattttgagaaacttgtggacaaagccatgcaacttgaaagtgagcataatcggatgacgaactgcaagagaaggattgtcaacatcccagtatttccaggtggtaaccaaagacagcgcactgagccacttcagatcaccggatcttctgttgtgcatcaagagttcctgccccaagaagatgaacgcaatgtagacaacaacaacatcattcaccaagatatcgacgatagtatcaatgaaggcacccagaatggcaaccctagcaattttgactctgagaaagactccaagggtgatagcaataatggtaccactgatgccaatgttagcaaggatttccaaccaccaattccaactcctagtcaggacgatcgttcccaggcggacaactcagcaaagaagacgttgatttgttacaactgcaaagaaccgggtcatttctccagagattgtccacagccgaagcgtaacctgcgtcaccactccggccattatgcaagaagaagacaagtcactcgtcttgtggtcactggagcaaacgccatacctgtgaggcctcgtgttaatcataacccatagtagaaacaatgtaccaatgttaagcaccttccctttttgtttaagacagtgccttgtattcatgtaatatgggagaaattgtaataaaaacaagttctaagaggattcttttggaagatgcggatatgtgatcatgtgtataattgtttactgacaaaggagacctagggtctcgtgccagaggaactatattctaacctcgagctaataaccaacctgaggatggaaaagaaaaatcaagtgattaaccaaagagacatttgtttggactaagagttacagatgagtccttttcggatcaaaggcaacgacagttagtatagcttttggcgaaacacttcaaggtctcactgaaaggcagcaagtcaaaggaccccatcgtcaccagaagtatccacaactctcggagtgaagagtacttggttgacaaagtttaagaggtgattgatagaagataccagcaaaggtgtttattatcgaaccaagaagtaggtcgaaaggtgattgataagagaaatctaaaaagaatacgccagggctgaatgtgtaagggaatactttgaatgctaaatgatgacaagcatggtatcttagtaatgacgagctgatctcgacgcatgacatgaagtgggtaacttgtatgaggttgaccccaaagatatgaactatgcaaagttctggaactgaagccccatcttcaagtgccgcaacccagtcgaagtcagctaaaggttcaaccagggacaagtcaggtgaagagaagattccatccgcaataggagatcgagccaagcagtcccgagtggagaagttttgctaggcaagtttgttataaaaggcgcaacggaagaagtcagacaagaagagaagaccgcccaacctatcttcttgctagcctcctcgaatctcggggacgagattcttgtaaggggggtggatttgtcacgtcctgataaattcatcccgaaataaaaatcatcttctaaaaggaataatagaattaattaaaattcgaaaagaaattggcaaacactaaaatacgtacaagaaaaattcaaatgtgacccggagaatttttgttaaattctccttggtctaaaaggagccctcaaattttagtggaattttcagagcacaaataataattgagaagaaataaacaaagttgaaaaggttttataaaaagaaaaaccctaaaagaagtcctcttttccccccccttccttcttgggccggctcggcccagtccctccctctctctctctcttcccccgcggcccatcggcctcccccgcgcgcgcgccgctgacaggcgggcccgcccgccgccctcgctgacgggtggggcccacctgtcatcgccttcctcccgccgcgcccgccgccgcgcccgtgccctagcgccgccgccgccgcgaatcccgccgctcccgtccgccccgcgtgcaatcaagaggggggaattattccccgcaatcccctctcccgtttccccctcttttccctctctctctccctcggattcgttcgaatcaagcccgtaatcgtcgccggcgcaatcaatggcggccgagatcttcgcgcgcggtttcctctctccccggccgccctctctccctcccggcgctataaaaacgttgcccgagctccgctctttcgtttccgccgctcgccgctcgctctcgccgtcggaatcgtgctcgcgccgtgctcctctctctccgccgtcgccgccgtgctccggttcgccgccgccgtcgctccggacttcctccccactcggcgacacctccctcggcatcgccgcatcgccgttgaccccgtccgcgcctccacttcgcccgccgaccgccggagcaccgtcgtcatcgtcttcccgaaccgcgccgccgccttcttccgcttcggccgccattctcgtcgtcgtcgttgccccggggtgagccgaagaccgccgttcgccttccccctttcctcctctctctcgggtgccactccgccgcgccgttggtcgccggcggcgaccatcggggcgcgggtgcgcgccgctcccgtcggccgcgccggcgaggccgccctcgggcgcgccctcgcggctgccaagtgggcccggccgtcagccgcccgcgcccgcgggtgcggctgacgcgcgggacccacggcgccgaccgccgccagccgcgtgcgcccggtccaccgtggaccgagcggctgacgcgtgggcccccacccccgtggacccggtccgcgcgcccgctccctcggctgacgcaataaataggatttttaattgaaaattaaatgaagaaattcgtaaatatccatttaaagagcatataaacttcaaatggccatatcttggccatttgaactcggaattggaccgttcaagtctctaatttttccttaagaagtcaagaacccatttttgtgctttgtttctgctgttatgtggagtttattagagtaaaagccttttcctttccgttggtcgtgtagacgctgcagcttcggaagatccgctcttcgtggaagttgaagccggtgtttgggaaagcgagcaaggcaagtcacatcatccttgatcatattgaatcccagtttgtaaaattatgttgatttaaattattgcattaccgctttatttaaattcccgcgttatcactgttttatttagccatgcctatgtacctttgttatgaccatactattattgttattgttattattaccttgttcaccctagaataaacaaaaccccatctagtggacactctatttatggttccactagtatgaatttaggtagatgcttcgctgattaaataggacaacattaggtggttttataactttagactttgggaattctcatatcatttggacaccatggaattattggttgatggtggaattggacatacacctctcttcctctttcaaaacccctaaaacctgttttcggtggggtttgggtgcatgccagttgtgggaagtagcaccccggccactataaggactaaagctcgggcctctgttgcaaagcactaccgtacttccacatgtctaatgggtaaggcttagtttgtggctcagtctagtcataaacaaaagtacacggattggagatggatgaagtcgggcgtcgatggacattctccagggcaaatgaaggctacacgagctgcggctcggtagtcgagatgtcatacggcggagggttggtgcccaatgctaggggctcagttctgcctgcctgtcccgggtatcccggccgtaggtaggattgggtcggtactcttgtctaaggctaggatgggttggaaactatgtcacatctttacgacgggttccaaggccatggaatgcggagtaaagatgtgtcttgtgggtaaagatgtacacctctgatcagagtaaatctattcgaatagccgagccctcggatatgggcaagcctagcaatgtacccaagtcagtgttaaaattcttaaaatttgctcaacaactaaaatgtggaatggttggcctgggttggcttgggacgagctgggacccaggtcgggttgccagttcggtccgaatcatcgtaggccttgggttaaggcaggttcgtgagggttcacggccttgattaataatattgtatagctctaggatcgtctttacaaaatagctttgggcaactaagtgacttttaaatgccgtttactgcaaaacttaacccctatattattatctccttgtaccccccccttgcattaattatgcatctccggtgtggcttgctgagtactgtggttgtactcattcttgctcaatccttcccctcttcagtaagagaagctttggagaagatgtcttaggtggagtcctggcttataccccagttgagcgcctgtgaagatggagccgtaggcccgctagtccgctgctgtttatttttgattgttaggcctgatgcgcctttgtaataatgtaaatattatcgatataataaagatgtgtcttttatatcatgtttgtatggtgtaccccggcttttcctgggacggggattaatacactagcgttcgggaaaaggcaattttcccggtcgcgacatgcgcccctctcttcagctgttccggtggttcttcaccgtgcagtcggtgtcaccgccgtcggtggttggcggctgctacttccagccgcgggggccggtgttgaaccgctacatcccctacgtcctccgcaagaagtgggacgactggaagagcgactggttctacacccccctcgccaacgaagcgcgcctccgacttccaagccagcccccggcgcaggtctccagctggcgggcgccggtagatctgggggaggactacgacgccgtcctcgaccgcctggcgggcctgcgatcccaggggctcaccggggccatggtgtacggcgattacctccgtcgccggattgcgccgctccaacggcgcgcccggtgcgcctgggagtacactgggcctgaagactacatgcggacccaccagggagccagatgggattgggctcccgaggacttcaagatcgtggtccaaagggtgctgaatcttagctccgtggaggcgtctcgcattcctcaggagatcctccccctctgcagcgatcccgaccgcgcctccattctaaccattatgatgggggtcggggcctcagaggagagagcccctaagggccacgacggcgcgggcgagcgccgccggggggaacaatctgccccaggagggggtcgtgcttctgggccccgcgtcgggggctcggggagcagccgccctgccgacgcccaggggaagaggaagttgggaggaacacctcccccatctcctccccgagggggcggggcggcgcgtgccagcagtcggcgcccggagggggccgcgccgacgtcgcagcccgagagggagcgcaagaagaaacggctccgcaagacgggggagacggaaccatgccggggaaacctgatttcccctccaaggtggtcattcaaccgaccccctcgcaggttcgtctcactctcattgcaaccatctttctcccaaaaggaagtttttttttttttttactcattttgttcgtcttctggttttttcttctgcttcagcgatgtcccgtcgcattcctcccgccaccccaagtccggccagtccgaggccgaagatcctgcggccgcggaggagcggaggcgagaatctgaccggcgtgaagccgcagaccgccttcgggaagctgaagaggccgcccgggaggccgcccggattcgccaagcggaggaagccgctcgggaggaggccgcccgggctcgccaggctgaggcaacagctgctgctggcgcgtcaactgggcccactccttcgggcaaccctcaggcgacagcctccggggaggctcgcgacgaggccgcgggcacatcgcctgggcccacctccccgggcgacgcccaggatcaaacgggtccgggggacatccccgagcccagcacgtcctccggggggccgagccgcatcgccttctctccaaggcggctcttctcctcatcttccgtcgccccgctgagcgccgagcccattctgcaggccttggccgccgcaaacaccgcggtgctagatgggttcagcgcccaagtggaggccctgcgcgcggaacgagcggagctcgaggccgcatgggcacgcgttgaggaggggcggcgctcggtggacgccatggtggaggtgggccgtaaagctcaccgccgtcacgtctcagagcttgaagcccggaaggcggcgctgacggagatcgctcgtgaggtggaggaggagcgagcggccgccctcatcgctaccaccacgatgattgaggcgcaagacgccctccgccttcaaaacgccagccgggaggcggagctgaaagaaaagctcgacgccgcccagggagtccttgactccgccgctgcccgagagcggcgggtaacagaggctgaggcggcgtcccggcggcgcgaggagtcccttgaggcccgtgctatggcgctggaagaacacgccggcgccatggagaaaggcttgacggaccgcgaggccgccgctgctctccgggaggcgacgctggcggcgcacgaggccgcctgcgccgaggaggagtgcgcgctccgcctccgcgaggacgcactcgctgagcgggagcgagctctcgaggaggctgaggccacgaccaaacggctggcggacagcctgtcccttcgcgaggcggcgcaggaggagcaggcgcgccgcaatcttgaatgcgtccgcgccgagagagccgcactggaacagcgggctgctgacctcgaggcgcaggaaaaggagctggacgcgagggcgcatatcggtggggcggccgcgggcgaaagcgacttagccgcccgcctcgcagctgccgaacacaccgtcgccgacatgcagcgcgcactagattcctccatcggggaggccgaggccctccgcttggcgggcgagatggggccctccgcatggatcgcgccggtcggcaagcgggcctctggaagggccagacgaggatgcgccccatcaatctggaaggcctcgctccgcacctcaacaggatggcctgggtcctcgaacgactccccgaggagctcgagaagaccatcaagtcatcctcgagggacctcgcccggggggcggtcgaactcgtgctagcgagttaccaggcccgggaccccaatttctctccctggatggcgctggaggagttccctcccgggaccgaggacgacgcgcgcgcgcgcgtccgggatgccgccgaccacatcgtcaacggcttcgagggctcggcccctcggctcgcgttcgcccccaactccgacgaggagggcaacaccagcagtgcagacgatggtggtgacgaggccgtcgactcgggcgcgtcggaatgagcccccgagcccccgccaatctttacttttttctttttctttcttctaaggccttcatgcctcttttgtgtacaaattaacttaatctgcaatcagaaatgacgaaaaaatttttgtgttagttttattttgctatacatacgcgatgaggatgatctgtgccatggtccttttgcgccttagcttgaaataagggctcgtgcccaagtcccagtcctcgaatggctcgggtcggggctagtgcctggggagatccacatgtcgagactggccaggccgggaacgtggtgaccgaggggtatgggtgacccgattgtgggtttttgccgattcccccccggagttcaccacgccccggggcacggctcggttctgggccccgtttggcgattttagctgaccgaaccgaacccccgagggcaaggttgagtacgagtgaccttattttaagtcaagattcttcaaaaggaaagaacagcacagacacaacctttaggaaattgaaactgcttctattgaaatgttgaaaaaagagaaataagaatgtaatgcatgtgtggtagcccccggtcaaccctgcacacccgaggggggtgcggggttggcctgagccaaaacctgacacccgacccccccctcctcaggggtagaagcggcgaaggtgttcgatgttccatgggttaggcagctccgtgccgtcgcccgtggccagccgtaccgagcccggccgggggacaccgatcactcgatacggaccctcccacattggtgagagtttgctcaatccagcacgcgtttggacgcggcgtaggacgaggtcgtcgacgcagagtgatcgggcccggacgtggcgctgatggtagcgccgcaagctctgctggtagcgcgcggctcggagggccgcgcgccgccttcgctcttctaagtagtcgaggtcatctctgcgaagctgatcttgatcagcctcgcagtacatggtggcccgaggagacctcagggtgagctcggatgggagaaccgcttctgcgccgtagacgaggaagaaaggcgtttccccggtcgctcggcttggtgtggttcggtttgcccagagcaccgctggcaactcctcgatccatgaatcgccgtgcttcttgagaatattgaaggtcttggttttaaggcctttgaggatttctgcattggcacgctccacttggccattgcttctggggtgggcaggtgaggcgaagcagagcttgatgcccatgtcttcgcagtagtcgccgaagagttcactagtgaattgggtgccattatccgtaataatacggttaggcactccaaaacgggccgtgatgcccttaatgaatttaagagcagagtgcttatcgatcttgacaaccggataagcctcgggccacttagtgaacttgtcgatcgcaacatacagatactcaaacccgcccggggcccgtttgaacggtcccaggatatcaagcccccagacagcaaatggccatgacagtggtatgatctgcagggcctgggccggctgatggatttgcttggcgtggaactgacacgctctgcatcgccggaccagatcgactgcatcattgagagctgtcggccaataaaatccttgacgaaaggccttgccaaccagggtgcgcgaggcggaatgggctccgcactcgccctcatggatgtcagcaagaagctcaacgccttgttcctgaggaatgcacttcaggaggattccgttagccgcgcgccgatagagggtcccttctaccagcacatagcgtttggaaatgcgttgtacgcgttcactcccttcgcggtcctcaggtagagtcttatctgtgaggtatgtttggatctcagagatccaagcgatcaatctgagggagcttggagcgctcccttcgggtcccgaggcctggactccgacgggcctcgggggccggtcaggcgcatccgtctcccctaaggggtcgggtcgcgccgacggctgggtaagcctttcttcaaaggcgcccggtggggtctgggctcgcgaggacgcgagccgtgagagttcgtcggctatcatgttatcccttctgggtacatgccgaagttctatcccatcgaaatggcgctccatacgccgcacttggcgtacgtaggcgtccatctgtgggtcagagctccggtactccttacagacctggttaacgactagctgggagtcgcctaataccaagaggcggcggatccccagtccagctgccactctgagtccggcaaggagtccgtcgtactctgccatattgttagtcgctcgaaagtcgagacggaccaagtatctgaggacgtcccctgtcggggaggtcaacgtgacccccgcaccggcaccctggagggacagagaaccatcgaactgcatcacccagtaggtggtgtgaggcagctgcgaggggttcgtgctggcctcggggattgagacggtctctggagccggggtccactctgccacaaaatcggcgagggcctggctcttgatagcgtggcgtggttcaaagtgcagatcgaattcagaaagctcgattgcccattttaccacccgtcctgtaccctctcgattatgcaagatttgcccgagggggtaagacgtaaccacagtgacccgatgcgcctggaaataacggcgcagtttcctcgaggccatcagaatagcgtaaagcatcttctgggcctgagggtatcgggtcttggcgtcccggagggcctcactaacaaagtagacaggccgctgcacccttcggtggggccgatcctctctgctaggggccgtatccccggggcgttcttcgttcaagtggcctttcggggcacacttgtcttctgtgccgatgacctcggggtcggaggatgaaaggggcggcctcccctcagtggcctcggggccgtcctgggggtcgggggctcctggcatcgtcggacaagcgggcaaagggccaactccggtcgtcaggggcctctggcctccgttcggctcgggggcctcttctccctgctttctcccgggtcgagtcagcacagggttagcctcggggccaaagggcgataggtgcggccttcccgcagtggcctcggggccttcctgagggtcgggggcacccagcaccgtctgacaagcgggcagaaggccgactccggtcgtcaggagccgtaggccaccgtccgacacgggggcctttcctccctgctcgctcccgggccaagttagcacagaatgggggtgcacgaaatgaggattgtcttcatcgcgctccacaaccaatgctgcactaactacttggggggtcgccgctaagtaaagtagcaggggctcatttggctccggggcgactagaaccgggggagagctgagatatgcctttaactgagtgagggcatgttcagcttcctccgtccaagtaaacggccccgagcgcttgaggagcttaaacaagggtagcgccttctctcccagccttgatatgaaacgacttagggcggccatgcaaccggtgacgcattgcacatccctaagtttgctgggggggcgcatccgctctatagctcgtatcttctcggggttggcctcaatgcctcgggcagagaccaagaacccgagaagcttgcccgcaggcacaccaaacacgcacttatcggggttcagctttatgcgggcagagcggaggttctcaaaagtttccgctagatctgaaagtaaagtttcttggttgcgcgtttttactaccaagtcatcaacataagcctcaacattacgtcctatttggctacccaaagaaattcgagtagtacgttgaaaagtaggacctgcattctttaacccgaagggcattgatgtataacaataggttcctacgggggtgatgaacgcagttttttcctcatcctccctagccatgcgaatctgatgataaccagagtatgcatctagaaaacacaaaaggtcgcaccccgcagtggagtcaacgatctgatctatgcgaggcagggggtaagggtccttgggacatgccttgttaaggtcggtgtagtcgatgcacatccgaagcttgccgttcgccttgggaacgaccaccgggttcgccagccactccggatggatgacttcacggatgaatccggcctccagaagtctcgccacctcctcgcggatgaaggcttgacgttccggggcctgccgccgcactttctgccggaccggccttgcgcccggccgcacggcaagacggtgctcaatcacctccctggggaccccgggcatgtccgctggtctccatgcgaagacgtcagcgtttgcccgcaggaaggagacgagcgcgtcttcctatttgccattcagaagaccaccgatccgtgtggtcttggatgggccgtcgcccaaggcaacctccttgaccggaacctcgtcgcatgtggcaatccgctgcctcggggcggtgggggcggaggtgccaagcctctcgtcaccaccctcgggcttggtcgcagcagcgaggtggtccgcgcgctgctccatgcaagcgagcgcgactttcaggtcgccacggacagagatggggccaccggggcccggcatcttcatctggaggtaggcgtagtggaccgccgccataaacttcaccaacgcgggcctccccaggaccgcgttgtagggcagactgaggtccgccacatcgaagttcacccgctccgtgcggaagttggctgatccaccaaaggtgaccggtaggtcgatgtgacctaatggccatgtgtgccccggcgtcacaccgataatcagttgggacggctggagcaccatccccggggccttgatagcatcaaaggccgcgggggaaaggatgttgagagccgctcccccatctatgaggacacaccccaacttcacgttgcagatggtgggggaaaccaccatcgcaatctgccctccccgggcaacgcacagtgggtggtcggtctggtcaaaggtgagagcaacctccgaccaccgcacccgacgcgtcgtctcatgagtaggggccgcggcgagaagctctcgcttcatagccttgaagctccggcgagaaacgtgagcacacgctcctccgtcgacagtggcaatggtggcccctggttcttggaaacctaggtcatcatcaccatcatcgatgtcaacggcgggggccttctgtctggcctcacttcgccgtttaccggagggaactgccgcagacttgccctcacggcgttcctgcctcctgtcctcctcccacttcctcgttcgctcagccaagtttttgactgcgcgacagtccgcgagatcgtggagggaggtgttgtggacggagcaccacctgctggctgggcgctccctgctggaagtaccagcctctctctttttgtcgctcgcaggcctcccctttcgggtggcccgcggagcgccctcgacggcgaggacgtgaccctcgtcgccggaatggaccgaccttttcttcctcctcctgtcacgccgccctgtctgagcggcggatccgggggcggccgaagctgccacaccggaaccggaggggttccaggtccaagcctcctccttacgagccactcggtccgcgagctgaaaaagctctgcggtagtctggggctctttggaggcaatcttttcgagcatgcggttgtgccgcacaccccccctgaacgcgtagatcaccgcgtgtgcagggatgcaaggtatagtattgcggacttggcagaaacgctgaatgtacgagcgaagggattcatcatcccctcgctgtactgcgtgcaagtccgcttcttcacccgggcgtggataggtgccttgaaagttcatggtgaactgctggcacagatcctcccaggagtggaccgacgcgggtggcaagttcattagccaaccccgcgcctgtcccttcagggccatgggaaagaaattcgccatgaccctgtcgtctcccccagcggcctcgatcccggtcgtatagacctggagaaactcggtggggttgacgctcccatcatacttctcggtgatggtgggccggaaccttgggggccaacggacattccgaagactcgccacaaaggctctacagccaacaccaccaaccgggggcacggagggctgatcctcacgtccatgtcgaggtgacaccctggacgaagaggcaccctccgttgcgcggggagcacgccgatcactacgtcggcgctcgatgtcgaggcgggcatccggctcttcatgctgatcctcccgagtcggaggcgccgacgagggagtggtagccgaatggcgtgcagcagccgccgctcgccgcgccctccgtcttgacgacgcggaaccggtagtggcggcgccggaggtcttggtggtggcggaccgtccgccagcacccaggcgttgctgtgccgtcatgaccaagttggccacgtcgtccagccatcgctgggctggagactccgggtcagggacgacaggcgggtgacgtaggagcgcgccaacagcctgaagcgcgccctgaggcgtgctgccgtcgccgtagacgaggaggcgacgctccccatctcgccgttctcctgcaccacccgcgactggcgatgctgcggatttttcgactctctcgagcgcctccccccgcttgggactttggcgtggaggaggtgggggagtacgagctcgacggcgtggattcggctccccgtcgtcgccgctcacactcggagagaggtcgtgcgcttttccttgctcggccattaggctgaacaagaaaaacttggcgcacacggaagagtctgagagctcagaaaacacacgctgagccccctacctggcgcgccagatgacggagctcgtggcccctcaccgggagactgcgcaagcccccctttgccggttcgaccaggggcttagggtgcaatcccaagctctctctctctctctgtatgtggaaggatcacccgcccgcaagacacacgagacacggcgacgtatacaggttcgggccgctgtgaagcgtaataccctactcctgtgtttttgtggatttgtgtatggacaagttacaaaggattaactccctttcccctccgccttcccaaagggaaaaaaagtcctcctctaaatgggcaaggtcctccttttatatctcaaggggataccacatgcacctttctctttccaaactggactgttctttttctctttaatgggcggagatcggtacggtttccatccgggagcccttctgatgggacagcccacacctacccccacctcccccgaagacagagatgacgcgggaccgtggctgtctgtcgatgacgcgaccagtgccagaccggtcattcttgtccaccacgcgtcagcttaacaacgtgcatgtttgcccgtcttcgtgtaacaccttgcctgtaatggttaggatgaagcctggtataaatctgaccagggctaacgtgccatctctaagagataacacgctagctccggcttgagacgagtgcctagaggctttcgtcttgacgggatggggcaaggcgtgcgtcagaccgccagtcgccacctaacccgtgatttgaccggtctgtgactggtcacagaccggataaaggaacgcgctgtactgcgttgcatgcagcgtgacacgcttgaccagactgcaataaatgctgttaggtgagcacagctgtgctcacttatcccatatatgtggcgcagacttccttaaggggtcggggtgcctcggccctcggggccggggcaagcgcaacccgaccccccccctcgggggaaatcaggaggagggcggacacctcaccctcgggcccgacgtccccgaaggtgccaggccacgtgggcgattgcgtctgcctcaagcctctggtcatgatactcccggtcccatatcaccgacagatgtagtagctcactattaacaatttaagatgcttcgtattgcggaagcaagatcctatttcttagtgcctcctcacttgttcctggttcatgattaggacgtgtaattaaactctttgtatatgcgtttagtattggattattggtctatttctaactaaccaaattattttgctagctgttgtatcgtttgagaagaaatgccgcagtaggttcaagaacagggaaaaaatcgtctgctttttttttagaaaaaaaaatcgtccgcggcagttctttttcatggccatcgtacgacatttggtaatttggtcaactactcttgtaacaccctcagactatttctgtcgtcctagatgaattttttaagtttaagacttctttagctcaggcatgcatcatgctcggaattgtttttttttctctttagttcatctcaagttcacctctagatccatatacaaattttgggttgaattatgtacttgtagcaactggttatcaaggggcggttacaacaaagcgtttgtcgcttaaattaatcatgctgcagttacgcatcacatcatctcttggaaccagtcctaatcccttagatgataacgatgcactaaccaatcaacaattggctagaatgatgaaactaaccggtcctaactagctagttgcaaaagcagcagagggaaattctgcttaattaccgcgaaagaaaagtgtattgattttgacattaatctgtttattttttatcattttctctatagtaattattcggagtctccacaataatgctgcattatgcacgcattattggtcttctgatgtaagcgtgatgcgcttcgatcacaccctggatcacggcttcaagtaatacagtacagtacatacataggcacgaatcatgaacaaaccatatttcgaggacatcaattagcatatcaatgacctagcttaactcataattcatgcatgttttattctgacatgcatgctagctacacctgtgctcacagacaaattaagctagccaaggtgaagacaggaattaatgtgaaaaaaaaatcagtgctactattccttcgtcgttttcctgcagaatatatgcaatgcaggcgccgagtacatgatcagatcatctcccatattgctatctgatctggttggacagcatctcggttcagaggaaagacacctcaaaaggttaccattatatatcaggcccaaagcaagcagctgccatctacgccgcgcacatatggctagttcggctcatcaatcatgcaagtgcattattcagttcctattcttttaggctcagcctcttcatgcccttcataaatcatctggaaagatgcattgctccttctttgttacgtgtttcgcttctctggggccccagaaggactagcttaaccccggaaaagaggagctgtgtacgcttaaaaggcagtggaatgaaacatgcatgggcgcatcggatcatgctatcattgcactcggttcggagcatcatcactgctgcaagctaggccacgaccgttcattcgttcatgtgtgcttgattgatcaaaagtttcctcctaactagctagcactgcgttgcactacggcatttgctggatgatagtatataatttctctctttttcggcagtggtgctgtggtggcctagctcgtgcgagaaaggctggttgttcgttcggtttggtaaagagaggctaaagtcttcttcgatccattgcacttcagtaaacacagagatgacaaaagcaaagcatacgcataataattctccgtcctaagcatgacattttcaacgaggaggagggtgcggacaaagaacatgtcgccctgctgatttcatggcggctgccggataatgctgcaacgtccggatgcgacaagcgaatacggcactattttactggagttctcctagccgaatgcttgggtttcatgagcctttacggtagtgtgtgctgcttgctgcacaccacatcgatttcttccataggccaggatcagaaacagccgtcaggatccaggaaagggagagaagcacccagaacgcctgaagacaccacctgttcgccctcgggatggctgaaccctgaaaccgactgcagcgcagagagcagcaaatacagtagtaaacgaaatccgaaagcgaggcgacgacgccaccatgattgccgttcgatgattgccaaggaatggctctcccgacgtcgcgtgatgtgctacaagcgatcgaagccttgcgtgacgcgtacatttgtcaaccatatccgtggacagccgcgccctgattcccgtgcgcatagcttccggggacatttccatccggcttcctctgccaaattttttggggttatcttgggcacggcgagggagtagatggcaagttctggcgcgcgcgcgccgcagcctgacacgccgccgcaggaatgggttgcttcgtgtctcagaaactcgggtgggtactttccttgaaagagagggcttgacaaatgtgcatgcttccagaatcccggactcccctagttcagtgtgtttggttgtgtttagatcaaagtttggattcaaacttcagtccttttccatcacatcaacctgttatacacacacaacttttcaatcacatcatctccaattttaattaaaatctaaactttggatccaactaaacacagccaaatgtctcgcagcagcgcaatagtagactgtaggttagcctgccggcgtcctttattcggttacatgtgctggctggactaaccactgaaaccagttgctgctgacctccacaaccatagaacacaacaaatgcaaaattcggtcaagcctcttgtgtgatgcaaagtccaaaccttttactagtactagtactttcgcaccgtgacacggacactgcatgaccccaagcaaacgatcagctaaaagtcaaccgttcaaaccaatccagttagcttcagataacgccatctcaatcccaaatcctcgatcgatccgtgttacgcgagacctggagattaatcacggaagattagggcgtgggggggtttgacccaggagggcgcctggacccaagaatttaacgaagcgaaaaaggccaaagcgatcggtcctgcgtgttcctgggcgaggtgacggacggcgagtgagaagccctgcgctgcgagtgggggaggcctcggggggagaggtgaggtcgggtcggtcgcacgtgtcgcgccgcgcacatggtcacccacccaccatccgtctcctgccacgtttattggctgaaccttctggctgcgcgcgcgtcgcgtccgcacgccgggggagcgcacgcatatcgcctcgcctcgggacgcccgcctcacgacgtggcccatcacgtggcctgatcccaacagcgaccttgtcctaaactctccatgggaaagagtttcatcgtgtgaagaaatttgtatggtcgtctgtccttagaccgcttgtcagtcaagcctgcctgcctgccggcgggtacatacagtatactccacatacttgctcatcacggtgtacttttgctcatcatatggctgaatttagttccaaactttttcttcaaatttataattttttttcatcacatcaaaattttcctacacacgtaaacttttaacttttttatcatattattttaatttcaactaaacttttaattttaacgtgaattaaacacgaccataagcgtagactcgggttaatgcaaaaactaaacagcggtactaacagcagcactgatttcaacaattcgccctacttcccgggcctcccggctacctggcgaggaattaagttgggagactaatcaactcgcgcgcgtacgtgtgatcgacatgacgcgacgcgacagagattgtggtagttggaggggaccagattggccgcaggatggggcggtggactgacgcggacggagcgcagaattccggtgaactgcgccaaccaacggcgaggcctcggtggtggtggcacgcgcgagcttgtggttaacctcggccggcctcgggacacctgcccctctgattggggagaaagccttcgtgcactggccatcgtcgctgttcgttccgctgtgattgagtttggctaggacaaggagccggccgcacggtgtcattccggtcacattccagtcaggttactgtggctgatgatcgtgtgaatgtactttgcgatcgcgatgtttcatcgtggagcattgaatggagaagatggcatctctgtcggagaaaaacgataaaatggctggagcgtgcaacacgagcatgccctagtcacaagcacattagcttctgatgggccaacaatatggcccatcacatatggttggcccgttgggctagcacgcacacgggttacttactggagcaggcccgggctggaaagagaattcagacttagcgtggacctatatttaaggggcttaaagtggacttaatcctagtaataataaatcaggtacgcattttttttttgaacggaaaaatcaggtacgcatttgaatcaatgtactgtgtacgtaggagagagggggcccatgagctaatttagacatacgggatttcaagtcgaaagcaagatctcctaaaaaaaaagttgaaagcaagagattatagattccaaattttttttagagcgaattctttaacttaagtgacggtggtcaggccagcagggaggaatcggtggtcgtctggtcgtagaggaagataacggggatcatgcatgcattgtgcagcttatgttaaacgcatagcag

SEQ ID NO: 4025 - DNA, 544 bp, Oryza sativa
ttgatatcacatatctatcaaaagggactccgcctatcctgcagttcaaggcagaaacacacaagtggagagatcattaactacatgagtgtagatgtacaaaggataactgatgttatatggtacaccaactatatttggatgttacccatacagctttctcttgctgtctatgttctccatcaaaatctaggggttggagcctgggctggtttagcagcaacactggcaataatggcttgcaatattccactgaccagaatgcagaaaaggttgcaggccaagatcatggcagctaaagatggtagaatgaagtcaacgacagaagttcttagaagcatgaagatactcaaacttcaagcatgggatatgcagtaccttcagaagctagaagctttacgaaacgaggagtacaattggctgtggagatctgtgaggttgtccgctgtaacaacattcatattttggggggcacctgcattcatatcctccataacatttggcgcatgcatattgatgggaattcctttgactgctggtactg

SEQ ID NO: 4026 - DNA, 928 bp, Oryza sativa
acgcccaacagcggtggcattataggcccgccctgttaggcgaaggcaccattcgggggcaacggaggcaggccggtggttaagtcttaaactcccaacagtggtgggataataggccagccgtgtaggcggaggcaccaatcggcggcgacggaggcaggccggtggtgaagtcgtacacgcccaacagcgggggcataataggccagccgtgtaggcggaggcaccactcggcggcgacggaggcaggccggcggtgaagtcgacgatgcccatcaacggcggcgtaatcaaccaaccgtataggcggggacaccagtcggcggcgacggaggcaggccggcggtgtagatgacgatgcccatcaacggtggtgtgaccaaccgaccgtataggcgaggacaccagtcggcggcgacggaggcaggccggtggtgaagtcgtagacgcccaacagcagcggcataataggccagccgtgtaggcggaggcaccactcggcggcgacggaggcaggccggcggtgaagtcgtagacgcccaacagcggcggcataataggccagccgtgtaggcggaggcaccaatcggcggcgacggaggcaggccggcggtgaagttgtagacgcccaacagcggcggcataataggccagccgtgtaggcggaggcaccactcggcggcgacggaggcaggccggcggtgaagtcgtagacgcccaacagcggcggcataataggccagctgtgtaggcggaggcaccactcggcggcgacggaggcaggccggcggtgaagatgacgatgcccatcaacggcggtgtgaccaaccgaccgtataggcggggacaccagtcggcggcgacggaggcaggccggcggtgtagatgacgatgcccatcaacggtggtgtgaccaaccgaccgtata

SEQ ID NO: 4027 - DNA, 611 bp, Oryza sativa
atcatggaagaccttggtgatgaatattttgcaatacttgccgatgaatctagtgatgtgtaccaaaaagaacagttggctctttgtttgagatatgttgataaaaaaggaagggtagttgagaggttccttggtgttgttcatgttgaaaatactacttccttgacacttaaagctgcaattgaatcattgcttatggagcattccttgagcttgtctaaggtccgtgggcaaggctatgacggtgctagtaacatgaagggtcatgctaatggactaaagaaattgattatggatgagtgcccttctgcctattatgtccattgctttgcacatcaactccaattaacacttgtggctgttgctaaggaaaacccagattgtgtgtggttctttgagcaacttagatttttgttaaatcttcttgggaattcttgtaagaagacagaaatgcttagagttgcacaagctcaaagaattgtagaagaactagatttgggtgacattgaaactggaaagggtttgaatcaagaaatgggtttgggcaggccagcagatactcgttggggatctcactataaaactgttatgcatgtcctatctttgtatcc

SEQ ID NO: 4028 - DNA, 13817 bp, Oryza sativa
tcctgcggcccaacctagaacattgtctgaataaattgcaggtactgcaaagaaagctcaacataaactttctgcctccttgcacacctacgttgactcatccggtgagtgtaatgttgcaggatagacatgtcctgtatgattaatacaaacttgttgtttgttttctaacaaacattgctaattcaggctacatctggatctgaagtctctattggaaatccagttaccaccactgagtgactggtccatgagccaaatatcccagtgcaagttaacctggatgttggtgccagtaatagcaggcagcagctttaggcgtgcagtatctgaaaatcgctcttcaccgaaagaactagaaattgggaagtcttttgtgataccagaaacttgtgggtgttttggtgtgatgtaactgtgaagtaggactgtgccaagtcctgtttgttctggtgtatgtcctggttgttgtgatgggctcatgttggtacccattggttgttcccactaattatctgtaggtttgttgagcagtactaattggtaccagctgatgaggtagtatattttgtgtagtcgttatcagctgatgaagttgtatattttgtgtatgcctaacggtgctgtgcgctgtggtgagatgcacatttagtggtggtaacttaagtactttgtagggaagaacctatgctgatggaaagtattaatgaagcttatgaacttcattatgttatgcgcatggaatttgattctcagaaagatgtaaattgatttggaaaatgttgatagccagatgtggtgttgagaccatgtcaaacttgtctgcacaatactggctcaatctgaaatcacagtgacatggttttcaattcgacacttgatcatagtttacaaatatggttacgtgtgaatattgaacacggtgaatttgcaattaaccaagtggctatagaaagtatagaaaaatgtggaaagtagtggaaagtaatttataaatatctatattttggatttaacatctatctattaacttatttaaggaatagaaaaaagagccttaacgttcgctttcacggcctagaaattctcatattaattagagaaaaagaaaaacagagtccatatagaaatacaatttagaaatagttgaaattcggagaaaatataatgatgctagcgacgcaatctgcgcgggccaccatgctagttacaaatattaggagagtccatagggtttcaatgtgaggatcaagttatcaatagagtaaatttgacaccgcggtattatagttatagttgcaaaaatctaaaagggttttgataaagttgttagtatcgagattctagttagtattgtttttttttcctaaagtagtattgaattgtataattgaattattttattttctttttaactttttaaaattttgaactgtaacaatcgcaatgtaagccgtgtcaatgttgttttgcgacgccaggcagattggcgtggttaaaaggttcatattttagaaataagttcaaaaataaaaaaaatctcgtaggatcctacaaaatatagtaatattgtttcgatggaaactatcagtatactgatttttgtgcgcttctaattattctatgcttcgtatcccgacactagagcgataccacccgaaaacgatactacaaccgacacgtgtcgttttacccggataatatcgtacgataatgacgtatcccaataccgttaaccttgggttttgataagtactaaataacaaaaacgaaattagtcaatgatatgatatctaaactagttgattagaataaatatatttagagaatcttatcaaatgatattttagcaaataaaaaacatttttagttgttctcataaatcatagatgttatctaatcattattacaaaggcacaaattaattattatacacaggggaatgtataataatgaaatactgtagaagtcaaactagttgattagaatgaatagtaacgaaatagaaatagaactagttaagatagaaacagaaatatgtaatttttctgtactgcaggtaaatatgacacagtggcccacaatgtcagaaatccccccgccatatgtttctctactgcagcttgttctatcagccgaacacgctttccccaattttgttttcgcgcgaactccctcacagccaaccctagaatcgattccgccgccgcccacctctttcctctcccgcgcgcggcgcctgcctgcaacgcgaccggctgctttctccagcttcaacgccgtcggctgccttctccgtccgtccggattgcagccacctttcttctcggagaccctccgtcagccccgttttcttggcctgcgcggtcgtcagcctccttcgtcggagtcgcaggcccctctcctgctgggagcctccgcgcggagcgcagccgcaggacgccctcatcggccgcaacgacgctgctggccaccatcgccatctggagcactggagcctgtggcctctcctgaaagaacactgtgtaagtgagcagtagccatttttatttttctctctttctcattcccaaaaattcaatatatgaatcaacccttagtttttgtttcgttgtatttctttgcagcaaaaaaggatggaagaggatcgcagttggatgtacaatggacgtagaaagcgtaatcaggttagtgctgattggattttaaagactacagattttttagatcgggcattcagtagggacacaagtggtgatggtgttatgtgcccatgtaactattgcaacaatacacggccccaaacaagggatacaatgatgaaacatctttttaagcatgggtttaggccggagtacactgtgtgggtttaccatggcgagtctgactcagaccctacacgcgatgatgtgctccggcaacgtacttttgatgaagatggggatgctgaggttcatcggatggatgacatggtagatgatgtgcgtgatgcacatatatcagttgaggaggaagaaccggaacctatagcacgagctttttatgaaatgttgactgcatcaaatcaatctctccatgcacacacagaagtatctcaactagatgccatcacacggttactagcagtgaagtctcaattttccatatccattgcagggtttgatgcattgttgaatgtgtttggtgctctccttccacaaggccacaagctacctctcaatttatatgaggctaagaaatttctaagtgcactgaccatgccatatgagaaaatagatgtatgcccaaaatattgcatgctctttagagaggaaaattcagagaagacccattgtgacaagtgtggtgagagtagatatgtggaggtgcagaacagctatggtgaaaagaagcaactaaatattccaatgaaagtccttcgttatataccattcatcccaagacttcaacggttatacatgtctgaaccacaagccaagcaaatgacttggcacaagtatggccataggtaccatcctaacaagatagtacacaccgctgatgctgaagcatggaagcaatttgatcgcgacttttcggaatttgcatcagacgctcggaatgttaggattgcaatagcaacagatgggtttaatccatttggtatgggtgctgcctcctacacctgctggcctgtgtttgtcatccctctcaaccttccacctggtgtttgcatgcagaaacacaacatgttccttagtttgattatccctggacctgattatcccggcaagaaaattagtatgtacatggagcctctagttgatgacctactccatgcctgggagcatggtgtgcagacatatgatcgggccactaaacagaattttaacatgcgggtgtcatatttattctcgttccatgatcttccagcctatgggatattttgtgggtggtgtgtacatggtaagatgccatgtccagtctgtatggaggtgcttaaaggaagacggctgaagtttggtggaaagtactccttctttgattgccatagacaattccttcctcatggtcacatttttagaaatgacccaaactcttttcttgcaaatactactgttacgactgaaccacctcatcggttcaaaactgaagaggttcatgttcgcttgcaacgtctgcaacctgctgccaatggagaggggtttgaaggttacggtgaggatcacaattggacacacattccaggcttgtggaggctcccatacttccataaattagtacttcctcataacattgatgtcatgcacaatgaaaaaaatgttgctgaggcaatatttaacacttgtttcgatataccagagaaaacgaaggataatgtgaaggctcgacttgatcaagcaatactctgtaaccgacctgatcttaacatgatccggaggcaaacatctgggcagtggttgaagccaagagctgatttttgtttgaataggactcaaaagaaggaaatattagaatggtttcaaacactcaaattccctgatgggtatggatcaaacctaaggagaggagtgaacttcaaaaagatgcgaatcaatgggttaaaaagccatgactaccacataatgatggaacgccttttgaccagtcatgttccgtggctactttcaaccttatttgtgggaagtgatagcggagttgagcttcttttatcgtaaattgtgtgcaaaagaggtagatccaattgagcttgaaagcatggaacttcaagtgcctgttttgctttgtaagttagaaatgatctttccatccggattttttaatccaatgcagcatctaattcttcacctaccatacgaagcaaggatgggagggccagtacagtaccgatggatgtatccaggtgaaagagaccaaaaggatcttaagagcaaagtaaaaaaccgagctcgtgttgaagcatctatagcagaagcatatatactagatgaaatcgcaaacttcacaaccatatactttgctgatcaagtgtacacagttcacaatccagtccctcggtacaatgttactgttgagtcgagagaatgctcacttagcctcttctctattaagggtgattctactagccgaggagtcactagacacttaactgaagtggagtgggaggctgccatgttgtacgtcctcacaaacctgcctgaagtggatgactacgttgggtaagcactttatttgggtcacatccagttcatagcatgaaataatttatcctttcttgacatgcatgagttctgtgtttacaggaaattcttacatgaggagtggagtagacgaggcgagccaacaagacagcaaaaggagaacctcttacggaatggtgctaggaatggttgtcctaatttcgtaacctggttctaccaacaagtaattcctcaatttcaatattcaacttgaacatctaatttctgcacctgttaataactataattcatcaaaattatttcacttcacttgtagagtcttatagacatgaatatgaatgatgatctgaagcaagtagctaaaggatgccatactagagtgaagacctatagtatttatgatgtgaatggctatcgattccgtacaaataaatatgagaaggagaggccaaatgcaaccaccataaatagtggcttggtgacaataggacaaggagaaaatagtgatatcactgattattatggctacatcaaagaaataattgaacttagttttcatggtgatagtgaactcactcttgtgcttttcaactgccattggtttgaccctgcccaaacaaggtacaccccacagtatggtttagtggaagttgcccattcatcaacacttgcagtgtatgagccatttgttgtagctcatcaagccacacaagtttattacataccatacccatgcaaatctgtaccagccctgatcgattggtgggtagtttacaaggttcagccaactggaaaaatagcagcccctgtggataaggactacgactttcttcccaacaatgataatgtccattatttccaagaagatggtctccaaggcacttttgtagttgatcttatggaaggactccataatgtttctgaagccaccactagagatgccgaaggcattgtcaatgacaaggacttgcagcttctaaatggatccaatgtgctacaacaagatgaatctgatagttctgagtttgatgaagatgaggaggagggccccatcattgatgaatatttctaagtaatatttttgcttttttacatgttcattttattctacaattgatgaagatgactcatttgatgtcttattctattgatttccaccctgctttaatagaaccgatgaagatgacaacgacgaggaccacttctgtgctgacttgctaagtatgctttgcttaatgtatttgccttttcttacactttagtttcttctacatggacatgatctgtttttcattcaaaccttccctacttaatcatttctcaaataattacaatgtattgatcagtctccttgcatgttcttactaatgtgtggctaattcctacaggttatgaagcaatataagtagcatcattagagctgatcagaaaaggtatctactttcatctcatcagttttaagatcaattcatggatggtggttggtgctgtacatcaacagatgcatacattttatcaactgtgaaaaactgctcaagttacattattgattgttcttaaccatattgacaaatcacaagatatatagtaatgcatgtttcatttcattacttatatgatagttctgctactctgcataatggcaagtgtgtaggtttgctaggtggatacatattttctcatgtttttattccaagcaaatccatttctcagcttatagaactgaccatttggtcttctttgttttggtttaattagcttgtaacagtacatgggtccgaattatggaggataatttgatactagctcatattattcttttgcttcaaattaaatgtcaatacttctttgtaaagcatcaaacatgaggctggtgcagattagtgaaaaaattcataatatgagaaatgcacaaggatacagcagcacccatagcaccattttcatatggttcctactcaacagtccttgcaagaaaaattaatttcttataagtttctcacaattgcaggtgtattctcaagtttcaactgcatgttctaggaccaatgaactaaataatctggtgctagctattgtctcaaagatttgagtatttgctttaagtgacatggaccatgatcagcttgtatgcttattcattacaaccaatttttaccaaaatatatgcctatgtctgggatttggcatctcttctatgcttggtgaattgtattgtgatgaaaatttgtcttgatgaatctcaaatgatagggatgcaatgcagtgaattgtattgtgatggaatgtgtcatgatgaattgcaaatgattgggatgcattgcagtcttctgtgtgactttttgcaggtgatctatattggcatgcaaatatagaaatagaaatataaataaaaaaagagtgctgagtgtgacttcccgtgcgtcaatagcatacagcacacggtaacgctaaaaagcttaccgagtgcccgatggtgctgaactctcggtaacgctaaaaagcttaccgagtgcccgatattgctcaactcacggtaacactaaaaaacttaccgagtgatactgtggacgcacggtaacaaacaaactgttaccgtgtgatcctggtgcacggtaacccgccgttctgttgggagcgccgttacgtcgtgagtgttaccatgagtcccgagttttgagtacactcggtaaaattttcaaccatcccgtgcgtttttcgtgcgaactcacgggaagtccacatggtaaaccgatgaagccgccgtgtgagcgttaccgtgagctagaactcggtaacgacgttaccgtgtgtttttggcctgttcccgtaggttttgagcacacgggagcctttccatctccagtagtggcgcagctgctcacacccgtaatagctcatccagtgataaggttgttaggattagtttcttatctccaaatctgttctatctccttatcacttgtaactgaacattgtaagccacggtagaggctgtttctaccactatttaacagagatgcggcccgaggcaaatggttcaatgcttcacattttatcacagccgcaacaccaccgtcactgtgtatgagcgccgccgcgtcgtgcctgccaagtgcggctggcgcatccgtgaccctgccgctctgctcgaccgcgtcatcgtcctcaagaagcccgaccccgacctctggaaaagggtaatcaaacacacactgtagttaaaagactgaattgatttgtacgtacaacaaaaaaacccttgattttttgtaatgttgctcttaaaccggcgcgcgtgcagtctccaaggagggattgctgcagggtgatgtcgtcacccaagcaagggaaggaccggaagatgaccatctatgttggcgtctgcagggcgggaggtcaaagtgagtgtctgagccgggaggccgccgggcatcggccggacgcgctgacgcgggacggagagggcgcggccgtgcaggcgccagcgtggtgcgtgaaggcagcgggaggcacggacgcgggaggcgcgcgccgccgccgccgcctgcacgcccgcaccgttcccgcctcactaccgccttcccgggcccatattcggccaccgaggagcttcgctgggccgctgccggggtctccgtcctcgacctcgcccgcgcggcgacgccctccccttctcccatgtcgccgccgacgccgacgccaacgccctcccttctcccctcccccgtcgcggcccccgccgctgccagccgtcgtcgtggacgcgctacccccgcctcgccgcggcgctgtggaggcgctaccgccgcagctgccgacgcgccgacgcgctaccgcctgggtgtgtgactgtgtgtagaagagaggaagagatgaggaagggggaggctgacgtggattgactgacatgtggggcctacgtgggtcccacgctgactcagccgccacatcggacaaaaccagggtcaaaaccaccgagggacctaaagcgaactgtcttgttagttgagggacgtccggtatctgtttttgtgattgggggacgattttgtatctcgatgacaagttgagggaccttgggtgtactttttccttggataaatttggatactccgcagcggccaattcatgtatttccaaggtaaataagttcatatgagatcccttaattgtcgacgaatcctattttcgtccttcaactggaaaaccagatacaacatgttcctaaactatcaaaaccagtggatataggtcccatggcagtttggatggtggttttagctgacgtaacatctacgtgactaatttgactcggtcttcatttgacgtggcttatgaagcgaaatttaacaattttaaaaataaaataaaatatatgggaccacatgttagtcaaataataagattaaaaaatagtgggcccacatgtcagtgggccctacttcctctaccttagcccctctattctctatctcacccccttgtccttccaccctctccacgacttcaccgacaactccgcaaagacattgaccgagctgccggccatctcgatgagcctgacgtcgtgcgctgacagccgctcgccggttgccacctcgacgatctctagtccctccacttgctttggctactggcactgaggcgagaacggtgacgaagatgaggcattgcttgtcgagttcttgcttggcatcggtgttgccggtatctggtccggcaacaagcgtgtcacgaacctttgacggtgtcgtgtgccggttgcggttgcggctacgtcggcctcgctcgcgaccagggcaccggagaaaaatcccgcacagctgcgatcttcgaggaagaggagcagcttcatcttcccgccatggccagggtgcgggaggccgtgcaacgtgctattccaccctcgccggcctccccgcctcgtccccctctacgtgcactcgccagcagatactcgcgggcttagtgacggtgggcaatgcgcgaagagcccgggccggtgatgctcctccctccctgcccttgctcaccggcctccgccgattccgcctctgtcgtgcctctactcctattcgctggcgtgctggtgctcgtggtgaccacctctagggaagaaggggaagaggtgagaaggagaagggaaggagatagtgaagagagaggatgaggtggatgaagtggggtctactgacacgtgggtctcgctgtttttaatcttattattctgactgacatgtgggcctatatattttattttaatttttaaattgttaacttttgcttcatatgccacgtcaaatgaagatcaagtcaaattagccatgtacatgtcacatcagctaaaattagccatgtgatctacattgcaccggttttaacagttgaaggaaaaatattttggttgaaatatgaaaatcagattcgttgacaaattaaagaacctcgagtgaattattcctttccaaggggccctacagatgatggatacacggtttaaaacctaaacagtatctcaaaacacaagccgatgggcctacatgtcctctgtgtattgggcctcaggcgaaaagtagacgtgagctactttcggtttgttgggccgtgagaaaacgcgggcccctcacgcgggcgagtccggatcgctgccggcgcgcgcggcgcaaacgcggcactccgccgccgctctccccttcccggcgccggccgcgcgccggccgtcgatgtactgctggtacgcgtacgagaggaaaccccagacggccatgagcatggatacggccttgatcccggtcatcctgtccccgaacagcgcgacggcgaacaccggcaccagcggcagcgacagcgtgcccgtcacgttggcgaacagcgacgacaccctcacgatcagccgcagcgagcccaccgccatcacctgccacgacaccgacgtcccgaccagcgtcgccacgtacctcgcccttccgtccttgaacgccgccatctccgccggtatcgtcctccagtcccccgacgcgagcagccccaccgccgacaccgtcgacgccaccacgttggtccacagctgcgcgcgcagaacccaccggagcgtccgcgtccggaccaccttctcgaaggtggcctcgaacagcgacaggatgagcgcgaacacggcggaggcggcgagcgtcagggcgaacccggcggggtacttgcccctcggcacgctgctggcggtctcgtcggaggaggccccgatgccgagcagcgccgccgagaaggtgagcacgacgacggagttggcgatcagcaccgtgaaccgctgcgcgttgatgagcctggaggtgacggagttgaagccgagctgcgtcgcggccacgagcgagaaggtggacaccggcaggtactgcagcgcgtacgagtacatcaggttgtcgaagccgatgatgatcccgaggccgacgtagatgggcgccatctttgccgccgccggcctgggctcgtcggcggcgggcgccggcgtgaagaggagaaggatggcgagcagcggcgagccggcggactgcgtgagcgtggccatccacttgctgttgccgccggagttgtagtacaggcggccgaggagggtggccacggtctggccgcagagcaccatgaacatgtccgccgccaccgacagccaccaccggacgccgcctctcggtgacccaccacgcacggcggcggcttttggtgcagagccgtcctcgccatggtcagactcttgttctggcataagtttgcaaacagaagacatggctgtttagtgtcaccgtcatcagtaagcttacttctcaaacacaaaatgtaagcaacggaaaagatcaactttatcatttctcatctgatagttctccattttttgaaagaatatttgtaaaaaaaaaggtacaaatatcacaaggaactggagtgacgatctagttttaagggatcgtggataaaataagggaaatttagggggaaacaaaacaaaaggttacatgtaaaataagaaaacggttttgctaaaaaaatacgacatcatatactatttgatttcagccacttttttcaatgtaattgctacctctctgaatctcatatgtctcctcttttaagttgatttttatatactacttttaaatagcgtgtgtactgcgaaaaaaataccttataagtttcaaagtaaatacttccgccattctaaattgatcatcatatatatttatacaccaagaccaataataatttaaatcgcatcaatcaagacaacatgcacacattcttccacaatgtatacatcaattaaaacaatatgccaattacgccctagcatgcacacattctctcatgttatattaatcgtattccgataaaatttgtgtccatacagttatatcatgcagttatataatgatcaatttaagaaattttggattttgttctatgatgatcaatttgagaagtagagaatatgtcatttacgtatataaaaaatattcctctgtgtgtttttttgtctttttgtttttctttgcaaaatacaacgcgatggggcctgtggaccatgccttatgtgttgttgctaagcctgcttacgtctactctggtcttacttgtgttgaattcaatgacactagtcacactactatatgatgaagataagactaagagtgccctcaaaaaaaaaataataagagggcccatgcatggagaagtgatgtttcccactttctctatatattttttatttattcctcagtggcggagccaggatttgaaagttgggtattcccgtctacaaaaaaattcatagtaaaaaaaatcaatggttcacagtatgtcaataccgataatctaagaaataaaattacaaattattacatggtacctctaattttctatttcggttccttcgtggcttggaagagtagctttaattctgcgttccttcatggcttgaaagcggtttataatatcacactccttgactttcaaaaacatctcacgctcaataaatgtgaccaagcaatcattcaagtattgatcccccatcctgtttctcaatttattcttcacataattcatggcagaaaatattctttcaacactagctgttgctactggaagtaccagaaccaatttgagaagcttgtaaacaatctcatgtctattgtgcaattttgtttcaacaatcataatggaaagattagcaagattttttacttttctaaacctttcatctatacgcatctcagtgaggaagagtttcaatgctgatggaagatggttcatctctgtgcttgagaaatcattaggataaaaccgtgcaagcttaatcaacttatctttgtcccaactagcaaagttatctataggactaaatgcagccatacaaaggagcaaatctgtgtttacctcatcaaaccgttcattaagctcttgtagttgtctatcaatgacacttagaaacatgtcaacatggaagcgatgcatattcttgattttaataaagaacctcctatctcttccaaccggccgatagaaagagtccatatcaggaatcttgatcttatgcttcacacaaaaagattgcacttcttgaagaaaatatcccatccaggatcctcg

SEQ ID NO: 4029 - DNA, 605 bp, Oryza sativa
cgctaacaaagtagatgggccgctgcacctttcggcggggccgatcctctccgccaggggccgcatctccagggcgctcttcatccgagaggccacgcggggcgccctcggcttctgcgccgacaacctcggggtcagagggcgacaggcgcggccttcccgcagtggccccggggccatcctgggggtcgggggcgcctggcaccgtcggacaagcaggcggagggccagctccggccgtcgggggccttgggccaccgttcggttcgggggcctctcctccctgctctctcccgggtcgagtcgacacagggtggggatgcgcggagtgagggttgtcctcatcgcgctccacgaccaacgccgagctgaccacctgcggggttgccgccaggtagagtagcaacggctcatctggctccggggcgaccaggactgggggagaactgaggtacgccttcaattgaatgaaggcccgctcagcctcctccgtccagtaaacggcccggagcgtttgaggagcttaaataggggtagcgccttctctcccagcctcgatatgaaccgacttagggcggccatgcagccagtgacgcattgcacat

SEQ ID NO: 4030 - DNA, 533 bp, Oryza sativa
atccatatgacaaagaaaagtatgacaagataatacaagcttgtgcgctgactaaagatcttgagttgtttgcaaatggtgatttgacggagattggtgaaagaggaattaacatgagtggtggacagaaacaacgaattcagatagcaaggtcagtatatgaagatgcagacatatacctttttgatgatcctttcagtgcagtggatgctcatactggaagccaacttttcaaggtttgttctgtttgtttaaaactttcaataaatgctcaagtatgaaggttatgtcttaactccattcttcgtggcattaactccattcttcgtggcataacgttaataaaaaaaagggcaaaacctatttcgttacttttagaccaataatcgttagactctaagcaaatgaaacaaattgccttggcaggattgcctgatgggaattcttaaagacaaaacaatactgtatgtgacccaccaagttgaatttcttcctaccgctgaccttatactggtatgtatctaaaatacttt

SEQ ID NO: 4031 - DNA, 582 bp, Oryza sativa
aagagggacgtgattgaaggtgtccgagagtttttgaaactggagaatggaaggaaggaatgaatgatactgttattgtcatgattccaaaaacgaatgcaccggtggagatgaaggatttcagaccagtcagcctttgtaatgtgatttacaaagtggtggctaaatgcttagtcaatcggcttaggcctttgttgcaagagattatatcggagacccagagtgcctttgtgcccgggcgtatgattacagacaatgcattagtagcctttgagtgctttcattccatacataagtgtacacgagaaagccaagacttctgtgcgttaaagctggatctttcaaaagcttacgacagagtcgactggggattcttggatggagcattgcaaaagttggggtttggaaatatctggagaaagtggataatgtcatgtgtgacgtctgtaaggtatagtgttcgactgaatgggaatatgcttgaaccgttttacccaacaagaggtttgcgggaaggagacccactcaatccatacctatttctttttattgctgacggcctatcaaatattctgcaaagaa

SEQ ID NO: 4032 - DNA, 8592 bp, Oryza sativa
tgctttgcgacatcaaattttaatccatcgataatcatccatgtgcacacacgatgtgaacctaactcaaaacatataacttgatagaatggttagtccacaatttgcgcttgtcattaattaccaaaactaactacgggggcctagatgctttagaggcccacctcgactgacccgtagcatatatgcccatataatgatacttaataatctagacaccacatatacattattaaatactactctacatcccccgagatgacatagagtaaccgagtaatcgaacattaaactcacaccactgcatctctctggtaggttaactatacgactgtatcgatgtagatataaagtaaagacgttactcagatatactaaagtatcaaaagtatattaagaatagtatttcattaattccaaaagtcttacaaaagaaagaaggaaaactactaaagccataccgaaattcctccgaagactccgaggactacgagagctattctattctaatccacttaacactagaatacaaaactaaagtgtagaagagatatcttgagcttgtttgagtgtgtgaagtagtggaggtggtgagggccttttatagctgaagaatgatggttgtggcagttggaaaggttggtaataccctccaaccgccattgggagtgaattcccaccgtctgatcaaatgcctggatcgaatggcgctgggactggttcggccgaaccctgggctaggccaaccagcccagtactcggcggccgtctcctcttccgcttctagacttagaattgtgaattatgggactttttgatcgtgtcaattttgagtttttggcccatttgtccataagtctgatagacagtgtctaattgattgtttgagtgttttgctgtcggttctcctccatattgtatctctttatctacagacagatagacttcaagtacaagtggaaataagttattctaaaacaaatatgcattgcaagcatagctagttctcctttattttagttatattgacggtcgaaattggtccatcaagagtagtttaatacgatctctttgtacttagtttcttttagaaaatcaacacaataactatggtagtttgccaaattgtcatcaaattttgatcaactacgaattactttgtaccgttcaattgtttctcccttttttaaaatgacagctcatcatggaggttcaaaaggaataggatacaagaaacttaggtaagtttgttgtttcatgtgcaagcaccgaaattgtgtaagtttgtggcagtgggaatgtgtgaatgtctatgaaattcttgtgagaacttggaatgcatgtgtgtgatgttatttttgaatgatgtgctaagattagaaacatgtattattgcgggattctgtgatggttctgttttttcagagggcgtggctagcaaatcctgaggctagccaatattttgaaattaatttattttcaaaattagctcatcactgacgggtcgtaagcaaaggccgtcacagttggcatcagctgtgatggctagctaaatcaatccgtcaaaggtgagtcacttgtgatgggcttcaatgcagatacatacatgtgatcatctgtgacgggccatcaacttcggacccgtcaaagatgtgtcacctgtgacgggttgcaaccatgagtgacttgaggggggccctcgcctgtgacggcccagaaagtgcaggaccatcagaggtgatgctcatttctgacggtctgccacccgtcaaaggtgattggagtcaccagcgatctttattcagtgaccaaggccataaccgtcaaatgtcaccgtcacatgtagggtgatctggtgtagtgagaatcatctctattttttataataggtaaagatttcacgaggatttcatgtatatgaaataacttttaggctgactgtatcttacttaccaggcctgtcataagaaaaaaaaaatctttacaacggggacaattacaatggtgatactggaagttgtaatatgaaactcttccgagaaagaattcggttcaaaagtactctttggagaaagaagagtaaaaaatctaattaaaggcacaataaataagcccaggaattgaaatcttgagccacatacctaattttctactcatcatatatgatactcgtaaccctgctgtactcatcgtcagatttcatctgtcgtcgtggtagtagtagtcatcgtattccatattttttttggcgtaatagtcgtcgtattcgtcattgtcggaatagcccggcttgttgtccattgggctccggtggcagctcatgcagcggaaagatttggagattgccgcgccgcaatactggcattttcccctggtcggtgatggtcgcttcactaccggtggcggcggcagaatcgtcggccgctgttgttttgccggagcaggccgacgcatctggacgacctgaggtcgcttcggtgcgctcggttgcggctttggcggaggacctggtggttgttgcctctgcgtcgtcttcggtggcggttcaggaggcctcttggccgccggtggcgtcgccggcgcggcggctgtaggcttggtacgaaacaggtcttctgcccgcatcggaagcgtacacaccgaggcggcggcggcggtggcccccggcgggggatgcctggtcgacagcacgtcccaggctgtctggacgagcttgaacgcaccgtcggcggcggcggaggtgttcttgtcggggtgcaccaggaggcacagcttccggtactgcttcttgacggcgtcgtggtgggtgaccaggtcggagcgcggctggggcaggccgagcatggcgtaccagtcgggcccgcagccggcgaccccgatggccttgagcgccgcggcggagtgcacgttgtaggcggccgcggcctgcgcgacgccggggaggtccgggtccagcttcagcgcgttctgacaccatcgcttcgctccagctacgtcgccagcgaggaagcacctctcggcgaggtttttggcctgcagggcacgatcttgcttggacgacgacgacgacccagccatgactggcaatcgatgatgtctgtgccgcccacctttcccagtttccaccaatatataagagcaagtttaatagtagagctcactacttactattagtcaatgttaaagctaacatgtatagtaggttggctataagtttatctttattttcttcatcctctctctttctctcaccatgaatttaatgcatatttcttggagtttgtgtgcagttagctcttgcatgagagccaacactccccacttttgtttatctctctcttccacataagcatatagcttgcttatagcccactattatccttgctctaatggcacgggtagagaatcataaaagtatccgacacggaggtgaatcagaggcagaatcgtatccgattccgatacgcgtcgggccagattagagtaggtataggctataagcaagctataaatatattttaaagagataaaagtaaaagagagaaaagcagcggggctacaaatatatagccagctgcagcatggacaataagacgtaatgtgtgtatgactggtgggaccaggtattaatagtatagtaagcaactattgtatgaattagccattacattggttatagatgatttggagcaagtttagtagtataggcaactactagctccaaatcatctatagttaatttaatagccattatttagaaacatatcactactggaaaaaccatctttggtcagtcaaccaaatttcacaatagtaccggttgtattgaaaagctcaagggtacttttcatttttagtcgcggtttaaaagaggacaggcggtgtcagacccctatattttctttagtcccggttggtgttaccaaccggtactaaagatcaatttgtagtgccagttgataacaccaaccggaataaaagatcggcatgcgcggagatcgaggcatgggagcagatcggatcgaggatcttccttccagttctatctcctcctctccttttaagtcctctcctcctctccttactcaccctatctcttcctctcctcctccccctcccccctcctctccacttctcgatctgcacgaggcggcggcgtggccggctagcagagggctggtggagggccgggcgacggcctacttgcggcgtggctgcgttgcaggtggcggccggcgcggcggcgtgccggcggccggcgagggggctaccaatcggaagtaaaaaccacttctccaccagtgtatactacactattaatatatggtcccacctgtcatacgcacattgcgtcttggcgtccgtgctgcagctggcaaatctgtagcccactgctcttctttctcttctcttatctcgtaaaaatatgtttatagctagcttatagtatgctattgtacctgctagagtcacttcaacttctagcgaacacttccaaatatacaaggacagcaggtgaatgactctgaatatggttatttcttagcaattctatgtttcctttgagtggtttcgaatagatttaaattttaaagcttttaactcaaacttttttaaaacataactccctaaaactctacccaaattggaaacatgcatcgatttcaatattctttgaaactttctaactcgattctaatttgtgtagctttcaacttaaaattttaaactttcaactcatatttaaaaacttttaaatcatctctttttattattttatttaaaatataaaactttcaacttaaattatgaaactgttctactcagttttttgaatctttcaacttatattttacaacttttaactcaattatgtatttattattatactagcaattataaccgtgcattgcagtggggagaaaaatcgagaaagttagagagtattgttggcagaaagctgagtaaaataggttgatacagtataagttatcaaaggctagtcctttaaaaaagaagatgcatgtctttagcatgataccgacaatgctaacaatgtagggataatgcaaactagtatttttacttacatttcaatggcttaaaaataccatgtagtggtaagtgattgaaattaccccgagtcttttcacaaactaacggacttgaacgttgggcctcgccatatgagagctcttttacatgctaaggcattaacagaatgattgaaatgtttatttattgggaaaaaaatattgaaatgttactacaggtgaaaagatcacttcactaattaatatggaattaacacaggagaagagggctaaaaagatcattgctggctacatgtgtatgggaaataaaaagagatatatcagtacacattaaatcatacagaagattgtcaaaggcctgggcgtttttggggttgcgcgtccaaacccagccgcttcgcccttgtggccgtgccgccgagccgagaggaacaccgacgagaggacgagcgcgtgaaaacgtcacactcaacacccacgcacacgtcttgtagagattatgggtaatgtttacaccctattttgacacttgggattaaaatagggttagtttgatctacgccattataaatatgtcaaattaaaaaaatactattactattcgcgatatcggctgaatgccactgaaattttctaaaattcgatccatgctactgccgtttacttttccatcatcgccgtcacatcctcctcgtcgcacagctctggatcacgccaccattccgaaattgctctaggccaatcagcacactttgtcttgccctcatagaccaacactagtcttttctgcacagctcgtgtgtactggggaaaaattgctctaggcaaacacgcttaacctcagagttctttggagatcggattccggaaaataagttgcaacttattggtatgagtattctattaatcatattaagcccaaggccggaatgtcacaggtgtggtcgcgctctgcgccgccaacatcgtgactggagagcatgtagtggttggcgctggcggatcggttccagaaggggtggtgagcgacgacgacgcggacataaggatggtcctgggagagtgggcagtacacgaaggaaacactgaacgacaagaagaaggtatgggcgtgtgtagggtcgcacgtgcggacgccactctagcggtgacggcggcgccatgaggtcgagttgttcgtcgatgaagcggccttcgatggtgtacatgtttggacggacactcatgcaggatcggtggctcgacttcgtcgtacatgtacaccttgaaccgcttattcatctccaggtaactcatgcatccatggtgcacgctcgtgatcgataaaaacgacaccggccccaccgccgtggacggatgctaagctaatcataccagtagaacgccgccgggttgcggtagacatgcgaaaggagcgcatagtccggctcgcgtagaacgccagccagttggcggagcggacgtcttcaccctcacctccgcatccgcggcggtgatgttgccatgcagcacgtcgtatcgcggcgcgtgccacgttgagctcctcctccacggtcggctagaagagagaacaacacaaagctatatcttagaacaaaccgctggtccatggacgacatcaaggctatcgggtccgcccgagctcgacatcaccggccgcaagctcttctactccgaccactccatgaatcatagcgtaagcaagcaactcaagattattaacagcactctctagcagcaattagttcttgaatctcgatgagctagttattcagtagtttcctgagacaaaatggatgctttggtgacacgacgcaggtatcatatcctccgagatagaggtgcgtcgagtttcgacgagtgcgatgaagccaatctccgacatcgccgtatttgaggatgttcttttcgtctcggattcaatccagccgaagggattagtcccggcgatttcattgatttaatcttcaaaatcatttggctttgccgtttcagtagttagattgttttataactgcagattaattttctgttactctcttgtttttgtatgccgactgagaacaagatcaatggctgccatctcggtgtgtctgcccaacacctcgtgttcccccatgcaccatgtacagatgccggtgtaatccgacacgggagtaacgtggaaccacaggcagtgctcacagctcacacacgatcgagatcgccagctaccatgagtcatccacatgcatgtattgaccaatcgacatcatccaggacacctcgccggaatcatgcaccaattaattcattaagcatgcttttatgttccaaacatatatacacgagcttatataaataattttgcttatggtactaaacagattgatctgttaattgttctattttgaagtatccggaccggttgattctgctgccgccgactggtatcctcgcctatacggttggttggtcacaccacctttcatgggcatccacatccccaccgaccggcctgcctccgtcgccactgactggtgtctctgcctacacggctggcctattatgccgcctttgttgggcgtctacgacttcaccgccggcttgccttcgctgccgccgactggtgtcctcacctacacggttggttggtcgcaccaccgttcatgggtgtccacgtcttcaccgattggcttgcctttgccgccgccgactagtgtgttcgcctccacggttggtggtcacaccaccattgatgggcatttatttatcaacaccgccggtcgcctcagctgcttacacggttagtgttttcatcatcattgatggactacttcgttcccacatcggctatttctgttgtcaccgagggaatatgaaaaagctaagtcatcattaattttctttatatgatattttctctttcctctgcctcactacatcaactagttcgccgttgactagtgagtcgggggctacagatgctatatcatatttttttaataattttcataatatttatcttgattgcttgcgatataatccgagtacaaaggtgcctatcgagttatggagctctatatccctatgctttccgcttggttgtcgatggatagttgcctttgggccgattcctagcacccgggggctcgttggatggagtgtataacacaaggtgctaagtattactcggaagaaatcaaaagcatagagataagataatttattttctgctcttaacaattacaaaagtataatttattttctgttctcaacaattgcaaaagtacccgagtagtaaactctgatacgtgaaactttgttccattaatgacgaactcatgccactcgtatgcatgtttgggaagtgcctaggccgactcctagtgcttgggggctatgactagtcgggcagagtgtttaaacgtaaggagtcatccgctcggggaaatcaaaattgacaagaggagaaatacatatttataaacattttaaaatagttgaattttcctcgagtattatatttacatcagatactactcatcctatatgtttg

SEQ ID NO: 4033 - DNA, 1199 bp, Oryza sativa
  unsure (1)..(1199): unsure at all n locations
ggcgtgtcccttttgaatgccncatgaccaccattggacagacgncatcaaaatgttcacatccacaaggcacgattggtggtgaaaggtttcagacaaattctcgccagttgccatgctaaaatctattcagattgttttagcgattgctacctatttcaactataagatatggcaaatggatgtcaaaacagctttcctcaatggaaatcttgatgaggatgtgtacatgacacaacccaagggatttgttgatccacaatcagctaaaaggatatgcaaattgcagaaatccatttatgggttgaagcaagcatctcggagttggaaaatttgttttgatgaagtagtcaaggtcttgggctttgtcaaaaacgaagaagagccttgtgtatacaagaagattagtgggagcacactggtgtttctaatcctatatgtagatgacatattattgattgggaatgatattcctatgcttgaatctgttaagacatcattgaaaaatagtttttcaatgaaggacttatgggaagcagcatatattctgggcataaggatctatagagatagatcaaagaggttaattggattaagccagagtacatacattgacaaggtgttgaagaggtttaacatgcaagattctaagaaaggtttcttaccgatgtcacatggcattaatcttggcaagaatcagtgtcctcaaacgactgatgagcgaaacaagatgagtgtgattccatatgcctcggcaatcggatccatcgtatatggtatgctatgtacacgtccagatgtttcatatgcacttagtgcaacaagccgataccaaggatatgttcctagtccaggtgagagtcactggatagttgtaaagaatattctgaagtacttgagaagaactaaggatatgttcctagtctatggaggacaggaagagatcgttgtaaatggttacactgacgcgagcttccaaaccgacaaagatgattttagattgcagtttggatttgtgttctgcctgaatggaggcgctgtgagttggaagagttccaagcaagatacagtggctgattctacaatagaagccgaatacattgccgcttctgaagcaacaaaggaggcttgttggataaagaaattgtttctcaactatgtgtgatgacttgtgcttctaggcctatggaccctctatg

SEQ ID NO: 4034 - DNA, 1459 bp, Oryza sativa
taagtatattaagcttctgtttggtatattctactgcctttaacatcttaacatagagtcgtatcggagtattagccaatacttgctagatctatctgatcggctatgctataaacatatatagtcccgttattaatatatatttcgatctaagtgatttatactatctcggcatggcgaccgatctatcccaatcacttgatttaagtatatatcgatataagaactatatattgttaatatctacagccgatcgacaagatctagttctttattatctagttataactgccgattgatttatatatgacatcggctcaaagataaatgatatgtcatcggcatttagccgatcggctatcgtttataggtttaaccacggtttctttgtctttatttcttgttgattgcaggatcaaattaactggcacgctagcatacccgaaggcgagttttggacctgcattggagttaagcagatttcccaggcctcgtgttttacgtcaacacgcttttgggacgcctggtgggactgattaggagtcagacaagcagttttcttcatggccgagaaaccaccgccatcaccgtcctcggctagcccaggttctgttaaagaaaagattcagaagttaggtttgttagacgttaatgaagggaacatcatgaccatcgatccagaaaagttcacacctgatcaaaagaaagattttgaagagatgatgcagcaagcacgggatcagttcttgaactcattcatgcagacccgcaagggaacacttgttcagaagtataaaataaaggtagttgctgatgatcccgggactagttcttctaaggatgaagaagggaaacaagctccagatggcttggctcaaccaagtgacaaaggtgccacatatggttttccagcaaatcaaggtgacaactctcaaggagtcacggggttcaaggtgatggttctcaggggttcaaggtgatggttctcagggagttcaaggtggaggtgttaatcaagacgacaatgcagcacagttgcagttcaacaactttcaagatcaggttgactatgctgtacaccatgctttgatcaaccaatctggaatattaaccaacactttggcaaacatggtgaagtcaatggttgatggttcaatggccgagtatcaagctacaggaccggtgtacctaccaggaggagtattccctaattatcgaccaataatcactgataatcaaccagtcgtccagttaatccctcttaatgcaccatcggctcagccgacggcaccagtatcggctcatgcacctgctccaacactttcggcttcaggccaagtaattaatccccgattgttggtgagagaacagccacagcacgctagatagaatgtgaatcgctaacgcaagaccaggttgcatctatgttcttacctcctcaacacaccattgatccaat

SEQ ID NO: 4035 - DNA, 8311 bp, Oryza sativa
  unsure (1)..(8311): unsure at all n locations
cgtggtagactaggtaagggtaaggagnatggttaganacaaagtaaaccgatgttttattcagtttacaggattttagatttttctgtctctttctttgaagttcaaattgaaagttagaatgatgctaaaaattttgatgatttttttggtaataacctatgctacccagattccatttctcaaaatttcactcaaaaatttgaaatattttaattctgacaaaaagatgaaaaggggtatgttgagaactaaattgaattttgaggtcaaaactaagggtaaaaattcttgaaaaaatatattaactcttgataagtactctagtatttgaataaattatgaaacatatatccttcagttcaactttaggcacatttagatgtttcttcattttaccaattaggtttctaataaatttagtttgactaccttaactgctttacttgaggtagtaaaaagtttgataaaatcacgaaaccttcatagtggttatcttaggttggctaagtgacaagaggatcttcatggatgtgtgttgcttagatttgttaaatagtctctaggtttatttaacatgcatcaaccaaccaattatgaacggcataaacatcagtcaagccaataaattagacttcactacaaacaaacaagtacacaagcacacaatcactcactagttattaattctactagccagttgctaagcatgatcgggtagattatccaaagagcgaaagattaacgactatactacaacgtttcttaactaccgcttgaccatttaatttggttatatacaaagaggcttggacaaagcttagaagctaaaaagtagaagactccaaacaccagagcttcatggattatctagtattgagtcagcttggtctcttgaaacaatgttcccctcgtggaagggaaaacacaaattagccgagctacgcctcaaaagtgttgctagattttattagcaccaaaacactctctgaacgctggacgagtcatttaaaaaaatagttttcgtttatctaccaaaaaggttgtagggtcattagtctactataatgatcactaaagtttcatattaactcaaaccaatagtttgggaaaatggtttcaatttctatccatcttttttatacacaaattaaccagatgaggtttttgaacccaaatagctttaaaacatccaacttttactaaggacataccccgatttccacctaagttgattaattaaaacttccggatgttacacttttgggctttaatctctatcaattgattaaggtttttccgttattagtaataacacagagcatcttgtcaaattcataactaaatagtcgaagctccattttaacccattcaaattgtagtaaattcattaaaatgtcaagaatccactaaaattggttttttttttgctgtttcagtagctttttagcttgtatttattgtgtgccttgtttgtcatttggcaaaatttgcaacaggacaccaaaaaattgcggcctttgctgtgagacacctgaagatcatgaatcttttcttggaatatcgtaaaaaagtggtaattagatgctggacactcctcccattattttattattcccaatcaaaatggagagagaaagagttatgtaagtaccaaaatgaccttgctctctcttcttttcttttcccgtcttcttcctctcgcttgctactgagccgagcagaggcgcgatgcgcgcagccaacgcggccggcccgagccgggacggctcagccatggcggggcagcggcggtggcacatcgccggggttcactgccaacggcgacgacgcacagcggcatcctggcgcacggcgcggcaatgcacggtggcaccgatctcttggggagctcggcggtggcgcaatggcgactgggccggcacggatacagcggcgcgtgcctcaaatcaatggggccaccgacttcttggctgctaggagtccacgaaggcattctgcgcgcctgaagctgttgtcgcggtgccagtcaatgtcgacatagatgacgcacctgaagctgccgaggaactcgtttatagggagcacgatgtcattgacttagcagaagccattggccttgcacgcggatgcatggtgcatgttgcccgaccaagttgatggcgatgtcgaaggcgccgtcgacgagcacgcaagctgcagcgagctacccacgggcgtaggcgcgcaagtacttccagaggcggtcgaagncggggcaatcatcatcgccactgagtaaaccgatgccgtggtcatcctcccccttctgccgaagcgcggcatcgttgacgtagctctccgggatgaggtcgcggaggcggcgcatgtcaccgagcatgccataaaagccgacgaggctatgcgccatggcgacgcaggtgggcctgggtcgtagtagtagcacacccgccgctgtcgtcggtgcacgttggagaccattccagcatgcgcgacttgccgccatgggcccgcacgcctcccacgcttctcttggtcttgcccgacgatcgctctccgcaccacgcccctcagttcgactcgcccgtccggccgtccttccagctagccactgtacgtgctatctagctgttgcagcacacgcatgagaaagagagaacatgaagaagatgaacagagaaagagaggaagaagaagaacagagaaagatgtagcacttcacctgggagtattccaaggtatcgattttccatagggaaagagtgtgctcagctcttctccatgttcatccaaggacacgaagcaaacatagacaacgagtagagaggatttcctagtgagaaatagtatctacggaaagcttaatttaatcctatagcggtacttcatgcacatgcttgctcgctactaccagaacatgctctattccgtaccccgacaatgaggacttaagtgttcttgagggctgtcaccacctctacacatacctctaactatttgtgggatacacagcaatcactggaaattaatgtttacggtctttaaatcatagtttttgaccatcaatacttgcatataatgaaataaaatatggcatccaacttagtggtagggtttattactaatcattttcactagtgttggtgaaatatgtgtatgcaggtattttgaggagaaaacacatccgtcatgcgacaaaatgcacctttgcacattcaggacgcgtttacacggattggagggcccatatgtcaaccaaaaccacttagaatggagacaaatcaaagtacatgatgttgggggcccaataagctacctaccagccaaaggagaggtcaggaagagggtttttaggttcagtcgaaccaccagttcggccaaacctgtttcgtggccgttgatcaccagattgcacgtttttgcttaaccaaatatatctttaaatgaaaaacacaaaaaagttaaatactagagagggatgttatgcaagttagttttaggaggtcccgctaattatattttcctaggtttagcaagttattaagaacataagaaacgacatgatgcatgattagaaaatagttaattttcatgatgttacaccatgccaactcaggcgagttgtttggttatgcacacatctcgggtgcaacaaccttgtaccttcaaggcgtgatccatttgtacaatgctgtagagtctacgctggccgccactgatcgttgactgcccacagctggcgccgacgtcaacgttgtgccgtgtccgtccttctttacccgccaacactcccggtgtcgccgcgtgtgcgcgccaccatggatacccaatcaggagacgaggccggcgccgttttcttttcccctacgtagccggtgccgtgccttcctcgtcttcctccggcaaattgacccttgtgaaccaacgtccgccgcctataaatagccggtgaaccctccccttttctctattcaaaacagagccgagctacttgagctctctctctcctcccatgtccggccgtcgccgccgacggtcgatctcctccaccatagtgtttctatccttttccttgtgccactatgttggtctccctccggcgaacccattttaccgatctcccctttttttccccttcactttaagccaccaccatcaccacccaaactggccggagctgagctcttagctgcgccgttccagcctcctctctcacttccactgccgaccactaccttccctggatgtgcgccgacggggaacacgttatgttgccggcatcgccgcatttcggccaccagagagccagcgccccgctcgccctctcctctctctctctctcggctgccaaagaaaaggaagagaagaggcaacgggaagaagaagaagaagaagaagaagaagaagaagaagaagaagaagagaaataaaaaggaaaagaaaagaagattccctgacaggtgggtccctgcacagtgacttaactcattttccccatttaattcaaaacccaatctttagaaacccatatctcctaaaccgtagacccgattccagtgaaacttggacctaaattcatttgaatccaaaccctatattttgataccaattttgctattttactatttggacctaaattcatttgaatccaaaccctatattttgataccaaatttgctattttactatttggacctaaattcatttgaatccaaaccctatattttgataccaaatttgctattttactatttggacctaaattcatttgaatccaaaccctatattttgataccaaatttgctattttactattttatttgaaattccttaatgccatttgaatgtatatttgattttcaaatatttcctttttacccaaaaaatacccctttagccagtaaaaagccgccgattggaactttacaccttccatgcatggggacatttgtggtccactaggccccgatgtcgaaccgttggttgtaaagcccggcaaaaccaaacctaaggtcgaagtgttgctcctagcacctcacgcctcgatgcgtataacggagcttcactaatccctcgacctccacggcacgccgcacagttagctctcgggctctatgtgatcctaaccgctctgccgccactcacggttgtcggagtaacacttccgccccgctaaatcagcacaaacctcctatccatctagctgttatgctctctctgttgacaccggctagagaagataccaaatatagtcgttatgctacccaactctagcaacgactagcaaacaaccaaaccctagccaatactagccacatttccgtttaatcagttagactatccgctataccccctactatccatcaaccaaaacctgcacatgaaatataagcgaccctggttgcttaatcccatctagcctccaaccctctagaacctccacataaaatattagcccaataatccctatacccaataaaaatgagatatttatacctcaaacccagcctttctcgctcttcatcgctttcttgccatttcatgatttttattcaatttggttattcctctttcttagtagagtctattatcttttggatggcaactcgtggtatttcgaggatcagataatcaggttgcctatcttagatttatttgcgttggagtaaggcaagttgttattcctctcctttgagcatagatgccctatattctatatctccgatatctcatgcattagtcatacatgatttcgaatgcataacctgaacatagcaaaccagatgtgctagcttttgcttagccctgcctagttagactgcataaaaatataatgaacttatattgggacagtacgtaggagttggttgatctccgggtggctagtactgtctcagtcgatataattgttaccaaatacttatgtcaaatgaacgagtacgaccgcagcttctagaatggggacagacctagttattatgttaattaacaatgtggtacctctgtatagtggttctatttttaagtcctcgcgcagtaggcaaacttatgccgagcagggcaatactgtgatatttaccgaggcgcaggtaaatatatatttgagataaattgtgatcacgtttgtgaaccctgattgcgatgacatggtgtcatacaatcagttctctctaaagacctcgggaacgctagaactcctctcactgctgataacgtcacgttcagagcgcatgaggactcaagttcatggaacaggtgccattattgttagtaacctaatactgggccatgactaagctaatgattattggcaagttatggactgcgggtaaagcatacatctattacagtagagtatttatgaaagtattcaaatagccgtgctaacggatttgagtatcaaggctcatatgtttagaaacttaattccatattttattaaatattgttgcatcaaaaacattgcaggctttctcgctctttattctcagctttctgcaattaaacctagctctactcaaatattaccatttcatacattcattattgaatataatagcttgctgagtacgttgtactcacccttgcttcaacccctttttcagagtccatttgatgtttttgccgaagctgggagttcaatcatataagttagtctcatgtcaacctagttctcaagtctagattagttagatggtttaagtctatagtaaaacatcaacgtcgagtccttctatagcctctgctggattagttagccacaagcttgtaaattcccctattattttatgtaataacgtctcctttggagccttgaccaagtgcatgcgatgaagatccagattgttgaacctgcatcaatctaccaatccagggcttgatacagttaaacatgtcggtttccaaatcattagttttgggacccgacatatggtcaaagtgccttcctccgctacaatctacattgagatggaggagaaatcgacaatcataggtgaccatgccactgccccagatattccaatatatacgtcatgctggcgctaagtacactaaggtatgcgaaagataaaacaaggttcaccattctttttactcaaacttatcactatgtgaatatggcttgatcatatatgttatgctccttatgtccatttttgtatgacttgatttgggtgtattatcgatgtacatccataggctttttaaattaagcatggtgctgttaacgaccaaatttggtaatataagcatcggaaaagaagattatatcgaagtggagtcgaagcggagatcgattcgagaacagagcaagaatcggctggagtccagatcggctacgattaggattggctgggtccgaatcggactaggtaagccgatgcaacggattccgacaatacgacttggtgtacaacatcgggttgagttgatatgcttcaagatgattaccgcacgtggatagagtcctgagaaggcaattgtatctattaattaggatgttttatgtaatttccttagagatatgtttagggcaaaagtctaccgtaaagacttatggtatcttagagtttgttagagataagagtcgtgtccgacatggacatagtttgtaattttcgggtataaatagaccccgaaccccatgtaatcaaagaacacacacgttcaatacaatttcggcgcatcgccatccttttgcttttgttttatttcgacgagttcttgctttcatgttgagctgtatcggtttcgatcttcaacaagaggtaaaacttgttatgacggcttgcgttctcgggattagtgcttccatctttatgatactctaatcttatttatgtaattcgtcgagttaccatatatcttacataatctctagaaatatcgccatctaacccacaatcggctaacatctgttaacagagggcagccgattaagttagatatcgacgttggtttagattatataagatatctaccactctatgaaacttccagcgacttgattgtctagaaattggtcttcttttcatacttaaggctgcatcagttgagtttgatttattaagtcgtgcttagaatatcaatctatagccttgcttcttgttgccgattagggtagtattggagtttcagccgatcttacctgatgtatctataattgctctattatgcttcattgacacgttaaatctgccctttatgtcaagaatttattggatataagtttataaagctttgtttggtatattctacttgcttaacatcttaacatagagtcgtatcggagtatttacccaatacttgc

SEQ ID NO: 4036 - DNA, 2066 bp, Oryza sativa
tcaatatcgatatcgaattaattatctcagtgattggaccaaatctatatacaagttgtcttccagtttatgacacatacaggaatatacttaaggacatagtacctgcaatgatctaattatttcaacaaatatataatttatgtaattatctttttcttggatatatgttttcaattactaggaatcatgtgatacggagaattttgttccaagattagtacaaataaaccctgccctttcatctattttcttcctaacttctccttgcaatataaatattaggcagcaatctaacattctgttgataattttctacatggtatattaattttatctctctactataaccaggtttggcaaactattataattgttgtcaatagcttgactgtttaaaaaaacatgtgaaagattactcagtaattcccgccgcaaagcgcggggtatcacctagttggatataaacaactctacccgttaccgacattttaaggcaattcaactcatgcatatatatagtttttgcaagcaaataagttttgtgaaatcataggttcaatatgcatagacgcttgccttgctgctgtgtgaactcacactcaacctcggagtctttgctgcacgtactccgaattctccgaatctaccgataagaggcaaatatgcaaatatgattcaaataaacatgcatatgcaacatgctctataaatcatggcctaattacagtaggtagagagtatgataaactggttttagaaacaagaatcatctcatttacatttgtggtttgagagatataaaaataacaagccatatacactgaatatggcatatctgtaattacgtaagaactaccctatgtcatataaaaactgacattttctagctagttttaacaagctaccattttcaagtaatggagcataactcactggttgtaacaaaatttggttcaccacatttggagttaaaatatttagttataaattttacaactttaataaaaagaggattacttaatcgttttactttaggaggtagttttgtcaaattatttcttttcagataaaagattacatatttataaggtaaccaaaagtggtttcataattttaggatatagcataaagttcctagagattatacaactcctatgtgcaaaaataagtgtattttatgaaactcacaattttagtgactttttcagtaccgcagttgtaatgttttaatttacaaacataaagactacaaatttatgaacacatagaaatttggttcactcgtaaatgagtaaagatgaattagttatggatttttgaagttttcctagttctcatatatgttttcgattattcttttggactgtacttttgcatgtcgaaccctgggatttctaaaactttcaaccaggtccagcttttctccacaagagcaggaagcagcgacagccatggctgagctcgatctcaagctcgatctcaagctcgccggcggcaaacggcggctctaatgggggcgaggtcaaaagataaaatgtagagcaaaacattgcgattccattcctcaacttttccccagccaatggtgactgcaccgacgcaggcagcagctgcaattggaagcgctcgggacgccatgcatgcgtcgatgcgtcaaggtggacggctcgatctattgcatgcatgtcaagaacatcacatgcaggatgtagaacaccacctaaggttgctactactgcaataaatcgacaaatggctcaccggttgaacgggaatcgacgacggaggcactagatcggagttggagaagacggtggttgatctccctcctcgctgcacggttctgagagattcttggggcgttttggagagaatggtgaggcgaagctggtggcgcagtagctcaaccggattcgcctcgaggcgacgggaacagcggcgcgaacccacagctgcgcgttgacgacggtgtggccgcgctccagagctaccgtggcgaggtcggcgttcccagagatcggctccaagaaacgaggtgagatcagacagagcagaggctaccg

SEQ ID NO: 4037 - DNA, 735 bp, Oryza sativa
agaagattcactgtgtttattactataacagaaatccttaaataatttattgcgcaatattttccagggctgacgtcagcacaggggaagcggcgccgacatgcggggcccaccggtcagcggctcgggagagggaggaaagggcgccggcacgcgggcccactggtcagcggctcgggaggaaaggggcggcggcacccggctcggcttggctcaaggccggccgaccggccgcggcgacggcgacggcgcgcgcgcgaacgcattgccggcgacggcaaccggcggcgaaggcgacggcgcaaaaggcgacgcgaaggcggctgcgctaagtggcggctaggaaggggaggatacggcaaccggcggacgagcttccgggtgccctaaggaaggagaagagagggattagatagagggagatgaaccacggcgaccggtattcacggccgaaagcggcggtagcggttgaactcaccggagcgcgaggggaggcgaatttcggcgacgaaactcgacggggaaggggcggccggggtggagcttagccttgcgaacccgacggcgaagacggcgtggtgcggcggcgaccctagcggcggctaatggcggccggagtagcggaaacagcggcggcaagaggttgcacggcgcgggagcgatgggaggctcgggagaggtcggcgaaatggggaaaaagcgagagggggcgacggagaagattaaattgggaga

SEQ ID NO: 4038 - DNA, 646 bp, Oryza sativa
tttcttgaaataaactcttttttcaaaaaaaaaaacaccgtgtcgggcgacaaacactttgccctattcccgattataaaaataatatcctttcatttccttatgataccccacaaagaacatttatctgatttaggtgtgagtttgtccgattgcaaacgttttacatagacctcacaaccccaaatctttaggaaagacaaactgggacgcttccctgtccatatctcatatggtgtcttatccactgattttgatggaaccctgtttagtgtgaacgcagctgtctctagagcgtaaccccaaaagcttagcggcatatcagtttggctcatcattgatcgcaccatgtacaataatgtacgattcctccgttcagacaccccattccactgaggcgttcctgtcggagtgagttgcggaacaattccacactcctttatatgattgccaaattcaaggctcaagtactcttcaccacgatcagatcatagatacttgattgtcttgcccaaatgattttgtacctcattctgaaattccttgaacttttcaaaggactcagacttatgcctcattaagtagacataaccatatctactaaagtcatcggtaaaggtaataaagtacccaaaatcacctctgg

SEQ ID NO: 4039 - DNA, 522 bp, Oryza sativa
aagttgtagaagccgcggttgagcggcaggtccgtggcccagtagtccttgacccgctcgtagcgcaccgagcgcccggccttgacctcggcaacctgtaagggccgctgcccagcgggatttccaggtgccgcggttgaactcgcggctttcgtaccagtgcttgggcagtaccggcagctggccgagaatcagcggcagctcgcggttgttcttgtgcttgaaggtgaacagcaccgtcagcgggtcttcggcgaccacttcagcgacgtcggcatagtactggcggtacagcggcgcgccgtccttgatcagggcattgaaggtgaacaccacgtcgtcggcgcgcatcgggtggccgtcgtggaagcgtgcctcggggcgcaggtagaagcgcacccagctgttgtccggggctttttcgatcttgccggccaccaggccgtactcggtgaacggctcgtcctggctctggcgcatcagggtgtcgtagatgctgccgatgttctcggccggcacacc

SEQ ID NO: 4040 - DNA, 671 bp, Oryza sativa
gcagcccccgatggaaggcgaggaggagcggtgcccgggggagcccacccccatggacttctcgtggaccacgggctgggagaaggcggccgccgacgacgatgaggcggagtcggcgcccgcgcccgcaccgccggccccttcgccgcaggaggcggcggagtccatgatcctggtgcccgggccacgcgtggttctgtccgggctgatgcggggcgactgccgtgcaggtggttttttccccctttggtttgtgattagatttccagggtgcagatcttgtgcttaggtttctctcaactccgcgtgggggttcttgggatatgagcgtataggatggtcgaattagagtactcgatttggctcgggcagaaaaccctagaaagtatgcttccaaatttgctcttattttttcttgtgtgtgtgcacgtgtgcgtgtggaggaggaaatttaggaggctggatgtgcccagatttgggattttctggtgtgttacctgtgttggtatcaaagttgcaatcccaattttgaggccttcaagtgttgtgctgtgctaggagcttaataaggttctccatgtaacaggaatcagctatgtgtggaatcattcacataatgctctagtttttgtgcgtcgatttaagctctttggagtatatttgaatatttg

SEQ ID NO: 4041 - DNA, 672 bp, Oryza sativa
cacaccaccattgttgggcgtctatgcttccaccactgactggccgcttcgtctatcgccgactggtgtcaccgccttcacggttgcatggtcacaccaccgttgttgggcgtctacgtcttcaacgaccgcccgtctcaccgccgccgactggtgtctcatcctgcacggctggcctattatgtcgtcgttgatgggcgtctacatctccaccgactggacgcttcgtctgtcgccgactggtgtcaccgccttcacggttggatggtcacaccaccgttgttgggcgtctacgtcttcaccgaccggccgcctcaccgccgccgactagtgtgtctgcctgcacggctggcctattatgtcgacgttgttgggcgtctacatctactccgactggccgcttcgtatgtcgcagactggtgtctccgcctttacggttggatggtcacaccaccgttgttgggcgtctacgtcttcaccgccggcttgcctacgccggcgccgactggtgtctccgcctgcactgctggcttattatacacccgttgttgggcttcgttgtattaaccgaccggcagcctcgttcgtcgccgactggtgttttcgcctatacgtttggttggtcacaacaccgttgttgagcgtatacgtcttcaccaccggcttgccttc

SEQ ID NO: 4042 - DNA, 690 bp, Oryza sativa
ttttttgcgcttcaaactatatttatggagtgatatataatttttcattttttttcttgtagttatttgagtgacatgcagacgttcgttccctcgaaagtttgaaatccacctctcctgaatgaaatcaaagatctcacctcgccgtcgtcggtgccttgcctgagcaggtcggcgatgaactcgtacgcgtcgctgccgaacttgacgctgctcactcgtcgtcgccatgatgatccaagtcaaaaatcctccaaatcaagaaacgcgcgggaacggggatacgtacggtgtaagtgtagctcgatcgtacctgtcgtcgccgaaggggatacggtggccgccgccgccgcccgccgccgaggctgaggacgacgacgactcggcgtcggcggccaagcggtcgagccaccggctctcctcgtcgtcggccacgctccacgaggccttgacgttgccatggccaggcaggttgaactcgaacgtccctcccggctgctgctgctgctgctggtggcgctcctcctcacccgccgccgccgccgcgccaccaccaccaccgccacgcgggcggcggcggcgaggagcaggaggccgcgggcgcggctgcgccttgcgccgcggcgagctgccggtcgagccatccactattgcagtcacagctttcttaatttactctgttgcttacta

SEQ ID NO: 4043 - DNA, 1197 bp, Oryza sativa
tcctgcagcccagacggtttatcaatggcgctgagtgaagctgaaagatcaggacggttacaacctctgaaagtctgcaggagagccctggaatttcccatctcttgtttgcagatgatagcctgttgttctttaaatcaaatatggaacagactaatgtggttaagagtgctcttactttgtatgagcaaagcacaagccaactcctgagcccggccaaatgttctttgatgtttggaaagcattgtggggatgctctgcagtctgacatcagatcacttttgcatgttcagcacacttcctttgaagataaatatcttggtctgcctactccgatgggtagactgaaggcaggaagataccaatctttgaaggagagatttgagaaaagattaacggattggaatgagaaatacctctctatgggagggaaggaagttttaattaaatcagtcctacaggctattccgacctacgtgatgagtgtgtttaagcttccagcagggctctgtgaggaatatatgcagctgatccggaaattttggtgggggagaagaccgtcagaaaaggaaagtccattggatctcatggcagcaactgattaaacccaaaggacaagggggaattggtttcagggacttgaagctttttaaccaggctctgctagctcggcaagcatggcggctgatctagtttcccaacagtttgtgtgctcaaattttaaaggcaaaatattaccccaatggggacttgtgtgatactgctttccctattgactcttcagaaacttggaaggggatggtccacgggttagagctgctgaaacaaggtctaatttggcggattggatcaggaagcaaagtcagaatctggagggataactagataccgagagagcataccctaagggttttgggaaaggctgttagatcgagaatcaaatgggtctcggatcttatggttccacatcaacaaatttggaatgaagagctagttcatcgaatcttctatcccctggatgctgaggaaattttgagaatccaattgccacatagccctgaaggacttcattgcttggcactatgataaggtgggtatgttcactgttcgttctgcttacaaattagccctacaggcccaaatcagagctgacgaagaggttgcacaacgctcaaatggcgatggtgataggaagtt

SEQ ID NO: 4044 - DNA, 4220 bp, Oryza sativa
cattaaatatatttaacacaaagtacaaaaatatgatattgcatggacacaataaatcttgataataattaattatatataatcacttcagtatacaatataaagggaaatatacatttaaaaaatatgttaaaaagtatagatttattccattaatttgttgcgggcataaacaactaaaaaataaagtaggtaaataactatcctaatatttagcatttgcaatacacttaagaaattctcctgcaccgctagtagcatgctcgtactaacactacggtgacatttaataatatacgtgcacgttctatttttgcaagcaacatatatgtaacaaatctctacttatatatatctctcttatctactattataaaaattatatatatatctcttctctactattataaaaattgaatatgtttctaaattttggtatgtcatccgtgtttgaatcggctttaattttatatttcggttttaatctctactattatctttacctattaaaaatgttgcagatgattacatactcaactaaattttcgtccgtgcctctctactgacaacacaactaaaataaaccggactatgatgacttgtgttcactactccagtttccccacgtgcacagtaaacatgaaaaacggagcggtccattagtacgtaattaattaagtatttgctattttttaaaaaaaatagaataatttgatttttttaagcaactttcgtatagaaactttttacagaaaatataccatttagtagtttgaaaggcgtgtgcgtgaaaaacgagcaagatgggttgggaaaaagggtttgcaaacacaccccgttcggactcaaaaaagaaaaggccaatcaagaaaacactaatgactctactaatgaaccgtgactaattaacctatcaacactgtaattgaaccaacatatcttataactacctcaaaaatttgtaactttcagttcttcacatcaatttttcgtccgtgagtccaatcgaacgatggcctccgtttccatacacacgagtaactcatcacgtaagatggataaaacacaaattcaaaaatagatacaaaattcaatcagataatccaaaaaaagagaaaaagaacaggaaaaataataaaaaaaagcacaaacctatcttaatttattctaaatgctacctctgttttttaatagatgacggttttttaatagatgatgccgttgactttttctcacatgtttgaccattcgtcttattcaaaaaatttacgtaattataatttattttgttatgagttgttttatcactcatagtactttaagtgtgatttatatcttatacatttgcataaaatttttgaataagacaaatggtcaaacatgtgagaaaaaataaacagcgtcatctattaaaaaacggagggagtatgaaacaataccaacaaattttcggtatttctgaggtgaaagtgtgacattctatcgaagtctccagcactaagtgcacttctatgaaagtaccacatccaaaatgagcatgctaggcttgaatataccaattttccccgttggtaagaacattcccagtagtctgggcatagtcacaaattcagtgcgcctagctatgatgcttttgaaccatcctggacacaatacgatcaagcacattttgaactatgcaagaaggcaataaacaccatttatcacctacaattagaatcctgtctataggtgctatgaaggtgaagcaaaccagctccttcacctacaattagaacaagatattagtaagaaagaaaaatcttgagtaccaggaataaatttaaacaagaaaaccaagactaaggcttaattacatgtcaaatttattctaaattgaagggactctgcagctgaaatctaatatcagtaaaattacttatccttgccaatcattgcctaaaataatccaatcttctttattgcatttctatgtcaagaaaacaacaacaaaaaaatcacttgaaggcatctccaaccctccttcacaatttactgataagggcacatctttgagaaacataaatattacagatatgttagttgctaacttaagacaccacagctcaagttttgggatctccggagtaatttatgctgtctcttggaatgaacatccgaggtagataaataagctctttacatgatataagaagcaacaagaaactgaataatacctggatataattgtgtttccgaaaaacctacccatctcttcagcctgaatgaaaagcatgaatttgatgatgattactaatgtaattttatgaactttgtccatgttgtatctaaataaacaaaaataaaaaacagtattaagtggtggttagtctctaccaccaccatgggatcttttgtaacacattatttgaatattgagagaggagagttttttagtctaaactccagcatagaccaaaggttttcatactaaaatccagcatgaatccatgttgttgtctaaaaataaacatattaggtttatctaaaaaccaattctattcaaagcaatacaattagacaggcatatatacgcctcatcccattgcacgaaatcacattcagcagtatcatttaaaaaaatccgatcataaactcatgtttttttggtagtaaggataacctgacctgatcagtcagctaccttgtggagcagatgactactgctcttggtctccctggcttcgatgacatatccaaatattgcttcatcatgaggcaatagctacagaaatgaatgacggtgcaataaacacaaataagtaccaataattctgcataacatatttggggtgctacagacatatcaaagcagtattcaactactgacagattcaaaactcacgcatatgctcagctctgccaatcagggcaatctgaattatatttgctaaaacctcaacacaagtgagaccacatgattgcatgaatccttacatccaagtaaaggaaatgcagtactaacatttacgatttcagccgctaagttattatactgtaaagcttactaatcagtaactaaagaatgcacagttaatcatccctgaacagagccaagtgcatcttaaacagcagatgcgcacgtatcatcgagctaagatcctgcatatgtcaaaattaaccaaaatccacaccgcctagtttcgaactaagcaatagggaagattttgtagactgatgcaagcaaatcccaattcacaagtaaataacagtaaacttcaattttttgatcatgcactcaacatttgctacaggtggctacatcgatcttaaagtaacatcatgaagaatttaattattgtgctaacaagtagcatcttatttgggatgtaattgcactcctgccggatccaatgcacgacgtccagccattaatcctttgcaaagcccaaacaagcaagcatcaggcaggaatctagaggcagaccattagcaacaagaacagcaaagcagtgaggaaggaggggtgctagtgaatagtgatacattgttccaggaggcctccgagtcgtagtgccggacgagcttggagtggccggtgcctttttctgctggtgtgcctacgcgcgcaactatttcgataatggcttggccttcctcatctcggtcgacagcggcggtgcgggattcttgaggaggccggcgaagacgtcgacgacgaacgaagagatggaaacgcgtcacgtcgcgcatcgatggcgaggagtcacggtggcggcgtgatccttggcggcacgagagagtcatcggcggcgtcgcgacctgacggtggtcggcggagcagtggagggggcgcggggccgatgcgcggtcaggggcggatgggtgcgcagaggcagatccgcagatggaggcacggtgcgcagagaatccttgagggcgagggggtggcgtgattgacagagaagtgggggatggggtccatacggaggttgagggggtgcgtggtataatgtgatccgttggattggatgattctggccgttggatttgatgaatgagtaatgtaggtgtaagagtgggttggtgaattatagggtagatgaatagcatgatgatagtgatcagcctttttttcatttctcctgtagtcctgttgagctcgacattgctgtcatcagtccaacttctctgtactttttttttatgctttactgtcggcattaagctaccatagtcct

SEQ ID NO: 4045 - DNA, 2429 bp, Oryza sativa
ttaaggtgatttatacgtgcatatgctctgcgtcccaaaatcaaaatttatctcaaaatataataacttatttatctatattttctttttttttttgactgaagaaggtagagcacgcctccaccttgcaatcatttcattaatagaaatgaggttttcaggttacaagttagaggttatagttaacctagaacagaaagggaaaaaaacgataaggaagaagagaagaaacaaaaacaaaaagaaaagagaactggggggggggggggtggatttacaaagatataaacaagggttcttatatgtggtactggtacaccaggattgaattttctgcctgtttgatttattggttctcatgctccaaagatcaagggtgtctcagacttgttgtgtgatgtgctgtaggttgtcaagctgaccttcaaacactctgttgttgcgggatttccatagcgtgtaggtgcaagcagcgaaccaaattggttctattccttttgaagaccgattgctatctatgattgcttgaagaaaagccgagcttgattctaagttgttggccaactgcagtaagtttagttttttcatctatattttcttacgacctttcatcatttaagtttcatatctatcttattttctcaaccaatcgtaacatttcctcatttagtttcatcaactttctactcgtgtccaattctaaaacttcttatatcacggacacattagtactttgcctttgcaaattgcacggttgtaacgtactccctttgtccaaaaaaaacccaacctcgtactagatcccatccttcgtcctatatcccaacctcgtactagatcccatccttcgtactatatcccatcctagtatgaggttgggtttttttggatggaactacgatgcgtcccatcctagtacgaggttagtttttttttttttttggatggaaggggtacgtgtttgttggtgccttggtgggtccaaaaaataataagacgcccctgggaaacatttttcaggcgcataacggtgtaacatgaggcaagaaggccagcttgctctgcatctctcagggcaatgtcactgcagaaaaatataccaacggatgtgggcatgtggcattctagacttgtactattattgttttccccagctgacaaccatatatcaggtcgttcgaacagctaatgcatagtatacacaatataagactaaaatgtactccatatctcagttcgcatttcatgtcaacaatcatagtcattaacatcaggtacctactgcataagtgcaaatgcagacttgagaatgtagaccatttcatacaagtaacattacagcaaacatcagcgatgctatctcatattagtatcaaagcagaccatgaatacaaagctgttgacttagcagttatatccgtgcaacaaaaatcacagcgagaccagaaggaccagacaaatccaccttcctgatcatctcttcttaaaaccatatttcttgcgctcatagaagagatcggtcttggcgcttccaaggttgacaatcttaggacatccatctcggtccttttcttgctgagtgcactccttgcagtagtaagcatctgagatgccaacccctccacagataacacaccttccctggaaggatccatagttgcactcatcacagacccgaacaagcgtacacgggcgcacgtaggagtcacagatgacacacttgccatcacatttctcacataaacgaccaatcgcaatgccaggctgcttcctgcacatgatgagatcaggatgatgctttgccatggctgtcaaatgctaacctgcagaaccataacagagtgcaaatatagattaatgctggtaataagtcagtcaggaataacaagcaatactgactacagactttcaagtgtataatttaataggcacatcaatcaaacagcacaatttctaaaaaaaaaaaaaaattcaagacacatggttgaacaaatgggttactgacttactggtactgctagaccacaaaggaaaatacatccatattgctattcagctattggtttaaagactcttatgatctctgcatgtaataccccaagagattacggactttccagtggaaaatttaacatgcacatcaattgatcggaacaatttaaagaaaaaaaatcaagacgcatggttgagcaaatgggttactaactcatggctcccatcggttgcccatttggccaaaatggcttatttggcttattagaaaattaaaattaatttataagtaaaacttttgtagatttgttcgtagcgacttaaaagccaacattaacaaaaattacgttaaaagcatttcaaaatcaacttcaaaatcaagttcaaaaattcaaattttagcttattctttggctgtttaggccaaacgatggggc

SEQ ID NO: 4046 - DNA, 513 bp, Oryza sativa
gagggttattatctgcctataattttctacagaaaaaaaacaacaaaaataaattctagctagccggcggcctaaagctcatcgtgatcgtcgtcgccgccgccgtcgccatctcgccgtgagccgccggacctctggtacaccgccgacatgaccgggttgcacaggtcctccagctcccggagcttctcctcgtactcctccttgccgacgtcctggttgccgtcgagccactcgtacgcctccatcaccgccgcctccaccttctccttctcgccgccgtccatggcgcccgccatctcgccgcccaccacggcgttcttgacgccgtagacgtaggcttccaggctgttccgggcgccggcgcgctccctgtggcggcggtcctcgtcggcgaactcctccgcctcgcccagcatccggtcgatctcctcccggctggtcttgcggtcgtcgccggagatggtgatcctctccgacctgccggtggccctgtcggcggcgctcacgctg

SEQ ID NO: 4047 - DNA, 1039 bp, Oryza sativa
agcctagggtagggacacatggatgatttttttttaaaccacccttgcaatgtcattctgcaaaatgtaaagtcgtacaagacaagaaaaatcaccagtagtctttgcatgaacattttccatccttgaagtgatgaaatcggttcgtatctctaatatatatctccctcccctcgaaagatgatatgaacttcattgcttcatggcagtcaccacaaatccggagattctttatcacctgaatcaaatatcccttgcatctcagcatcctcacttcaccatccttcaccatcctcacttcattgcttctcagttattgcagccatcatggggtttgaactatcgccagccaacaacatgtgtaccttgttcttgatctctatccaactacagcctttttctttcttcaaccctacagtcttcatcatatccctcagcctattgaccccatcccacattttcttgtatgcataaatgttggaaagcaggacataattactagcattttctggctatagttgaaatagattttctgctgcaacctcagcaaggaccacatttccatgaaccctgcaagggcccagcaatgacccccaaatacaaccgtctggctcaaacggcatctgatttatgatatcatacgcatcatcaagcttaccagcccgaccaagcagagtaaccatacatgagtagtgctccatcctcggagaaattccatgcttgtgctgcatttcattaaagtaactacgcccctcctctgtccagccagcttggctgcaggcaccaaggacacaagtgaaggtgactaggtcaggcttctcttcggaacttccgcacagcattctcagcctctccatgcatagcatagccaccaatcattgcattccatgaaaccacattcctagatggcattgcttcaaagatcatccttgcatccctgaccctgccacacttagcgtacatgtccaccaaagaactcacataaagatctttctttccatgtacttgtttgtaaagtggctccattgtccatgaagtt

SEQ ID NO: 4048 - DNA, 5686 bp, Oryza sativa
ctatttacttgtgaaaaaggggtcatgtctctcgattcacaagtctcagattctcataggtgtaatatggcatacatggtaaaccagctttcaccgttaacttaaaacttattccctccatctcaaagtgaacttaatttgggacggagatagcagtacctctgaagtgtgcagccatatcagcattataatcccgaagtcctgccttttcgcggttcgatccatcgctaacatacaacgatttgtaatggtttataccaatgaaatcggcactcccacggatcaactcagattgttcttttgtgaaggatggaatccgggaaccggcttgcttcttcatgatttcagggtagtctccatacaccaaggggtccagtatcctaatcaggaatggtcaatttcaagtctcctcatcatctcattgcatataatcccccccaccccccaaaaaaaaaatctcattgcatatataacttttgtatgaaaaatctcatcgtatatataattgtatatggtcaatttttctttttaaacaaatttaagaagtaaaagaacgtaaaagaaacggatcactcaccaaccaatcgtgaagtccaatactctctgaactgcgtcaatgtctgcacagctgcgggagagcggatagggccagaagctgtagatgttcgtgccaacgacgcccttctgcttagcctgcaatcgttgacgcatgttggtaacaatagagcaatctgcacagatcttttcgagctatctttcagttctgaaaatctgaacagagttcagctgtgcgttcaggtcttcaaattccctaaattttaagtagcaaaaagtccaaatatccttctaaattttggatggaagttcatgtaatcatgagctttaaaatcggacatacaacctcttaaactttacataccgttcatattaccttctaacatggttttagatagtggttttgcatatttgggatcttaaaccagtggctttaaataactaatataatatatgtatcgtcaattgcaggttgtcaatttatacagtgatgtcatactattgttacgctggtacttttcttctaaatacgagcaaacaagaggtaaaagaaaagatttaagtgaaaattttaacatatgtgcaatgcgtatgttacatgataaaaactcagccaacttatatgcaaattaaataaaaacgactttataaaaccaacttagagggcattgaatggtattgtaaactttaaaagttgaatgtccaatttaaaacttcgggatgctagatagattttcaatcaaaatttaggagggttatttggacgtttttctttcaggtatagcggtaggatgtgtttcaggcaagtgatatctaaatttataaatttagtaaaatgaatgctcagatttggcaaaaaaaaatagctgttcaaaatttagcattttgaaaagttggtttaaattcagtagaaatttattcaaatttcaaaatttttccatcgtaagttccaaaattcagaaaatttcggtcccccatgaatgttcttaattacattccgaaatgtttttgctcactcgttcactcacctggtacttgtcccagtacagcctgacagcggaggcatgagccaagatggagttgtgtgcggcgaagtacggctccacggtggagtcgccggcggcgcagctggtcccgaacggcggcgagcagcggcacggcgggatgacaccgctgtcgtagccggcgatggacagcacgttgggctcgcccacggtggtccagtgcctcaccaggtcgccgaactccctgaagcacacgtccgcatacgccgtgaaatcctcactgcacaatttttttttctccaagttattacaatttcagagcctcagctcatcagagctgggtggtgatcatcatcggggggttgatcaaagatcgaagtgtatatcttacatgatccttgggctgagccagccattgtactcatcttgaagagcttgagggaaatcgaggtggtagagagtcacatgtatctcaatccccatagaacaatcacaaatttctcctttcttagggattgcgcaaaagatttgtgcaccttagagtttagcaggaaaccaccaagaatggattgagtgatatataaatatacgatattattctgtcgaacttttgaaattttatctatcaacaattctcgaaatattaagattgaaaaaaaaataaaagttgtatgcgtagatttttctttataagcactttagaatattataattttgttacaaattattcttatattctaatagaaaaatagatgtcaaagttacatactaaagacccaataaaatcaacaaagtctatatttaaatatggagctattacaatgtttcactaacaattttgctatatatttatcgacaaattttcccccaaaaatttgacagatgtaattacagcacaatcgtagtgtaattacactgtaactataatgtaaattgtatgtaactttcaaaaatctctccataacatgttatttcggtaaaatggaggttgtgggaacaaattctttcacatatatgtgtgctgtaattttttttgttcctcaccaaaacaaatcttgtaatagatctagcgattcaaaattacgtgaaacttacatataagttacactgtagttacatgcaaattacagtgtaattacactacgattgtactataattacatctgtcaaatttttaggagaaaatttgtcgacaaatatataggtggtcccttcactaacagctttaaaaaaacttcaagggcaccataatttctgaagaaaattggggagataatttgaattaaaaaataatttttgagcatactattccgttgttaatttatatgaactgaaaaaattatatatggtaaagatatgttgaagaaaaatcaagtaaaccagaaaattctgttttttctcttatgatcataaacagagggacttaaatcctaaaatccagtctgatatcacaaaaatcctagaaatacagcactatctgttcagagttaccccttttgactagcttatctatcaggtcattgtagtactcgagtcctttaggattgatgggtcctcttcctcctgtgtgatcatagaaaccatagattaaaagttaaaattacttaacagtaagggccagacgcatttttttgcaagttccccaagttaattgcggttagtatatattttcttactcggaataagcctagaccaagagatggagaacctgtaggcctccaatccagtatcactcatcaacttaacatcctcctgaaaaattcagatatatacttccaattagtatatattttgattagtactgcttggcaaaatttatttcaagcatacgattccgttgttacttctggctggtctctccatctttttaaatgtgcattaagcatatgtgagtgtgttgtaggcgctttgtgtgggtttaatgttaaaaacaaatatgcgagccattatcttattgaaaaagaaagagtcgattgatatccatatccaatactgctaggtaactacgcatctgattgggtcagagaattcatcaaatcccagaacaaacacacggcatttaaaattacaaactactccttccgtcttaaagtatattgttctagtattgaattagacataatcaacccctctatccagatttacccgtgccaaccaaattaaaacctaacaacattttgagcttatcgattgtgcatcaatgtgatgtgctgtacactgtgcatgccttctgcctaccttgtatttgtggtatccggcggcagcccgatcaccagtgctattgtccgccatcctccctgcaaatatcacaaccagatggtcggaaaatctcaaagatcgatgtagcgcactccctatgattccaaatagaggaggttttaggcttgtacataacaattaagaaaattgactcaaattatagttgccctaaattttaactaataggaaatgtaaaccattggcttgtgcgaggagaagcatttatttgagaagggtaaacatgaaagaaaatatgataaaaaaataactaaaagttctaaaacaacatagggaacctttgaaatggaggattgacaaaggattttggaggattcaattttcttaggatcctgtaggccactttgattcatatatatgaagaaagtatgaaattttgcatagaattgcattcctacaatcaattccatatgaaaataagtaagagaacaaaactcttgaaaactttactttggcttaattctttctttgatacttcgatgccttcgttttttctgttctcacgtttttcatatcttatgtttcaaagtgacctcatgctcaaaacgactttgaggagctacaattacctttatgtttgggaccatagaaaatataaactttctgttggacacatatatgaattttcttgatcatgtaacttactctcccatcccataaaagacagacctattacgggatacgacacattctaatagagtctatcattcgtattactaacatgtgccacatgccatattagatttgtttttttatgggagagaagagtagagattagtagctaggtagcttgatcatatatgcatggatgcaggtcctctgcagtactggatctcaattgtatatgcattcgctacatgaacttacaagtagtgatttaattagtaataatggatgaaattaagatcgattacctgaatgagtaaaagtgtcccagatgcttggggtccttccgtcttcaccggtagccccctcatactgtaataaaaaaaataggaagcaaaaactacatacatttatgcacagctaattaagaaccaaggctccaagcaataaaaacttttttttttttttacaaaaactcaatggttgactgatccaaagtcatgtacaattaaaacgatgagtatatccgcggtctcagaaaatcaattaatggcatatatagttatacactacgtacagtccgtctaaatctggattgggattcgatgacattgcgccggtgacattccccgtgacattgagtcactgacgtgtgggacccacgtggatccagacacatgtgggtcccacatgtcagtgactcaatgtcacgggggaatgttattgaatctgcgtccctaaatcctatatatatatgtaaatatatcatatatgaaaattaattaagcttcgtcatgttaatgtgtatactccctaattaacatacctggtaagcagatgtgccggcgccgaagacccccggggaaatcctgcctcgtgaagttgagagctgcctccgccgtcgcctcgccggcgacgagcaagagaagcagcagcagcagcagcagcaggagagagacgagcgaggaggtgcaggcagccatggcaaaggtatagtattaattacctcctctcactggtggagaaactatctttcgtcggccggccgatttccacaatagtcccgcatacaataaaaaccggggctaaagatgatctttagtcccggtttaaaagggtaacggacatatttgatctttagtcctggttggtaacaccaaccgggactaaagatcatctttagtcccggttcgaatgctgtcagggcatgtatatatgtcttcttcctcctccagctgcccgag

SEQ ID NO: 4049 - DNA, 1528 bp, Oryza sativa
ggtgggggggggggaactgaaatttggagattgtttgtattttgttctttttttgtgtgtgtgtgagagagatgtttgagtttgcttctgatggttcagcagcattggtggctttgttcacaacgtcttctctggcaagtccaagcagcacggcgaggagccgtctcatgtcgaggtaatctttgcttctgaattttctgcacatgatttccttgttaatttttggtctgccatgccttctatcttgtgttagtttcggggtaaatagccatatcatcaaacattacatgtgctgtttgatattcaaattttcattttgttctgttcttgatgtttgttcagagtgacaaggagttcagtaacagtaagctccctcctcatgacgacatgtaggagaatggtactgcaacaagtacttggggtggtatgatatgtgcataactctaaattgtttcttctcaaaagttcattcaaaatttatttatttatttatttgtcactctgatctgtctctgcattttcatgtcttgctcttccgatttacagtgttgatccgtggtgtcaactgtcaactgctcagcaggaagttggaaggaagcctatctactaaagcaagaaggttaacttgcataagcctgaaggtttaggaggatcatgctgtcaagctgaataattgtagcagtctagttcatgtcttagcttcctctaattatcacaatctggaacgagtgaaacttgcacaatcatatcactgtgatatttcaatttgcttgctactaaattgatgtgggtttttattcaggcatgattagaagacagtactagcatttcacaggattttaactacaataagtatctgattattttcagctcagctgtaaagagtcatcacaacatgaacatgattatctaccactgaggaacatataaccaaataacccatcagtaaaaaccagactgtgagcaatggctaactattaggaaaccagaaaagagagttttttttttaaataagagaaagataacaactgaatatcatgcactgctgacaagctcactgataataagcgtgttcatgttcatcgggactaaccattttttctatgtttattccaatttcactcctcaagaacttggagtaccactgagcagagagctttggctgccttggcaaactggggtcctcaaaatcgacatggtgcaggccgaatggcgaatgatatcctgcgaacagctcgaacacatccaggaatgaccacacaaagtaacccttcacattggctccattcctgcatcagcatatgcacaaacacccatatatatgttcagataaaatccagtgttcttttaaagtttctgaaaggaacataacttaccttagtgcagctaatgtgccgcccatgtagctactcaagtactccactctttcggtgtcattcagtgaatcctccttatcgaactgcccgaaacctaaaatttggtaaatagataaacactgtttttagaagataatttaaatcagtaaaga

SEQ ID NO: 4050 - DNA, 696 bp, Oryza sativa
gatcccccgtcagctacaaaatcttgtacaggaatatatggatgcggatcctatacctagcgtctaacattccacaggctattgaaaagcttgccccaacagatatagaggctccttaagggacttcagatccaaagaatgaccgaattgaacatctgctcatatatgacaaaacagctgatcttgatatatgcttgccaagagtgaatgccaagtgctctaaggaaacaacaagcagttgtagataagagtggagcatggaaaaggtatcacagtgccatacaacatgtgccatctaagcacaggatggcatccttttcatgatggaataagttcacgcagatcgtgaccatatgatcatactctttgtgcacaggaactgataggtcaccaggcttgtggaaatgaaccgtaaaaggatacctgtttactctcatcttatgcccaactgcttctcatgcttgtggtatcaaattcaagtacccctggatcacagacacacaggtatactttagaataaatcaacactctagagacacacaaacattatcggccactagtcccacccacacatggcattactctcagcaacagcgacaatgcacacccattcacccaggcatgcccactgccaagtgccaacctatattcctaagatggacacctgttgctgcgatttttgccatcattgcaaca

SEQ ID NO: 4051 - DNA, 587 bp, Oryza sativa
taattgagttgtattgggagttggctacttacaaaatatgctgaacattccattaatactgctgtgatgactagcagcagattcagaactttggagatcctttttatcttgctatccgtgaaggtgagactttagcagaagtaaaggagcgcatacagaaaaaactccaagtccctgatgaggaattctgcaaggtgatccatctgttgaaggtttctttattgaaaaaaaaggtccggcttggggggggaaaaaaaaatttttaaattttgggaaaccccaaaaatttggggggctttggcttgctctttatacttgtccaccttgggattatgctgatatataagtcagattcagagttttgaagtataccagtctagtggtttcttttactgtagggagctgagagttctcatattatactgcagtctaaaattccctcactaattctcaaaaacagtggccatttatgatacacttagactgtcgtgctcattatctcttatagaatggttagccatgtgtgttacgtgagccaaatctaatctatgtgggtgaaagaaaagaaataaactaacatgtatatt

SEQ ID NO: 4052 - DNA, 512 bp, Oryza sativa
gccttagcattctggggttcacaaagaaatttctcttgctttcattcacccccttctaatcttcggctatcatattttagatgcttgcctaattttgggttttcatgctcacgtaccattatagtgggtctaccttaaaaatgatgaagccacttgccttatctatgttaattttgtttactgcaagttgtgcactttcggttattggttaaaccaaaagatgatgacttttctttggaattgcgagtgacttcaaatactattggattcaaactgatataatatcttgttatctagcgtgtttgtagaacggttaatactttcccattctttcatgtcaaaacttcatacctataatgatggttgttagagagttgcccgtcagcttggtgaagatgattcagcggaaattcacctaacatcccataactgctattagcagcagactaaaccgcaacctatcagatattggcgagtggagcatcttttggacatgctcatttattataatc

SEQ ID NO: 4053 - DNA, 2145 bp, Oryza sativa
gccggcacaagccaaccaattctgctgctgctgcttctgttgatggttctgtatcatgtgagagtcctcggagcataactaatttggccaaattgaccgaaagcacagaaaataacaaacctcatgctactgccagaaagcctgctcaaagatcagtcacaaaaattccttcccaagcatctgccactgcaaagaccgagacaaaaccccttgtgacaaagcagaaaacctcaaacacaaaaccaaaagctccaagagccaaggtagagcaattgcaagacaactcggttgaaatccctcctgctgaaccttctggcccagaggggctcactgttgaacatggtgttgaggatgcaacagggccagaccgggccaccactttggttgcttcgaatgaagttccagtccaaggttgattcgattgcacatttggttatttaatcccttcttgcagtcttgtgaatagtgaggtgtgtgcttcatggaaagttgattcgctcaaagtaccgtggatttgtcatttccggagtagacatcccctttttttcagcttgtcattaagcattccattgtatattgcttgaaaatttgttcatgttaaaattttatttcttgtgtatattggagttatatgtcaatgggcaggctaggactgttgcagaacatcaatgcaacttgtgaattattttgtgttataagttgattctccttggtccttgcccagtatatccttcttcacctgttgcaggcttgcagcagttggtttccaaatgtccaatgctgtctgtttaaattgggagttaaaagatacatgaatcattagtctagaatttgccttcagattctgcttgccttgtatggttgtaggggattgctatgttgagtatgttctgaaattctactgaataccaaatctgagactaccatagatccgatagagcgaaatggctagaaaagaatctgagactaccatagatccgatagagcggaatggctagaaaagaagtggagtttatatttagtttccaacttgtaagtttagcttcaagagctaggtaagagctaggtctgaagtaaagttgtaggtctgaagtaaagttgtagagtaatctaaacctaactccatctttcaagtttattttataagaacacttcagctagctccattcctattttgcttgtccaattctcctcacctggtttctctcgaattctcaatctaagtactagctccattcctattttgcttgtccaattctcctcacctggtttctctcgaattctcaatctaagtactagctccattcctattttgtttgtccaattctcctcacctggtttctctcgaattctcaatctaagtagtgtaattatattgtaacttgtatataacttttaataattgttgaattgttaaatttgtttcaagatttatacgagcaagaaatgaaaaaatcatagcgttcgtataggtgagagaagatccaaatgaaaactcaaaggtatgtataggatgaagtaaaatttaggggtatagaagaaattgtgaaacttttcaagggtatgtagagaattttctctataatataagttatgagtacaatgtaattagttgcattacaattgtattattttttttaaaaaataacaacaatatatagcttatcacacacctttgaattggagatgcgctaatctagcgatggcgtaaaccaaataggaggcggggaattatcttgccatggatggtggagtggccacatgtcccgcagcttcgtcaacctcccgcggtagttgctcccgccgaactcccacagagcaaggtccagccgcttccacgacggcgggttcgcgtggtcgccgtcgccgtcgctttcgtcggtgaggtaggcgcagttgccgcgaaacatggggtagtcctccacgcggaggcaggcggcgccggcgtggccgacgaacagcgcgaggtcgccccccacgccgccgggcaggctcacctgctcgtagaagtagaggtcgagaggcctgagcatgacgacgtacatctccgtcgtgctcgcgtcgtcgtcgctccccgacctgcgccacctccgctccacgacgaggaattcgaggccgccggcgacgtgctgcgggtgcttcggc

SEQ ID NO: 4054 - DNA, 713 bp, Oryza sativa
aagttcctccagttaaacaaattgccaagtatccagtgtgaatgatttcagtccccaaaaaccatagtacaaagaagaaaatccacgacagcatgaaattcatgcttcacattagtatgattcaagaaaagacagatagtgaattgtacaacatgctcagctggacgaaagaaaaatgtgatcatataaccttttacctttatcaccgcattgatttctttgtgcgtcaaactttttataataagaacctcatcagctgcaacaaaagcaggacagttagactcctgtttaaaagctcatctagtggtgactactataaaaagtgatctcatgcatctaaaatttattagaagagagcaacttaagtgaagtataataaattcctataagaactagttaagctacaaataaaagttatctggtgttattacacaaatgtccttgtatggaataatatattaacatgtgagaccaattattaatgatgtagtatatatttgtagttaactattgtattaattgactattagattgactataaatgatttagagttagtagttggctatactattaaacttgctcttaggccatcattactccatcactttacaagaaacttgctcttaggccatcattactccatcactttacaaggaacgaccagtgcaacgaacttccatccatacatcacagtggcttttaggtggctcaa

SEQ ID NO: 4055 - DNA, 1466 bp, Oryza sativa
agtgttttcctcgttttccgtcggtggccgatgcctgaagaattcaagagcgaataactgaatatacctcctcaagactcaaagttaagaccctgtttagttcccagaaacttttcgtaaaaacaacacatcgaatttttggacacatgtatagagcattaaatatagataaaaagaaaaactaattgtatagtttgcatggaaatcgcgagacgaatcttttgagcctaattaatccatgattagctataagtgctacagtaacccacatgtgctaataacgatcgacttaattaggctcaaaagattcgtcttgcggttttcaggcgagttatgaaattagttttttcattcgtggccgaaaaccccttccgacattcggtcaaacgtccgatgtgacacctaaaaaattttcatttcaccaactaaacaggccctaagatcatatggtagactagtcttatgatatgtatctgaagttctgaacttctccatcgaaaaaatcgaacaagtttccgagcttcttcttgacagagttctgatttctgaaactctgaagtctgaacgcttatatgaaatgatccaccggtgatgttcctttcagacttgatagttggaagctagctggttgcaaacctgtgtcacacgtagtctgaaactggatgaaaggcaatcacatactcacatactcacacgtagtctgaacttctgatcgattatgcaaaatgaaggtaactggggaagttcatgacagtctgaactctgaaccaaagcaaagtaaatcatgtggaagatggatgatgatatttcatactcacccctacaaatgatcccgcacacaacaggtaaatatgaaccaagaaccgcagatgcacagcaacattcaatcctatatgcagcgtataatatatcaacggtgtgcagataccagaagctacggtagtttactctgcaaaacgattgtaagtatcccctccggttttttagatggcgtctttgacttttgaacatttttcttactaaaaaattacataaatatcacttatttagttgtgtttcggtttatgagtaaacacactttaagcatgacatatttttttcctgtttgcactttttttttagtttggatgaatggtcaaacatatgtcgagaaatcatcggcatcatctattaaaaaccggagtaaagtaccttttatcccaaaaaaataagtggtagtctactttcatcgcagtttcagatttcaggagaaggggagggtcaaaaaatagacaacaaccaccttgcctgacggaaagtatttttctatacctaggtgccacacctaggtgccatggcacctagatgtattcatgtaatttaaatagttgcataaaaattcattgaggaacctgatcagtaaccaggcagacagcaagctggtgaagttcagcattctagtttgatttcaccacaacatgcgagct

SEQ ID NO: 4056 - DNA, 2070 bp, Oryza sativa
agaaggggagggtcaaaaaatagacaacaaccaccttgcctgacggaaagtatttttctatacctaggtgccacacctaggtgccatggcacctagatgtattcatgtaatttaaatagttgcataaaaattcattgaggaacctgatcagtaaccaggcagacagcaagctggtgaagttcagcattctagtttgatttcaccacaacatgcgagctagttactacagagcgaaatgaagtactagaaagttagcgtgattctgaaacatgaatacttggctgaaatataggaacatgcacattgactgatggtcagacacataagtacattaatgttatgtatcataaatacataattcaaacttgagaagaatacatattcttagtttcttcagacagcaaagcaatagatcagaattgtagttcagtttcaccagaaagcgtgaaatgcaacacaaattagtcatgattatgaaacatgaatacttttctaacataattgagcgcccctgtacagaaactcatatacatatcataatactagaggactctatcatgagatttcttcactcttaatttctgcagattagtccttttttgtgggagttcttttccttcaatccttgtgtagaaaaacgtcaggaacagcagctgggtcgagctcgtagcagtcatggagctttccacctttctcttttgtcagacaaaacgatggtattcgatgagaaaacctcaggctctctttcacaggaatcttcagtattccccttcgtacatcaggcttgaacacagagatgtaaccatcaactttagtcagataaccaaataatgtgaaagcttcagtggagtcgacgatcttgccaatagcatacttagtaccacgagtgctgcgggaaggaacccacttatttgaccagttcttgtagatggcccagacctcacctatctttggatgaatttgaaccttgcactttgctccaatttgtttggtttctattaaatgggagaatgcacaattttcattaaactttgtttccatgttttggatttcaaatgtaccacagctcacaggtacatcatgctccaaccagagcttctcctacgcttgttgagggcaagcctcaagccaggccaaatccgcgttgaacggttccatctcaactttgcttactagaggactcaagctttctcaatgggggcaaaagaaaatcagctacttcaggctacaaattcaaattgcaaatgaagatattctgaggttagatgtggcacaagaaagcaggttgctgaccgaccttgaacgccgactgagggctgccttgaaggggaaatgtctcgccttggcctctcttgaaagaataagagtgagacaaagagcaagaattcgaaacctcaaggagggtgatgctggcactgcctacttttacatgaagttgagggcaagaagaaggaaggctttaataccaaggcttgagcacaatggcaaagtggccacgacacaaattgacatgcaacagttagcttgcgaatactttgaaacaatcatggggcaggcagaaggtgattcaaagcaatttaacttgcagtccattcagatggctaaaggaaacttggcatcctttgatgaaaacttcactgaagaagaggtctgggcagcaataaaaaatctgccaactgagaagtcgccaggccctgatggatatacttcgctcttctaccaaaaatgctgggctgtaatcaaggatgaccttttggcggccatggggaaattctgcactggaaatagccaaaatcttgaattgttgaattcagcacaaatcacactcattccgaagaaagaagcgccaaccatgttgaaggactatgggccaattagtctcattcatagcttctccaaattggcaacaaaagtaatggcacggcggctggcaacaaggttggatgatctggtaccccacacacaaacggcattcatcaaaggcagatccatacatgaaaatttcatatttgtcaaaggtatggctcaacagttccaccggcaaaaaaaggaagttttactcctgaagct

SEQ ID NO: 4057 - DNA, 3812 bp, Oryza sativa
gaggccaacccgccgaccgacgtgtccacgctgaccgtcgagatgaccgaccagatgtggcgtatgtcgttgccggtgggcgcgaccagggaccacccggtggcgaacccgttcggcccggagagccccagcctggaggcggtggcgctcccggcggcgctcgtcgtggcgtccggcggcgacgtgctctacgaccgcgtggtggactacgcggcgaggttgaaggagatgggcaaggcggtggagctcgccgagttcgagggagagcagcttggcttctcggccgccaaaccatcgagcccagcgatcaaggagtaaatccgagtcctgaaacggtttgtgcaccaaggcatttgaatgctcgtcgtcgaaacaagatttcggcaataataaaaaggggtggctatcaagttaggaaagtggataggtttgaagacaaggaattttatacaggttcaggccttcttattcaagaagtaatacccaactcttgtccggggatgattccgccgagtatgttattgattgcataaactggaaaaaagatcacgccctaagaggcacacagacctctccttatataggggaagatgtccgctttacaaaatacagtccatatcctaacggaatatgggattatagataaaatacaatcgtaactgactaagatcccgagtatttccttgacatacaagtttagaatctaacccgagtcctcatagagatattctatctatatttggtaccgtatatccgactaaattataatgtcatgtagatatggggtatccataatctccacagtagcccccgagaccttcgcagttgacaaaatagccttctcgaaacaaaaaacaataatccgagtgctttaattcaacttgctccagcttgccgagtgctaaaatcaaaaactgcgaagggcgaaaataaaacatggtgcatcgagtagatgcacctaattaggtgtaacccccgactatgtaattagttgaaaaactaaacatgtagtcaagaaccgagtggttttatagcgaagcatgcatggtacttagtaaaatacccagccgactgcttctcaacttgaacatatcaaggataaaaaatacaaaaagggccgagtgataaacactcaaaaggtccaaaaatagacatatttgataggaatccgagtaaaaaactcttaaaatgatccaccaaacatgataaaaaatcatggtaatcaatgagtctaatagcctaggctatgacccttaccataactaaaataagcatataacatgctaaaagaatgactattaataaaccagtcatcttaaatcaacccaaacagcttttgcagactaagaaagcttacaaaaacggtataacacctttctgtcgggcacctttttatgtgcatcataataattccaaagaattattgaatcacgttaaaaaggattttaacagcatctggccacatcatcgtgagcacaaattgccaaagcaaaaagcgcctaagtccctagggatcacaacgggccacgctgattataatattgggctgaagtactgtacaggaccaggcccattagtactcccgataccctaaaaacaccgaagtccaagcgtcacatcgtcttccccgccgaaactctcgccattttccccatttcctgctacagtaccaaactgcgccggccaaactagggttcatcaatccgctccaatccatcttcaaaaaccttacgaaatttctccccgcgtccaccgctccgattccccatccctttccagccgtatctcagaccaaattaaaccatccagttcacattcatggcgaaagaaagagaaagctttgagagtcagtgggcgccctccgatgtgacggaagataatctgaaggagatggtggcgcacggcgttcttccagcgaaggagatcatcgggtggcgaccagcattcggcgaagcattcccaacccccgatacgcatgaaatcgtggtatttgctcatttcttctatggcggtttctcccttccaacctcaagattttttcggggaattctgaatttctatggaatcagcctgcatcatctgaacccaaactccatagttcacatcaccaatttcattcatgcctgcgaagcctttttaggtattaggccacatttcgccttgttccgccgcatcttcttcctcaaaccacagccaaacaagagcaaaccatgtgttgttgggggggctggtttccaactcaggggaaccttaagccaaaaatacttctctatgcccttcaaaacctcaaacaaaggctggcacgcaaactggttttatgttcaaaaccctgagcctgctctccccgagtactcctgtcttcctccagtttatcgggatacttggaactcactgccaatgggagatgaaactgcgcaagtagtggaactgatggagaggatgataaagctaaaagaacaaggccttcaaggagaacagatcacccggcactttatcaagtgtcagttagctccaatcaaagagagatctcgcacagccttcgaatttgacggcaagcacgacccaaaccgtgaagatccagattctcttgacttcaaagtcatgaaggaaaggatgtataagatcttctcaaatgctatcgttgtcagctattcacacttgctgccagtcgtaccgttcaatgcattcaatcctcctccaccggtatgtattcgaacgttccaaccttccttaaaaacatgatttcgtctcttgttaaattgcttgacatttatgctcaggagttcgcattgatgaagttagatcctccaatctcccagcaccaatcacctcgccgccaaactggtcagggaagcggaggaccaagaattcggtctgaaacccaaccaagtgcttctgatccagtcggccagtcagattctcgcaagaggaagctggttctaagtgacgacgaaagcgatgataccggaaagctcagagataaaggagtgaccagaagacctccgaagtcaactaatccgaagaagaagacctctaggcgtcttgtaccaaaaatcagaaagtcttctaggtacaaatcatataacaatcttccttgtattaatactctcccatcatgaaaataacactgatagcaaaacttgtaggaaaccatctgacatagatccttctgagaaagactctgacccgactaacatggaagcggattcctcaaaagaaaccgggctgactgcaaaagatcacccaagtgataatccgcaggccagcgactatgtaaaacccagtgacaaacccacgactgcaagccagtcggccgaagctggagtcggagttaaccaggagcccccgactgcaaaccagtcggatacaaggccaagccaaaagattcccgaggttgaagcttaaacaaacagtcctcccggaaaggatgctggcaatgactcagaaaccagatctcctgtgaagacacaagagtccactcgtccccgaccgggaatcatcacaggtaaacacgctatctgaaatcatttcaatccaacagactttatttgattgcttcatctttattcatgggtacactagggccaatgattggtgatgaagaagagatcctccggatacgagcagctgaggattcgcgccctcccattctggtcaagtggtgggatgacaacatgcaacctcaagggatcgtaataaataagcaaaaagaggacgaagagttatgcctactgaaaaaggcacttggtcaggcaacccgcattgtaaatgtaagctctttggcgcctgatctcaaccatctcgtttgccat

SEQ ID NO: 4058 - DNA, 4301 bp, Oryza sativa
tatccatttgctcatatgaaatacggagtattttacaaggatatgaaaagattgcaacttagaaaaggtataggtaacatttttacaacttgtaaaggtattgtgaaaaatcacagaaaacgccttttggtgcaagcaaaaccggctgcacggaatctcagccgttggatagtcacgtggacggaagcagattggcctttcgggaaggaataagtcgactctaactccctcaatataggtccgatttaatttgtatcctcgactgcaatactagatatgttgatccccaactacttaaaaactggtgtagtttggctttctggactgttttgacagtggttttcattggtcgattggcgtggctagttaacttggtcaaaatagtcgagtcaccatgtggggcccacatgtcaatgtttcctcctctcttaatatggttttaacagttggagtcattatatttgattttgccgttgagggatagatccgatgtatatttaagggactcaatgcagacttattcctttcgggagtactagtacatgcgcttgggcctgggctaagtgcttttcaattgggtattggaccatatttctggcccaataggaataactgccatctcaggctctcggctgcacggcccattgattggggaaatatgggcttcggccatcttttttcgaacacacaaaaatttatcatgtcatactagtaggaaaaggagtacatctgacattcgtcggaaatgggacaaatccaaaaatgtaaaggaaagctagcagcgaaaaaggactagacggcgaacagtactcataataggcttcgtccatcacttttgcaattttgaggtaaatttctcaatccttttgaaacgcaaaataacatgatttaaacgtattgaaatcaaaatattgtatggttgtgtcgtatcgcatgtgcatccgaacgccagactcgttagttctccagaaattcttacaaacaaaagtattgactccagacctcacccttcatatgccgtaaaaatggttttgtttgtaaaaatggcagcaaaattgtagaaaaagagcttcatgcgcgtaagaatgtcagaattgcactctgtatcacccgcttacgcataacgtaagtcgaaagctgagacagagcatcactgatgctggactcaataacttctttggatcactcaagagtctgatctcatcacacgaacattcaaactgtaatctcaaatttccggataaaatcatagctctatagtctatactagtaataagtacggtcatgtaaatttcgttgcaagagccaagaggtgcatggctacatagtttttgttcagtgaagttgttcttctataatactcagaaaagtaccaagtggttcttataaaactttttttttattatgtcccgttctgaaaagtaacactccttccatctttttctcaaaaaaaaaagagaaaaatatctactaagtcttgacagccaaagtcatggtttggcgatcaaggcaacgactaggattaggaagcttcgtgtcaaccgattaattatctaattaattaattagcccatctgcttacttaaacgaaacaaccgtgtttaattaggcactaagcgtaggcacactgaagaagtaaccatgtccgggcacgccgcgccggcgccgcacgtcgtcgaggactatcgcggcgtcatccagctcctcagcgacggcaccgtcgtccgctccgatgccggctccggcgccggcgccctgctgccgccggaggacttccccgacgtgccgggcgtccagtggaaggacctcgtgtacgacgctacgcacgggctcaagctacgcgtgtaccggccgcccaccgccggcgacgccgagaggctgccggtgctcgtctgcttccacggcggcggctactgcctcgggacgttcgagaagcccagcttccactgctgctgccaacgcctcgcgtcggagctccgcgccgtcgtgctctccgccgactaccgcctcggccccgagcaccgcctccccgccgccatcgacgacggcgcggctgtcttgtcatggctgcgtgaccaggccatgtccggaccgggcgccgattcctggctcgccgaatcggccgacttcgcccgcgtgttcgtcgccggcgagtcggccggcggcaacatgagccatcacgtcgcggtgctgatcggctcgggccaactcaccgtcgacccgttgcgcgtcgccgggtacatgctcctcacccccttcttcggcggcgtcgagcgcgcgccgtcggaggcagagccaccggccggcgcgttcttcacgcccgacatgtccgacaagctgtggcgtctgtcgctgccggagggggcgacgagggaccacccggtggcgaacccgttcggaccggacagccccagcctagcggcggtggcgttcccgccggtgctcgtcgtggtggccgggcgcgacatcctccatgaccgcaccgtgcactacgcggcgaggctgaaggagatggagaagccggtggagctcgtcaccttcgaggaggagaagcacctgttcttgtcgctgcagccatggagcgagccagccaacgagttaatccgagtcatgaagcgatttatccacaaagatgaaggttctaataacttctaaatccaagtaaattaagttggatcagtagagatgcatggttggtgttctcatgtggtctgaatctgtgttctgtttcatcttttgtgtaagtgtgcaacttcgattctgtaaaacttggcaagtagatgaacgatgtcatttatatgcgtgtagcttgtcaaaatacaaagtagaaacctgtatctgaataagatggcattcatgaaataatattatcgattgaacgaacgaagcaacagaatgatcttccaaattgaagcaaaggaattgatggacaacgagttgctgtactttggagctgtaaatctgtagtacttctcaacgatgctatggaccgtgggccgtccataatcgctgggtggaatgagcccactgtccatgtgcttctgcatttggcccgtgtacagcccatataatgtcgaaaaacctaatacgcgcgcgccgccggcgcgcgtttcggacccagaacgcctagcgccgctgcgccgacgtgcgcgcgtctccactttttttttcgttttctttccattttctttcctttttttccattttttttatttttttatctttagcatgttttgagtttgaaagtttttaatttttgagttgaaaaatttcaaatctgaacttgaaagttttcaaatctcgagttgaaagtttcaaatctcgattttgaaaattttcaaaattttcaaatcttgatttgaaggttttcgaatctcgagttgaaagttttcaaatctcgagtggaaagttttcaaatcttaaattgaaagttttcaaaattttcaatctggacttgaaagttttcgaatctgagttgaaagttttcaaatcttaagttgaaagttttcaaatctcaagttgaaagttttcaaatttaagttgaaagtttttaaattttgactttaaaatttaaaacttaaatcgaaagttttcaaatctaacttaaaaaattttcaatctgttagtaaaaaaatctccagaatttttctaattactattattagtgttaagtatattaactaatttagttagttaagagtagactaaaggggagagggagtgctcgctgctggtgcgcacgcgccagctagtagcccccatacaatgtagatggcttgtcgtggctgctgtggcgcatgtacccggatgtacctccaagaatcgtactagtagcatttgcgggcaaactataaactcgataaaatattctatcgttatttacacgtgatttaaatagttatgaattttttaaaaaaattatgtatattaaaatgtgatatatcaccctacaaacgtgcaatatcaaaattaatttccatatgtcacaactaaaaaaacaaatttaaatgtatatgttaattagttatagtttaatttgtttttttacaacttgataagtttaaattataacttgtatgtttgtggaatgatatatatcacctgtaaatatatattctcaaaagtatttttaaaattatttaagtgaaatgcaaacgacaaggcgataacctcccgatagtttaaaactcattctttcgtttgcgtgcgtgactctccaagtactccctccgtcttattaaaaatcaatctagtaccggatgtgacacattctagtactatgaatctgaacatacatatgt

SEQ ID NO: 4059 - DNA, 2497 bp, Oryza sativa
caaggaagcttctagatggagatgtgatgagcttgctggaccagaagctgtgtggtgaagcggacttgaaggaggttgagagagtgtgcaagatcggttgctggtgcattcaagaggatgaggttgatcggccgacgatgggtcaagtggtccagattcttgagggtgtcttggactgcgacatgcctccgttgccgaggttgcttcagagaatctttgagaggccgtcttcagttagcaccagcacaccagttttcctttttgtcggtagccctgaacgccaatgagaatacagtatcagtttggaatgtacagtatatctgaatgtctctctctttttcttttttcttttgttttaaggttgttatgtctgaaactttagttcatttttgtagtatgtattgtactatcacaccacataccacaagcagcttataccactgtaatttgatcatcaaagtgtgtatattcctgtattcattttgttttaagaaaaggaaagagattttgcagtcgagaagaaacaatagtacataccacaatatattcttgtattaatgatgcagttgagaaaaaaaaaactagtacctccaattttttaatatatgacgccgttgactttgtacataacgtttgtccattcatcttatttaaaaatttaatataaatatgtaaaagtataagttaatattatagtttctttgatgataaaacaagtcaaaacaaaataaataatatttatatatttgttttaataagacaaatgataaaaatcacgtcaaaagctaactgcgtcgtacattgaaaatcggagttagtataattttggggaaaatttcagagcagtagtttatgctagcacttggattcatttggtacttgttttcaagttccatatctgtgcaggggtcttccggctagctccacaaggtgatgggctagacgacctgggttcaaagcctcaccccttctaattatttgatattaggtccttccctaatattcgagtttttttttaagttccatctctgtgcaattatacaagataacatcacaatttacatccactgctataacacatcacgactttccataaactcatcgtgatctgcatatacaatcttggatccgtgtgtacgtacatgagctaagctaacaacaactctgcatagcacagagctaaaacggatcaaagaggaaaggagaaaacaagaacactggagagagaaagagcatgtgtcatgacttgatctcgccgccggcgacggcggcggcggtgggcgtggctgcaccgacgatggaacggaaggccttggtggtgcaggggatgcagagaatcccccgctgctcgtagccgaactcctgcaccgcgaggtcgagcagcgcgaggaagtgcggctgcttgagctgctccgtgcgcaccaggatcctctccctctcctccccctgcccgccgatcaggatcggcacgtaccctcgcggcgccctctccttcctccccctcgccatcgccatggccgctctctctctctctctctgtttgttcagtcttctcccttgctaagaatgcgatcttgctgtccctgaattatatagtgcttctttctcagaaagagagaattacttagtgtttgattggcattgtgtgtgtggttttgcttttttgaaggaaatgattgatgattggtgctgcattacgtagaaggcatacatgatgagcgtaaaaaaatggtgtgtctggtggaattgcggtctctgtcagatggaatgctttggtctgcagattttgaactttggagtatgtagcatgctaagctaagcactggctgtgttgcagataaggccctgaaattaagtaacccttgatatcttgtgttaactttttttttcctggaaaaatgggcatcttatgttcatagtgaaaggaaattggttcaggccggccagtggctgatttacctgagagatcttgcaatatgaacgtccaaaccaatcgaaatttgcttagaattgattagaatggttaatttgccgcgatcaatatttgaatagatcaattactggtcatgatttggatgtgtatatccttcgtggatatagagaccggattaatgaaaatctattttctaaaaaaaaattactggtcagggacctgattgatgatcagtgaatgagacgaggtcttggctgtgatttctcctcctggctgaatataaattatttaacagacgtggatgagatgtattatccattcttccttagtgtgatgctattaagattcatttgtttgctcgcattattgatagcaaacaagcgtacttcgccggatttgagttttgtttatgctaggtcaacatgatatggcgttgatattttgcatgcatcattgcagcgacttgtatctagtttatactaccccattatatctacttacctagtgctctttttgttgtggggatagagactaagtcaactcagaaagtaaggtttattatta

SEQ ID NO: 4060 - DNA, 1188 bp, Oryza sativa
tggatgacccgattgtgggcctttgccgattcccccccggagttcaccacgccccggggcacggctcggttctgggccccgtttggcgattttagccggcccgggccaccgagggcagggtcgagcacgagcgtgctaattcaagccaagattcttcaaaaggaaacgatggcacagacacggtcctcaggaaatcgaaaatgcttttattgaaatacggaagagaaaagagataagtatatgcatgtggtagcccccggccaaccctgcacgcccgggggggtgcggggttggcccgagcccgagacatgacacccgacccccactaggggtagaagcgacgaagctgtttgatgttccacgggttaggcagctctgtgccgtcgcccgtggccagccgaacgcagcccggccgggggacgccgatcactcgatacggaccctcccacattggtgagagcttactcagtccagcacgcgtttggacgcggcgtaggacgaggtcgtcgacgcagagtgatcgggcccggacgtggcgctgatggtagcgccgcaggctctgctggtagcgcgcggctcggagggccgcgcgccgccttcgctcttccaaatagtcgaggtcgtcttggcgaagctgatcttgatcagcctcgcaataaatggtgacccgaggggacctcagggtgagctcagatgggaggaccgcctccgcgccgtagacgaggaagaaaggcgtttccccggttgctcggcttggcgtggttcggttcgcccagagcaccgctggcagctcctcgatccacgagtcgctgtgcttcttgaggatgttgaaggtcttggttttgaggcccttgaggatttccgcgttggcacgctccacttggccattgcttctggggtgggcgggggaggcgaagcagagcttgatgctcatgtcttcgcagtagtcaccgaagagctcactagtgaactgggtgccgttatccgtaatgatacggttaggcaccccaaaccgagcagtaatgcccctgatgaatttaagcgcggagtgcttatcgatcttgatgaccggataagcctcaggccacttagtgaacttgtcgacagcgacatacagatactcgaacccgcccggggcccgcctgaacggacccaggatatcgagcccccagacagcaaacggctacg

SEQ ID NO: 4061 - DNA, 1767 bp, Oryza sativa
tcttctgcctcagcgagatcccatcgcaccccccccccccccgccattccatgtccggccggtctgaagccgaggagacggcgaccgcggaagcccggaggcgggaagctgaccggcgagaagccgcggaccgcctccgggaagccgaggaggctgcccaggaggccgtccgggttcgccaggctgaggaggccgctcgggaggaggccagactccgccgggccggggagtccgtccgggaggcagaggcggcacgcgcacgccaggcggcctgccaagcccccgacccgactccacccgaggcgacgatgacttccgaggccacccacgacgaggccgcggacgcgccgctcgggcccgacccctcgggcgatgcttgggacgagccagcttcgggggacgcccccgggtccggcacgtcgatcggcgggccgagccgcgcggcacccacaccgaggcggctctcccctctgccttccgctgccccactgagcgcggagcccctcctgcaggccttagccgccgcgaacaccacggtgctggacgggttaagtgcccagatggaggtcctgcaggcagagagggcggagctcgacgcggcgtgggcgcgcgtagaggaggggcggcgctcggtggaggccatggtggaggcgggccgcaaggcacaccgccggcacgcctccgagctcgaggcccgtcgtagggacctggcggagatcgccagggaggtggaggaggagcgggagactgccctcatcgccaccgccgtgctcgacgaggtgcggaacgacctccgcctccaatacgggagccaggcggcggagctagagaagaagctcgacaccgcccggggagtccttgacgccgccgctgcccgggaacggcgggcggcggagatcgaggcggcgtcccggcagcgcgaagaggcccttgaggctcgcgccacggcgctggaggagcgcgcccgcgccctggacgcgaaggagaaggacctggcggaccgcgaggccgccgtcgccacccgggaggcaacactggcggcgcacgaggccgcctgcgccgaagaggagtccgcactccgcctccgcgaggacgcgctcaccgagcgggagcgagctcttgaggaggccgaggccgcggcgcagcggctagcggacagcctgttcctccgcgaagcagcgcgggaggagcaggcgcgccacaatctggaaggcgcccgtgccgagagggccgcactggatcagcgggccgctgagctcgaggcgcgggcgaaggagctggacgcgagagcgcacagcggcggaacggccgcgggcgacggcgacctgccgcccgcctcgcagccgccgaacacaccatcgccgggctgcagggcgcactggactcgttcgccggggaggtcaaggccctccgtttggcgagcgaggtaggacccggcatgcttcgggacgccgtctcccgtctagaccgcgccgggcggcaggcgggcctctggggcgggcggaccgcgaagtacgccgccaaccaggggggcctcgcccagcgcctctcagagatggccgggaccctccagcgactccccgaggagctcgaggagacgatcaagtcatcctcgagggacctcgcccggggggcggtggagctcgtactggcaagctaccaggccagggaccctgacttctccccgtgggcagcgctggacgagttccctcccggaaccgaggacggcgcgcgtgcgcaggtccgggacgccgccgaccacatcgt

SEQ ID NO: 4062 - DNA, 1362 bp, Oryza sativa
ccgggcatagcgttggcaagggaataaagacgccgaggaagggattcgtttccttcctctcgccattcttccccttgccttcgccacttgcgctctaactcttcgtttcctgtgccctacccttgccatactcgctcgctctcaagctcctcctccaccggcgtcatggcacggggctccgcaccgctcgacggtagcgtgctgccgccttcccgcatcgtgagcgagaggcaggccgggctgccgcgccgattcatgccggaatctgccaccggccgggaggtggtcacgctgggcgagggacgcccggcgccacactacccggggcggtccgtcttcttcctctctttcgcaatggcggggctggtcccgccattctctatttttttcatggatattctggagttttatgatctccagatggcgcacctcacccccaacgcgataatgacgttggccatcttcgcgcacctgtgcgagatgtttatcggggtgagcccatctctccggttgttccggtggttcttcaccgtacagccggtgtcgccgccgacggtagtcggtggctgctacttccagccgcgggggcaggtgttgaaccgctacattccctgcgtcctccgcaaaaagtgggacgactggaagagtgattggttctacacccccctcgtcgacgaagcgcgcctccgacttccgagccagcctccggcgcaggcctccagctggcaggcggcggtagatctgggagacggctacgacgccgttcttgaccgcctggtgggtctgcgatcccaggggctcacgggggccatggtgttcggtgactaccttcgccgccggatcgcgccgctccagcggcgtgcccggggcgcctgggagtacactgggcccgaggactacatgaggacccaccaggggcgcaaatgggactgggaccctgaggacttcaggatggtggtccaacgggtgctgaatctcagctccgtggaggcatccctcatcccccaaggggtcctccccctctgctgcgatccagagcgcgccaacatcctgaccatcatgcaggaggtcggggcgtcgggggagcgggccccccgaggccacgttggcgcgggcgggagccgcaggggagaacaatctaccccgggggggggtcgtgcttctgggccccgcgacggggacccgggggggagccgccctgccgacgcccggtggaagaggaagcacgagggtacccctcccccatctcctccccgagggggcggggcggtgcgtgccagcagcaggcgcccggagggtgccgtgccgacgccgcagcccgagggggagcgaaagaagaaacggctccgcaagtatgggggg

SEQ ID NO: 4063 - DNA, 2030 bp, Oryza sativa
cctgcagccccaagcgtactgacaagggcttctcttaacactctcctaaaagatatatgaatagcaagggtgagtaccaaccgtactcaacaagccaccacaacaacaatgcatatgatagagggtatttcaaggaatggcttcaggttcttttgcataaagctaattttacaattcttttcacaagcctaaaacctagcatagactgatcaaattttagtacagtgttcactttaaacaacgacggttctgtccaccatccattgtgatcccaaggatagcttcccgccattgaatcgtcatggttttctgaggatgtccaccttccctcctctcgggaagtggctccatcagcataaaattcatcatgcaatatcccatcccccacaagttaagaatttagagtctagccaagtgtaatacatgtcctggtgctcaataaccgcgagcacggctattcgaatagatttggtttactcacactgcagtggatgtacactttatccgcactccgcgactgcccaacacatgagcctcgtcccaacacatgagacgcgtcacggcaaagcttttcgataacctcgcattggcagtatccgctccatgaacttaaatcctcatgcactctaggcgtccatgtttctagcagtgagaggagttctggcactcctgggaaagagaagtctcacacacatattaaattatggttcaagttaagttctctctctcacacactcatggcattcctaccaatggtgacaccgatgtagggcacgcctctcggccctacctcaccggctgtcccaccgtagcgcacctgcctcactcaggggtgaaccatctatgcagggatactgcctccgctcggctatctaatccgctaggtctatacccatacgagaagtgcggttgtacgggggtcgtttcatgcttaacttcatggctcggtccttaattgaccggggacggtactagccttttccagataccacccaaatcctccgtccaccccagtcgaaaacaattgtttaattttatttctcctttcacaaatcatgtcatcaacatcatggcaatgtggcgctcatgtctccacatgccgcatctcaattaccttcccaaaggtaattgcccaagcatatagcatttgataaatatgagtatgcatgattctagaatagcatttctaagcaattgtcatagttgactagggactcatacgtaaacatggttacaaagatttaagggtaaacaataatcaaggcatggcataatcacaagtgggatgttcatcattgcatgcaattttatttgtaaacaaaacaatttcgcaattgggatcaacatgttcaaggaatagtgatgacttgcctgctcagagtagttcttattcttaatataatcttgatcaaccttcacctcctggaagctgcatacgttgcctcacgactaaccgatacacagtctagaatacgcaagaaaaaccaatattcaagcaacaatcaaatatgcacaaacaaaatatatttgttgaggtcgaacttacagttgctcatattattcgcgcttgctaattgacggagagtgaggctcctcaccgggagaccgcgcaggcccccctttgccggttcggccgggggagctaagtgaggttcttcgccctcaatctgaggaacgtcagcgagaagaatcgcacaacacacgggcgacgtagacaggttcgggccgctgagaagcgtaataccctactcctgtgttctggtggatctgtgtgtaaaggaatacagagagctcgagagcgagagagagttccagctctagcccccctcctccttttttttctcccccttctctcttaggcctgggcctcctttttatctgatcaggggtcaccacatgggcctctagctgcctaagaaaggaaacatgctttttacaatgagggctagtctacagccggaagtgacttctgacaagcagagcacgcgccttctgctccgctcgcccgctttttccgtggacgcccattt

SEQ ID NO: 4064 - DNA, 1450 bp, Oryza sativa
gctgctgacgtggttagagattccaagatgtcgactttcggccgactgggtctgataattccgatgatgaaaaaactgatactgattgatataacaatgattttgatgattaatgatgatggaggcacaatttgtacaatactgatgaatttatgctatgcttggtgttccatacttagcttttgatttcttaaaagcctttgtcaagccttattgagcctaaaacccgtaaaagctattaaaaaccttcagtcctcattgactaagtcgaaagaccaagcagggcaatgataaatcaagtaagcaaattgaattgacaaaaatcacactctattattatcatagtagccccccgactgaaaacttcaaggaaaaacttgaagttagcagtcaaagaggaaagatacaaacgaaatgcctaagcataaaatcgacgaaggtgttcaatattccaagaattgtcgataggtgtaccgtcttcacgctttagtcaataagaacctggccgggtgacttcagagattataaatggcccttcccataaaggagataacttgtgccgatcccgtgtagtttgaattttcctcaaaaccagttctccgactaagaaagctcgtgatcgaacgttgcgattgtgataacggcgcaacccttgcaaataccgagtcgactgaattaaagctgcttcacgagcttcttctagtcggttgatgtcatctactcggccctgttcatagcgctcctcgttgaagttccgaaatcgtagcgattcaaattctacttcactcggcagcattgcttctgcgccataaaccaagaagaacggcgtctggccggtagcctgactgggagtggtgcgcaaagaccaaagtacggacgacagctgttctgcccacttgccagcatagggacgcagtcggtcgaaaactcgtgctttgatcccttgaagtatcatgccattagcacgctcgacttgtccgttactcatggggtgtgccacggaggcgtaacaaattttaatgccaaagttttcacaaaagtctttaaatactccgccggtaaattgagtgccgttatcagtaatgatacgattcggtaccccaaaccgatgtacaatattgatgaagaaatctctagctttgtctgcagtgattgtaacgaccggtttggcttcaatccacttggaaaactaatccacagctacaaagagatgagtataaccgccgactgcctttttgaatggaccgaccatatcaagcccccaaaccgcgaacggccaagacagcgggatggtttgcaactcctgagctggtaagtgagtttgtcaggcaaagaattgacaaccctcgcatgttcgttgtcggtgacatggggccgggggtatcgtgactagaggcttgggcagccgcggtcacccacgtggcttgaccccctcggggggggggggggg

SEQ ID NO: 4065 - DNA, 7290 bp, Oryza sativa
cctgctgcgcggattgcaagaccgtagacggtgagccaggattccgggttggtggtgccgtcatacttctcgattccagtcggcttaaagtcagctggccaattcactcgacgcagatcatttgtgaaggcagcaactccgtccatgtcgtcgtcgtagcggtccggtgaatgatgtcctcttgccgcgcggcgctggttgatggtgtcacgaagatcgatggggcgtcttcgatgtgggaagtgtggtcgttcaactcggcgctccctatgttgttcaggaggcaaacgaacagatcgttcatcatgtcccttgctcttgcgactagatccggcgccggtaatgctgaggcttggttggtgatagtcttgagatcgaagatgagggactcggctaccagtcggggtgcgggtgcttgcggagttggctggaaccgaggcagcgatcatggtcttcgtctggttcaagatgttgacaacatgatcagcttggttgagtgcgtcttccttgaggagggtgtcaaggagagtgattgctgcaaccgcgttctgctggggggtgcgaaaaaccgttgtttcatcgacgtcttgttgcccgatgaggtctctcgctcgtcgcctggattccaaggcgcgttgccgtcgatcttcagcctcctttgcaactcgctcgcgatcttgttgctcacgctgtagtcgttctcgctcttgtcgttgtcgttcttcctccagtcggcgacgttcggtttcttgtcgtgtgcgctcttcctccacttctttggctcggcgttgttcctccgtttcgttgtcagccatgaatacgccgaaaaagagaggcgtgtacttatcctcatagctgtcgtcgaagtcgccgtggtcgtagtggtagccgaagtcgtcgcagtcgaggatctcggttggtcgagaactgacgtcagggaagctaaggtagccatccaactcttccgtcgagactgtcccaagaggttggagtataacgccaacctctctggatctagattggatcggggccgaagccggagttcgcctagatcttcgagtgggagatgtcttggctgtaaagacagcggccaaatcatcaggaagtctcatcaggattgagggataggacccgtcgtcttgatctggtcgcggaggagtagattggatctcgtccgagtggtttgaagccgacccgagagagatgatcttggagtaggcctcggccgagttcggaataccgaacggcgcggggacatggtctctccccgactggttcgaatccgagtcaaggagagagatcttgctgaggttgttggtgatgaagttgaggctatcgaaccggaacgcctgcccgggagggaaggcgaagtcgtcgatgccggagacggaacccatcgtacttagtcagcaaaaacttgatgctgcccctacctggcgcgccaactgtcgaaacaagatttcggcaataataaaaagggggtggctatcaagctaggaaagtggatgggtttgaagacaaggaattttatacaggttcaggccttcttattcaaaaagtaataccctactcctgtccggggatgattccgccgagtatgttattgattgtataaactggaaaaaagatcacgcccccgcacacagacccctccttatataggggaagaggtccgctttacaaaatatagtccatatcctaacggaatatgggattatagatgaaatacaatcgtaaccgactaagatcccgagtatttccttgacatacaagtttagaatctaacccgagtcctcatagagatattctatctatatttggtaccgtatatccgactaaattataatgtcatgtagatatgaggtatccataatctccacactcgtgttattgaatttgcatgtgccatggttgaacccgaaattttcaataaaattaattttactgcttcaaatttatgcctttttggaggtcatatacaaagaggacacagctgacagctggcttgttcaccagttattttcttgtttggacgagaatggtttaaacatttcaatcaaatttattttgaatgctattttctatgtcaatccttttcatgtgacttcatcagcttagaaaaatcatgcctagcgatacaataatggatgctttggatggattggaaaagtacttccttataattgggagtttgtacccataatttgtggacggagtaagtatgcaagtactatcaacatgtaattccatcggtcgtacagtaagtatttgatggtcttatttgtctgtgtctaggataagagttggttaaacatttcaaactttcaccatccattttgtattataaaatctaaaagtttataatattacttctagaggaaaatctactcatacaatctttttttttctttttaaatgcacaagtttgtcataatatgatattacttttgaaggcaaatctacacatacgaaaactatttatggtcaaagtttaagagataatccaagaataccattgacaagcgtcaaatccaaaaaatatcatcgtacaaacgattttgtcccaaaaatgtaatcgttgttagggttccgttcatcctatagcactaagcaatgcagaatggacggaaccctaacggcgataatatttttaagaaaagtcatttgtacgttgacatttcttaaaactcacacttatcaatgatatttattggatttgaatgtttgtcaatggcattttttagattatctcaagttttaaaggtttaactaaatcttacgctaaacgtcaaaatatttacgaatcttgtcaattcttctactaggcgaatataaatggtcatgagtacagacacggaatgaacagaaaccccggaaggccagaacaaagaatttgtaacccagaatttatccaaacaaacatgactatgtaaaacgagatggtattaacgtataattgattgagttttaatcattacaaatttaaaaaatagattaatatgatattttagagcaacttttatatagagagttttagcacgaaacgtaaagtagtttgaaaagcgtgcacggaaatcttaatcttgatctaactcttattggagaaaagaacggacctacgctcccagttgttaattggcatttgtcaatcgatctgaaccacgacagctaacaataacaaatatgaatttggaagtcatatatagagacattttcaaactagtaggccaactgttttctaggctacttttactaaattgataaaaaaagcaatgcaaagtgacgctttacactaaagacctactgaattctactttcagaattatagcaagctgtggtaattttcaggtgtcgttcctggtaaaactgcattataacaaaccagaggcttccctcttgcagctaacttttctcttcgggagaaacacatcagtcagcacagtcttagacttcagggaagcaaggagtatctccagtacctacatttgaacacaaaaatcatcaacagtgccaattaaaaaaaaacaaaaacgactgatttttttttctctttactcaaagtgagagatatgtacacagtagtacagtacagacctcttccttgccaatcttcacggtccgttcctgcagcgcgctcaagtccttgacaccacactgtgcaagtaagctgacgcttgacacactggacgctggagtcattgagagatcatccctgacagtgtatgtggctgtcccaaccacaaatccaacggttttgacatgtggaattgccctgtgcatttgagtggagcagacagggcatacagcgcctttgctaacagaaaaatatccacaaggaactttagtggtactgtagcttacgacggtcgatttcccttcacatgtgaagaagctggcattgacatttaactttgcatccagcagcagctgctgcaatggacagagcacggtgggggcaaccgtcgggctgaggaagcgttccttgctttggcttgagattacatacttggaatccagcttctccacgctgtcaagcacattgcccatgctaccaaccatacgctccttggtaagcatgttgatgatggtgctcattgggaggcaaaggaggcaggagataaactcaatgacatcactaccagcctcggcaaagcagactttctgagccttggtatcaatcaagagcttcatcgataatctgatggctgccatgattttcccccttctatcaaaattctataaatttcttgggagttgattggttgcttctacaatcaacaacaaaagaaaattatatgggttttcagttaactagcgttagagtccaaatgatcagaacgcgcagcacactgacacatagtggaaagctatgcaaacaattttccagagaaatttagagcagagtagcagacaaagcaaaaacacgttccagattgtaatccaatgaagcgtctagattggttggcagctgctcaaaagtaagcaaaaatggcatcctagtatacaggatacaacttctcctgtggacttgtggggtaaccgggtaaggtaacaatccgtgcagatgacacatttccaaataagaaatggcagagcagtatgttcatattttccacatagtgacacgggaaaatagattcagtgcaagtaatctgctttccttactatctcatttggcaatgccaacaaaaaaaaaataaataaacacgaccttataaatgttcttacaggcaaactcattggttgcagaagcagtgaagcacttgagacaaatattagcataacatatcaagtgtaaactagtactatgtactgcactaatgttcaggatcaggtttatcagttacgttttttctgtaagtcaaatcgaatgttcctaaaaaaaatcgatctaggaaaaccttgaaaagacgggtaaatgtttttatcctgaaccatagaaaaatatttcagcaagagtgctagattcatttcgacagcaagatcatgctagcagtctccattatactagaatattcaaactgaaaaataccattccgtttgcctcactagatctacggtccgatatcaatagaaccaaccaaaagtaagggagagaaatcaacgacgatgaggaaaaccaaatcaacgagagagagagagcaatctgcaaggtgagaggagaatgtatagcaccgggggacggagaggaactcgctcacacaatggatcgccgttgatgcccgccgctgccgctgccgccgtcctgcgacggcaaaaagaagggaggcgacggcgaggagtccaggacgatgatggatgagcacgggtagtagtagtagtagcctaatggtttgcttcctttggccatttacaaataccggcccgccccgatgccgccgtaatcggagttgccggaggtgctgcacgttgacgtttcctgacttcgtgtgctgtttcagggcccgcgtaattgtgcggttagcatcaaaataaaattacgttatgatatgattttatctatattttttcattgcatctttaaaatttgtggaaccgtagatttgttggctatgtttatatcaccaacatatcgtattgcatacatatagacatgtttcttggatagagagagtttataaatcagtgatatgttatttctgagtgagtgaaataaataaacaaagcaactaaacggtattacctctgtcccaaaaatataacaacttttgattatgttgtccagattcataactaaaaatgcttataatttaggaagaaggaagtagtaaattttctacttgactaagtatttccaagagactccttatcctactatgctaaaatttaaggattttatagaaaaaaatagccatctattattgtaatgtttagaaagtcccattagccactagcccactaccaacttctcctcgtttgcatgctgtccttgtccatactctttcgttgttgtcgctacccatccgttcgccctccagcgtccgtcagctttccttctcttctttgctgctctttattcacagcctgccgtgactcttaggctgtgttcagcagctgagttttccaactcacatttctctttttttcgtgcgcacgttttttaaactgctaacgatgcgtctttataaaatttttatacgaaagttgctttaaaaaaagtcatattaattcatttttcaaaaataaatttagctaatacttaattaatcatgcactaatgagttattgacatatgggtgacaaatagttaaatgttaaatctaaaagtggcaaatagttaaatgcccccatacaaagagtacacagctggcttgttcatagttattttcttgtttggaccataatggtttaaacatttcaatcgaatttattctgaatattattttgtacatcaatccttttcccgtgagacgtgactttatcagcttggaaatgatgacgtaatcatcttgcgaatggaactacaccttcgtcttattttaagtgtaactataagtttccatgttcaactttaatcgtatgtctttttaaatttttttgaaaaaaattaaaatagaagtcacgcgtaaaatattgttcatgttttatcatctaatagcaataaataatactaatcattaaaaaaaagaaggttgtctttatgattgatcgtgacatattggacccttgagtctttgatagttactacctctgtcccaatataagtgcagttgtggaatttcgtgtccaatgtttgattgtccatcatacttgaaaaaattaaaaaaataatcacatataaagtactacttgactagagtaaaagatcttgtactgaatattggcaaactattctaaactctcgagagaccgaggggatgctatcattatttacatatcacttaaatggttatcaagaaattaataagatagattaatatatgataaactaattatgaatccactctcctgaatattacttagatacccaattataaatacatacttcctccggtcattgtttgggataaaagttactactatacgaaaaatctatgtataatattacttttaaaggcaaatatacccatacatttctttaaactaagcatttgagaaaatattgatgtttaaagtttttaaaaccttgtccaaatcttatactaaacatgaaatatttataacccgagtactcatttgtcaatcctttcaatgagtaaatacaaatggtcaagactaaatacacggaaagatcagaaaccatatcgcgggataaagataaaggctctcacagtgagccccggaaggcct

SEQ ID NO: 4066 - DNA, 1408 bp, Oryza sativa
attcgtgatatgttgtaattcaactatgtatgtgtgtaccaactactgatccagggattggtacggataaacacagatgatttccgatttccaaaatcaggggtccacacggacccacaggtcatagactgccctcacagaccaacacatgtcttttctgcacactttgtcctcactcgtgtgcacccgggaagaatttcccggtcggtcacccatccaaaattgctccaggccaagcacgcttaacactggagttctttggagattggcttccggaaaagaagttgcaacttgttgatatgagtattctattaatcctattaagccataagccgggatgttacatttgtcacatgtgacggcttgcttgatgtcgctccgtagtgatatgactcctcgaggaccaggcatcttcatcatcatgtaggtgtagtgtgggacggccataaatttggctagagccggtcgtccgagtatagcatggtacgctgtctcgaaatcagcgacttcgaaacaaacattttctgtgcgaaaattctcccgagtgccgaaggtaaccggaagagtgatctggccgagtggtgtggctgataatcctgggataacaccgtggaagggtgcattacttggctttaattccgtgcgaggaatctgcatatcgtccagggtcttagcgaaaaggatgttgagtgcactgccaccatcgatgagagttcttcggagcttgacattgcgaaccactgggtctagtatcagggggtaccgccccgggtggaccactcggtcgggatgatccgagcggtcgaacttgattgctatctctgaccaccgaaggtattggggcgtgttgggctgaaccgcattgatctcctgttctgttagcttctgctttctcttagattcgtaagccagaggtccgccgaagatgtgattgagttctttacgatggtcttgaaaaccagtcggggcatcatcttcatcatctttcttctttgatgtgccttgatctccgtctgagggcttacgtgcattcttgacgtattgcttcgcaaattgtttgtagacgaagtagtctttggccacgtggttggagttgggatgatgcggacattgggagttcattatcttgtcgaatgtgttgacgcggggacgttgtcgggaagatggagaggttgttgccacaagttcttcgggcttacgcttgcgatccttgcggttgttacttccactccctcctgcggtcggcgtgtctttccttggcttccaagtggtgcccgactgtttggacgcagtaatagcatcttcggctttggcatactcgttggttttttcaaacatctgcttaaccgtcttgggaggtttgcgtccgaatttgccgactaggtcgtcgtggcgaatgcctttagta

SEQ ID NO: 4067 - DNA, 1577 bp, Oryza sativa
aacgggcagtggcgcacagcctctctccgaacgctagcgggacgacggggagcagaacccgcgccgtcgggctcgcaccccaccgtccccctctcgtcgaaatcttgggcggggggaggcgctcagggaggtcggaggatccgcgacatcgccacccgcgggcgacgacggaggacggcgagacggggcgcgtcgccgcctcgtctatggcgatggcggcatgccccagggcgcgctccaggctgcgggcgcgctcctgcgtcacccgcccgtcgtccccgatccagagactccagcccgacgttggctggatgacgtggccgacttggtcatgacggcgcagcagcgcctaggcgccggcgggcggacctccgccaccgaggcctctggcactgccgccgccggctccatgtcgtcgaggcggagggcgcggcgagcggcggccgttgcccgccgttcgtccgccattccctcgttaacgcctccgacccaagaagatgtgcgtggggggccggatgcccgcctcgatatcgagcgccggcgcgacgttcgtcgcgccgcccatgcaacggagggcgcttcctcgtccggagcgccacttcggtccgggcacgggggccggccccccgtgtccccggttggcggtgccggctatcgagcctttgtggcgagccttcggaacgtccgttggcccccaaggttccggcccaccatcaccgaaaaatacgacggaagcgtcaaccccgccaaatcttgcataaccgagagggtactggacgggtggtgaaatgggcaatcgaactctctgaattcgatttgcgctttgaaccacgccacgcgatcaagagccaggccctcgccgactttgtggcggaatggaccccagctcccgagcccgtctccgcccccgaggccacctcgggcccctcgcagctgcctcacaccgcctactgggtgatgtagttcgacggctccctgtctcttcagggcgccggggcgggggtcacgttgacctcgccgagcggagacgtcctcagatacctggtccgcctcgactttcgggcgaccaacaatatggcggagtacgagggactccttgcgggactcagagtggcggctggactggggatccgacgcctcctggtgttaggcaactcccagttggtcgttaaccaggtctgtaaggagtaccggtgctctgacccgcagatggacgcttacgtgcgccaggtgcggcgtatggagcaccatttcgacgggatagagcttcggcacatgcccagacgggataacgcggtcgccgacgaactttcaaggctcgcttcctcgcgagcccagaccccaccgggcgcctttgaagaaaggcttgcccagccgtcggcgcgacccgaccccctaggggagacggacgcgcctgaacggcccccgaggcccgtcggagtccaggcctcgggacccgaggggagcgctcccagctcccctagattgattgcttggatcactgagatccaggcgtacctcgcagataagactctacccgaggaccgcgaagggagtgaacgcgtccggcgcatctc

SEQ ID NO: 4068 - DNA, 5849 bp, Oryza sativa
tttcgccacgtcagcgatccgcaccgaaatgcatcgcagccgtttacggaaacagcatcgaacgtcacacgttcgtccacgttatcgatccgtggggaaaccactccaccaatcagcgcccacctcaagttcgctataaagtcgtcgcccccgtccccattctcttccccacatcgcagtcttgcaaacacacgcagcaaaatccacaccgcttcccctccccgagaagaagagagcagcatccatggcgcccaaggcggagaagaagccggccgcgaagaagcccgcggaggaggagcccgcggcggagaaggccgagaaggccccggcggggaagaagcccaaggcggagaagcgtctccccgccggcaagggcgagaagggcagcggcgaggggaagaaggcggggcggaagaaggggaagaagagcgtcgagacctacaagatctacatcttcaaggtgctcaagcaggtccaccccgacatcggcatctcctccaaggccatgtccatcatgaactccttcatcaacgacatcttcgagaagctcgccggcgaggccgccaagctcgcccgctacaacaagaagcccaccatcacctcccgggagatccagacctccgtccgcctcgtcctccccggcgagcttgccaagcacgccgtctccgagggcaccaaggccgtcaccaagttcacttccgcttaggctgcacctggtgctattgtgctagtagtaatattagtttgatctatttatctactagctgtagtgcatcaatgatgggaaatggatgttggggatttagtgactgtaagaagaattaggtggggctgcttttgaggaacttctgtttcatggattcgaaatacactagtaatgcttttgtatcatgtgaatatgtgatctctcctatgttgtctttggttgccttgtgctgaacttgtgtttgttttaattaatttatgtctaattttggggaactaatctttgtgttgtagtaactatttgcattgtcttgcaaattcctcgtcatgttaccggaattgattctggagcatgcatgtttggagtttggaactgctgatgtgctcatgtagacgttattatggaagattgctattatttttgtttctgattaccttaattagctaatgtcactggccacaagacgaatttcactgggctccttttggggaactttttttttttctcatggatcaggaatactctttgatttccttgtgcttgaaggtgaactagtgatgcttatgtctagttttgtggaattaatcttcatgctattgctatttttcattgtctagcaaatcatcaaatccctctgcttgttactggaattttatttcttgagcatctattttggagtttggtactgctcgttggattatgttagttttagatttatggactggcactacttttgtactttggaccgtttgtggactgagcatttggagttcatgatgtttgcattcgaaacaaaacagaggttgttagaagagattagaactttgaaaattgtagtaaactttgttttagcttcgtctggtactaattcaaagaaatctaactcaagtggaaatagtactgaaactccacatatattgcctttgctatttcactatttcaggattatgcatgcctgcccgtttgctacatttctgtcctgaatgtcttatggaggttcctctgttgaagattagctaacaacaaatatgaggtatgcatcttttatcaaaccttgctttgggctgttctgttctgtgcaagatgtgctgactgaagagtgaagatgggactcttgtgggacttcttgtaatgcaatccttttattttctattcagggagattatttgaggtgatcaattatctttaaggttctacagggagagcatcctgaatttctgtttggcttgttcaaattaaatattccatgccaaacaactttagctttaactgattactgtggatatgtactagtatctttttctcatgaaaaagctttatagtggctagtacaaatccacagcgactgaaatgatggatctcatatttcttgggtgaacaatccttcattcctatttggttaattgtttgggctattgttcttctattctataattgtcatggatttggtatcctgtgctagaactgtttagatgcgatcttttttgctgctttgtttatgtcgaatctgaaaactggttgcctgggtatttgagtcagggagttaggaaattttgctgctatggttctgtaggtaactaggaattggtattgaattattattggtgctgcgtaacctttatttaacctctaaaatgcacgaccagtaactatagttggccataaggcccgaggcccgaaggcccggcccacggcacgcctttttggcccggcccaagcacggcacggcccgacttgggtcgggcccgtgctggcccggcccgaccgtcgggccgtgcctgggcctccccaccggcacgctgggctggcccggcacggtcgggccggcccggcacgatgggccggcaggccaggcccggtacataaagtatggggactaaaaatagacatataaatgtaactgtctaaagaatagggaccttaaatagacttattttagctatttatataccccagcccaaagaagagggaggtaaaatagactttttgtagctgtacatatgtcacagcccaataggagggaggaaatttagacttattctgaggaaaagcacgacggcccatcgtgccttcgggccggcccggcacggcccgaggcgtgttgggccgtgcctgggccgtgagtgcggcacgtgggctggcacggcacggcccggtgcgtcggtcgggccgtgccggcccgacaagcctcggcccaggcacggccgggcctgggccgtgccgtgccgggcggcccacatggccaactataccagtaaccatggaaccttgtatgcagctgattattccaggtacagtcatcgatactacacatatgcatattgcccaatatttatgaatgttgctctactgttcattgcccgactcaacatttagttaagagtgctctgttcattttcaaccatccaagacctgagatattcatctctgattgcatgaatctctgatgcagcatctggtaacagcattcggtctctgggttgttgctttgagcaggataagccgagcctaagaacggacaccaaacactgttgaataattcttctttttgtgcttgcatttgtcccatctgtatcatttgcttcttcatgcagccagattgttcgatcagctatgttcatggcgctctcaagaaaagaagctgcaacaaacttgtgcagatccattgaatccctgaaaatgtcatcagtgggacttcttccattaaacatctcaagcaacaatatacctaagctgtaagtatcacctgctctggttactgcagaaccttctccatactctacaatatttgcagttaaagttagtttttcaccgtactaccgacatgtaaaagatacaaagttccagtccaacccccacccatgagggaggaggtggagaaattgtaggatataatacaaaaatataatatttttgacctacctggtgcaatatatccaatggaacctcggattccaattgagctttttgaatattgaagagttctagttgtgcttttggggaggatttttgatatgccaaaatctccaacctttgcactcatgtcttctgcaagaagaatattacttggtttcaggtcacaatgaatgatcggtggctgacaactgttgtgaagataatccagtgcgtccaagatatcaaccacaatgctgagtctctgcgaaaggctcagtgtattgctgggagtgggattgcttgacgtgggatggagccgactatctaagcttccgttgggcatgtactcgagggctaatgccttgaactcctgaccctgtgggtcaatacttgaacgacaagtgatgatctttgtcagacaacgatggcgaactcttctcaaagcctcacattcagcctgaaagctccttgaagatcctaattgtttaaggtcgaacacttttatggctacaggttcaccctcatcttgtaaagtgcatttataaacagaaccatatcttcctttgccaagcaagtttgcttctgaaaattcattgcttcctcttgataatgcataatatgaaatcctctgatattgttcctctataaccggagatatctcttggctattttgtcttccttttagtttcctgtgctgtaacataatcagaacaatagctgaagctaacaccagaattgctcctgttgttatgaaagctactttaagatatttcatccgttcttttctgtcctttcttacagcaggaattggacatggagccaagtgaagccgaggtattccaccacacaacttgtcgttccctgcaactgatgcatacgtaaggttcctgaaagcaccttcatctggtactttgccttgcaaattattgaaggacacatctaagtgccacagctgtgtcaaattttgtagggtttctgggattgatcctgacaaattgttgtgagctagacacagctgttgcagattgcccatgctaccaatggcattggggatgctaccagaaaacttgttcatggttaggttcagtatggcgatcccttttagttttgtcaaagattgaggtatgcttccttcaaacgagttgctatctagcagcaggtattccagcacctcacaatttcctatactgtcaggtatttgatcagatagctggtttcctgacagttctatactgtttaggttaaccaaggtaccaacttctgatggaatgggtcctgagagagtattatctgacaagattaagaaccaagaaagtgacggcagctcaaaaatttcttttgggaccgaaccgttcagatggtttatggacaaatctagagcaaatagcttctttagcttcccaagggttgcaggtattgggccttccaaatgggcatcgtatgcggctagtatattcaaattggtaagatttccaattactgacggtatgaggcctgacaatctagtgctgtacagagtaattatggccaagtctgctagcttccctatgctctcaggaatcactcctgacaaagaagtggaccctagatcgagcgtgtccaagccaatcaaattgccaatgtctgtggggatgctcccggagacgctattaccacgtaagaagaacttttgaagtgttgtcgacaggttaacaatagagattggcagctgcccaatgaaagaattttctgcgatatctagctgttgcagctgactgcagttggcaagtgaagttataaattcccagcccttcatgttatttgcctcaagtcggttgctagacaaggatagacgcacaagagatttcaaccttcccacggtaggaggcacaaatccactgaatttgttaccatcaaggtatacgtctgtgagtgatgatagattgaataaggaagaggggatgactccgctaaactggttcacagacagaacaaagtgttgcatgttaggtaatttgtcgccaatgttggcgggaatgcttcctttgagcttgttctcatatacttggagaacagtcagttttgacagattccatatggagggcgggaattcgccagagaggctgtttccgtcaagaccaatcttctgcagatttgggatgtttccgaggcttgacgggatcaggcctttcaggtggttgaagtccaactttaggaactcaagcgatgataggtttgctagcgaggctggaatcggccctgtgaagct

SEQ ID NO: 4069 - DNA, 1930 bp, Oryza sativa
caagatgcagtccatagtctatttttcaagataaaagaaccacctgcttttgccaatcagactttcagtttcatgaaagctgcaactacagaattataagtacaacaacataagtttagtaggattataataacttatacagttcttagctctaagtacaacagctgcttaattgaagtgatcatctgcatttagtatgcctcactttttagattagcagatgaacaaccacatgcttgtgccaaatattgaaaatagtgtctgaaagatgcaatttcagtatgtatgtgcctaatcactcactgtcgctgacatttattcttctttagttcccttctctgatgccatcatagacagtatgtgctctgaaatattgagaaactacttgctctgaatttttgctatgctctgaaagtatacaagtctgctttttttttttcctcaagtacatgctaacaaggttccccgattaattactgcatgacctataacagatccaccacgctttggaacttcatcatcgtcgaactcaccgtgcactatatcaaccgccgaagaaataaattcttcgtcaccatccgatgaaaactcatccaatagcatttggaggagggtgcttcgacgactcatctcctctttttgtttgccacggtgttggagcgtttaccacagggatgaagtgcaatggagggaactgatggcaggaatagaacaataatcaatctgcaaaattaattatcagatcaaacttaatattttccaacaatatatatccacatcaaaatactgacatagagattgactacggcacaagagattaatgggatttgctaaggattacctccttgatgacacgaattgctacgacatctccttggtgttccgttttttaacaaatcgcagcagtcaggacactggttggctggctggtgatgatggcgctaggtcacggcggcgcaagtgtggggaggaagaagtcgatcggcgctggtgcgggagggagaagacgtgcgcaagtaccgaactgggccccaccttgcttatgtggcaaactaacaaatgatagggaattgatttttgggcttctcttggaggagggggtcattgttgggcccaatttttattttggtattcctaattcagattttttgggaatcaaatattgggtgattgttgggcatgctctaagtgatttgtttggttgggagacatggaaaatttagtgggatagggatggtgaattgaggaaggaactccctccttttcaatacctgggtaggggcaggtaattgggagggaattcctcctttactttttctaagcaaatctgagccatctgtttttattaatgacttaatctccaactaaactccctatcaatttccattacctctaccaaacaagatattgagattaaaaatcaaattcccatcttaatctcattatcaattccctcgtgtaaactcccaatctccttccctcgagttaccaaacaagccgttagatcactaagaatacgtatataaaagttttattcacaaattttttccatttacaaatatgccgatgggtcctggtgatttacttaacaaatgtttgattagatcttcagttttatatacaaattcgttttgtctaaacagataaaattgacttattaatcttgggaaggccgttactcactctagactttactcctccttatctttttttttcttgaacgaacatttcatttcttatatttttgcatagtttttttaaggtagttatagacaaaagtgataatgattgggcttctaaataatgggtaagacttgtctccaacaagtgacccataagggcacctaaatctaaaatgggtttccgatagtattatttcagcctccaacagagtacctatacagaagacctattttacgtgctataagac

SEQ ID NO: 4070 - DNA, 1441 bp, Oryza sativa
cgtacccgtcgacagcgaggcacctgtggtgacttcatcaatctctccaggattattaccggcccagtcttcgaagatgctcataggggtgagtgtgcgtgcgttgtgagtgtctgtgttgtactgtgtaattctcaaaaaaaaaaggaggaagtacttatcagtcaaaatttaaattttcgatgttaaatttagagttgattttagagctttttcattaaagtttttttttcacctttgcttttacggcccgtttggttggagggaaattttaggagggattgtgagtttagagggatgaggctattaagagcatgcccaacagattacttattctattccctatcctcgaattaaagaaattttaaccaaaattctcatccaacagattccctaacctacctcccaataatgcaggttcccatatccgtatatctcgttactcatttgcagggaaccactttttcttcccaatcgcggtggtcgctgcttcgcgcgcgtagggggaaaatgttcccacgctccttttctcgccctactcaccagcaacaaaattcctcttcctcccaggcgtcagcggcggctttccaggcggcgaagcaacggccaaccccttcctcgcaggcgtcgtcgacggagttccacgtggagatgcagcagtcgtccccttcctctcagtcacaggggttggcgtcgatgttgctccaggcagcgatgtagcggccatacccctcctctcaggcgcaggcgccggcgttgctccaggcggctatgcagccgccgtcctcttcctcgcaggtgtcggcgtcggcgttgttccagggggtgcccgcacgtcgaccaccgctgccggcgcaagccccaccacctcctcgatttggggccgacggccctctgcgccccgcaccgctgcctcgccgtcgtcttcctcaacctccctactccagtatgcaggcgagagagtccatggggggacatgctccatgggagacactgaatcccctctcatacgaagctcctggcatcgatttctccacagcttattctgtgtgtgatgaagaattcctccatatgagcaatttcggtaaggctgtccctgattcgttcgatgtttagattaattttcagagtgttgcagcctgatctgatgtccattctatgactgacttccccggctagaattcaggaattcaggattcagaacacttagaggaaaatgtcagaaagtctgaaatttgtaccgtatcgaatggaagtctgaaatatgcaggatatgctctaaatctgaaagtctgaacacttataggaaatcaggtttcagaatatttagtaatgaaggatatgctctaaatgtgtggtatgctctgaaagtctgaaatatgctgtcaaatatttttgctatgtcaaatgtactcccaaagtctgaaatatgctctgaaag

SEQ ID NO: 4071 - DNA, 1173 bp, Oryza sativa
ttagtccctgtctttagacactaatttagagtattaaatataaactacttacaaaactaattacataaataaaagctaattcacgagacaaattttttaagcctaattaatctataattagagaatatttactgtagcatcacataggctaatcatggattaattaggctcattagattcgtctcgcaaattagtccaagattatggatgggttttattaatagtctacgtttaatatttataattaattttcaaacatccgatgtgatagggacttaaaagttttagtcccatctaaacagggctcagaatagaaatcagaatagaaaggatgaatggagagactattggagtaaataacaaatttgaattgctaattaaatggagatttggctaaatagacggttggagagtgatttggagaggctgtctggagatgctcttaagctcgaagaggcgctgcccctcgtgcatcgccgacccccgaccataagtatcacgagcaggcggccgccgccgagacatgtgctgctcagtcgctcagagcctcagatcacccacccgcttgctgaagcgctagtactagtgtactaccagtagtagtgtaggcggagaaaagcagttggcaaagctcgcgcaatggcagcctccaccaccgcgctgagcatgaagctgctcgtcgacaccaatgcccagcgagtgctgttcgcggaggcgagcaaggatgtcgtcgacttcctcttctccctcctggcgctgccggtcggcacggccgtcaagctgctcgggaaggactccatggtcggctgcgtcggcaacctctacgccagcgtcgagaagctcgacggcacctacgtccagcccggcgcctccaagaacgcgctgctcagccccgtcgtgctctcgccggcggccagctccaacacctccgtcctccgcttgccggccccgtcttcttcgcagcccaagagcttcttcagctgccgctcctacgactgtttctactacgtgacggacgtgagcggcgtcaagtgtccgtcctgcggcaaccagatgacaacggcatgcacgtatgccgcaccaaccgctgcccagaagctgcaggccgctgcagccgaaggggcggggaaggggttcgtgcagggcatcgtcaaatacacggtgggctgcagg

SEQ ID NO: 4072 - DNA, 1837 bp, Oryza sativa
atgtcctgaatcctgatagcatttttgtgtatgactgtatggtactagtttcatcgtttgacctaataagttttaaaacaatttattaattagaaaaaaaattgtctttcatatatatgtgcatgtgaaaaatgataaaaagcctcaaaatctattctaaattcactttaaaattcaaattttgattgcggctaataaccaataacaaacaatgtggttttagtattgtttaggacatccattttacatgcgacaatattttagtaattcgctacaattttctttcttttttcgagacatctattttttcaaactgctaggtataaaatcacttaaatttgaagtttggattagttatggcaatgtatgcgataagattagctcaagcctgttggtgtagcacagttacaccccttcataatccattagctagattgaacttgcgaaacaataatatgtacaccttgatgcttggtccatttggaacgaaaggaacaaccgtgtattcaacaattgcatacggttatggcctaaggttgttggttttgttgcagccatggtgcaagaaaccaccctttggcggcatgcccatcccttgtcgctcacactccctcagggtagtatactcggtcgctaggtcgtcacattgttagcgagagaatagcctcaagtattttttttaaccaagggcacgcgtaggacactagcttgcttgtgtgggtaagcagagtccaacacccagttattcaagagacatgtagatcgatctagccttcaagcttgcctacctaggaagcaggcttcaggccaatgaaaacgtcagtcaggacagtcttggattgcagggaagccttaagaatcgccagaccctgcagagaatcaacaaatacatgcataccgcctaaaaccaactgatattaagttccaacaatcaagtagagtcatgtgtacggttacgaatgtaatcacctcagtgtagccgagctgcacggtcttctccttgagcgcgcccaagtccttgaccgcgaacctgttgagcagcgtgatgctggagatggacgacatgggcgccacggtgagatcgtccatcaccgtgtacgtcacgatgccctgcacgaaccctcctcctttcgccccttcggcggcggcgttctgcgtgttctgatcttggccgccggcaacataggtgcatgccgttgccatctggttgccgcagttaggacacttcgtgccgctcgcgttcgtcacgaagcttctgcaggcgttgctgctgtagctgcatctgaagaagctcttgcttgactgcgcagaagacggcgccggcaagcggaggacggaggtgttggagctggccgccggcgagagcacgacggggctgagcagcgagtccttggcggtgtcggcctggacgaaggcgtcgtcgagcttctcgaaactggcgtagaggttgccgacgcagccgaccatggagcccttcccgagcagcttgatgcccgaggcgatcggcagcgcgaggagggagaggaggaagtcgacgacgtccttgcgtgcctcggcgtacagcacgcgctgcgccttggtgtcgatcaggagtgtcatgctcatcagatcgctacttgccttttggctggttgtttcagaagccatttttgcagtagttgcagtgtgcagtggcctgcgtctgaactctgaagtcgaagtctcgttttgcctgctgcattctggaatttacagcgtaacagacgagagcatcgaggttcacggggaagaagagagtaatttatttgcaaattaaccgctcattgtgaactttaattcctaatcaatcaatgccgtt

SEQ ID NO: 4073 - DNA, 1684 bp, Oryza sativa
tttgttctgccaagtgccaatgccttggcttccctcactgctgctcttgagttcgcgaccatgtagtcgttgtcgcttcagctgctcgtgttgatctcttagctcgatgctgcaaccaagataattgccttcacattcgtttatgccatgcgccactaaaattattctaataacaagagaaaatcccttgcactcccctgatatttgagtcgatctctaacgtgtccttcagttttttttctttccatggtataattatattatttttttgaggagaacgacggtaggagatctgccaaaatttaacattaggagagagaaattacaaagtagcacagaggttcagaggttacaagccaaggaatggaaagataaatacagctacaggaaaagctaaaaaaaattattggggtttaaaggccaagcagcgcatatcaatagcttgcttgataaaataagctacttcaatctctgaacaggaagagttttggaaaattcttctatttctttctaaccaaatattccagcaagtagttagaagagtttccctgaccaactgcacatccttcttagagcctgcaaatttggttccagaccaccatgttgacacatccaggacaggatttattccgaccgaagtcaagttttggaattgacaaattagggtctacacttgtctgacaaacacacaatcactgaacaaatgatttgtatcttcaaaggcacaaccacaaacgcaacatatccaattgcaaggccaatgcctgtggagcagattttgggcagtcaagttttttgatggagaactagccaaccaaagaattttatttttggttcagtcggggatttccatagagaatcaaactcattggtggcaaatgagccttcgaactggaaaaggtaagcactctcaatcgcgtgagaagtggcagattcagatgttctccatggtataattatggattttgatttttggtctctttccatattcttttctttaattggccatttaatagttatgaaaagtccattttggcatcagcatgaaaggaaaacataatttagaattatctatatgagataatcatgtattcaatattttgttgtgtgaggtattattcatgacaaaatttgttttgcacatagacgatagagagtttaatagttattcctttaattatagcaaatctaagtagtgtgtttttggatgatatatacaatagatttcaatgcgccctatatgggtaaggtataccctctatcctactacttatgtaattttatggatacaccgcaccttcgtgtgtatggtaaagctccatatgcaataaggaaatcgataagagattatggaaataatcctcgcgggcaagtacataacaaagatctactcggaaaggattaggaatatactatatcgtgcaaggtcctaggtcttcgagttccaggggattcacggtgtaaatacatacccttaaggggtccaaggttttgagtcataagcacaagacaccaccaccataatctcggaggacttgaagcctattcaccgatagatctcgtcgagctaatctcaacaaggatttcatcggtaatctcataatcatttgttctctattgtactatgtgtttttccatatcaatctcatataaactgtaataggactattatcttgcgggggca

SEQ ID NO: 4074 - DNA, 2642 bp, Oryza sativa
catttcgaaacggagggagtacgtcattaacttgacaatacaaccgaccattcccgatgacacatattgagcaataaaaatgtggaaccaccagctgttacaaagtactccatctagagcattagcatgtagattaatttaatcactaacgagaacgatcaaacaacaatacacatgcgtgcaacaattagaatcacaggctcgcagctactacatatgggcaacaaacaaaaccgcaaaattatcagcaccagtctatcactaacagcgactcacctggaccgtgccggatcggtcacgaagggtgaggaaggtgaggccggcgtgggcgcggtggagagcgacccagccgcagaggcgcacgcggcggccggcgtcaccggcgccgagctcgccgcacagcgcgtccctcgcaggccactgcagcggctgcagcctctcgcgcttcgcctcggccgcgggcgccgccgcttcctcctccggcggcggggtcgccgcgtcggtggccgctagggttcggagcggagacggcgagcacgaggccgacgaggtggaggaggcggtggagagcagtaggaggcggcggaggtgcgaggcggtggggctagggttgagcggctttaggcgggagaggagggagagcggcgaggcgcggaggagagaggaagccattggattgggctcggagacggtgggaaagcgagcagaggaggacaagggcttgggttgggttttggaggaagacgggatgggatcgccttatcctcctgcacgaatcttacagcacaagtttttcgcctgcctgcaagcacaagcagatagaaccatcgccagaattcgaaatcaaaagctcttcgacaccaaaatcaaaagtgaattcgcgccggaacatttcatgagaaacgtaggagtacttctcagcttatttaatccaaagtaaactgcacgaccaccgtgcttcaccaaattggagcagcaataggcgtcaaaattgtgcttacaaattcagatcccgccaaggcagaaccaaattttgaaaactgcacaaatcacaaaacgcgcaacaccagtagcaggggggaaataaaattggcgcgatgtagagacaattttttttttcagagcgcgcgcgttcatcaggcgaaaaattcgtgaacatcgtgaagttatcgcttccaccgttccaggcgcataacatcaggacaacgaaagttttgaaaccatgaaatcaaacagcgcccagattcactgccagacttcacaacaaattcaaattaaacatcgaaacatgcactaaatgaaaatgaaatacagccccaacgaggctctggataggaaatttaagacaaaatattcagagattttcagataagcaaagacagcgcaggagcaggagcaggagcagattatcgtacaaaccacaggattggaggcgacaggggaataatcaagaacatgtaaaaggcaagcagattaagccatcatcatcataattactactttaccagatccagataacaatattgtcctaaatccaccaggatatttcttacatgaacccaagatagtcaaaagccagaataactacagcacagtaccataccatccaaaattccaacctaccacaactaccattagcagcaagacgagaaaggggcctatgagcctaagcggaggtgaacttggtcacagccttggtgccctcggagacggcgtgcttggcaagctcgccggggaggacgaggcggacggaggtctggatctcgcgggaggtgatggtgggcttcttgttgtagcgggcgagcttggcggcctcggcggcgagcttctcgaagatgtcgttgatgaaggagttcatgatggacatggccttggaggagatgccgatgtcggggtggacctgcttgagcaccttgaagatgtagatcttgtaggtctcgacgctcttcttcgccttcttcctcccagcgcggtccttcttcccctcgccggagcccttctcgcccttgccggcggggagccgcttctccgccttgggcttcttcccggccggggccttctcggccttctccgccgcgggctcctcctccgcgggcttcttcgcggccggcttcttctccgccttgggcgccatggatgctgctctcttcttctcgggaaggggaaacggtggtggttcttttgctgtgtgtggatcgcaagatttgcggttgggaagaggaggagacggggccgattggttttatagaagaggggatgtgcgccctgattggtggaaagcatgcggcgcggatcgatgacgtggaaggattcgtgtcgttcgccgctgtttgcggtgaacgggtgggatgcgtttcggcgcggattgctgacgtggtgaaatatctgggcgcgaagagacgagcgcggggcgggattttctcgcgcgtgagcgaaattgtggaagggcccatgggtcatagggacgcgacgatttttgtgtatcgagaattacaattttttttagagtactggatttttttaagttttaatgtatacataagaaattttgaccaaatattgatttcaaaatgtttcacgataaatgcgcaattctataatagattctaccatggtttttatgtggtactattatgctatta

SEQ ID NO: 4075 - DNA, 2906 bp, Oryza sativa
cccattgaacgtagcacagggaagtcttacaaaaaaaggttcttacatttatttttattgcagttttcaaaagttagttctagccataaagtttttcttttaattggaaaaaacaaggagataaaggaaattaactacatccatctactggaagataattgtgcttaacgatggtaagacaattgatatttgagaaagcaattattacaccagtgaacccaaatatgatttgggtaattaggtctttgaaagttgccacaaataaaagtgaacgaaaaagcactgcgcatttttcaacagaagaaataaacgtgttataattgtctgtttaagtgaaaaatagttacagacaacttacctgaactctcgatgggacaagatagtcccgagcaccttctggtgtagacttagataaaactggagtctcaatctaccttggaacatgcggtaactttggatcagacacaatagaaacaataacagatacagacattataggcattgcaaggtactaagatattattagtcattgtgatgtcttatattctaatgactcgctgtaaaggagatacaacagcaaagaaggcatacatgacccatctatttcaactgatccaagttattttaactagcaaattgtacaggaaatgattaaaaaaaatttcatgtacaaagcaaacaaagcatacatgcactctgtaaaaaaaaaaaaagatgattaaaattggaattagagccctaagcccaaggtgcaacatgaccttcaggcattacatcatgaaagcaagtatcttgctctctctactgcaggcactgcatcgaaaagaaagtattttgccgtcttgcaaatttccgttcatctataggaccagactacttggatatattgcattccatagtggaacaaaatgagaagcatatagccaaaggcagattatgttagaggtgcaaactcagcatgaagtaattaatgagtatataattggtatacagcatacctcaacaaaatcatgtctatcctccaagtatcgacgaatatgcttgacaacattatggcgcaacctcaagtttgactgcatttgtggtcggcgtaagtccagcacccggaatctagacatttacaaatatggaagttaaagaaaaagattggtccttaatatatggaacttaaaacccataatataactatattcaagtacaatggtcgcctgctgtgaaagaagacattgagaacagggaaaagtgctttaggcaaactattaaaaacattatacaaacagattcaagcataatggtcgcctaaaatcttgaaagaaggcaaagagaacaggcaaagggctggcaaacacagaaaatgtacatcttctggcaaggatggttaaatctggaacaaatttgtggtcaggattgcagaatgtcatgacatggtattgcaacagagtaaagggtggtttaacagcagtatgtagttaaaaacattcctatacactagcataatccaaatgatggtagaaaattccaaattaaactgaatatgacagccttcataatgaccgccaatatatcgatctagtgaaaaaatattggaaccttggaagaacaaagatccatagaatatagcaatggccatagttcagcgtaaatcagtaactggggtgaatgattaaataacacaaagagattgcaaccctcacggagtgaatgatgtgccatgtttcacagtatctccaaagccactattcacagggtaaacatgtgactccccagaaaatgggttaacacctcaacaagttgtgtcccagtagttagtgtcgtaatgcaacctaagtattattttggcacctaaaatcttatgcacaactttgaatgtgcaatgtaatcccatttatgcatgtattcaacaagcctaatcaggcgttaaccaacaatcaaccaccatatttgaggtattcaatactagtatttcttttcttcaggatacttaatatatgagcataaaaagagtgcagataacaatgtattttacctcagtctaatttcttctggaaacttctcttttacagtatcagcagtggtgattggaaaaggcaatgaacgagttactgagttcagcacatatatattatctgcagcaacctgcataggtcagcatgtaatatcatagttagagagcattttgctgtatggaggaacacaataaaaaaattcaggaagtccgcaacaatgaaagaaaagaagtgttagaattacaaataatgttgcacgggctattccttatcctatatattagctcttatagcatctatgtgctccgtacatatgaacagcaaactttaaaagtgtggaatttctgtactagatagtttgaatttcaaattcttcacttgacatatcatctcaagcttctctctctaaactgcaaaataaagtaacatacaaccagtcaatacctctatagccccagtcttcatatctgtgttgatggcttctgttgggcgtgaccgaacaaccccctcgaccgcaaccactgactctactcttagtttgttcaccacagcataaacttctggatattctggcaaagttgtcacctacacagagagaacaattaccgataagaccatgctatcttgtagatgtttatcagtctaccaatcactacagaaagaaaaaacaaatcaactcccccataacattacaaattgatgcgattatatgacttcattttgccttcgtaagttattagatcactcaacatcagtttattgggaatttgtagctgcaaacgttgctaaaaccactcaatagaacaggaaaacagtaggtaatgtcagtgctacaaatactattatactccctccgtttcgaaatgtttgacaccgttgactttttagcacatgtttgac

SEQ ID NO: 4076 - DNA, 1113 bp, Oryza sativa
atcgatcaactcttgattgataccaggctcagaaagtctgctttgccgaggccggtaatgatgtcgtagagttcctcgccagtctcctttgcctaccaatgagcaccatcatcaacttgctgaccaaggagcgtatggttggcagtatggggaacgtgcttgacagtatggagaagctggaagacaagcatgtaaccacaaaccagagtaagcaacgctacctgagcccgacggctgcccccaacgcactctgcccattgcagcagctgctggatacagagttaaatgccaataccagcttcttcacatgtgaagggaaattgaacagcaccagctacaatgccactcgttttgcttgtggatatttttcggttgtgaaaggcagcatatgccctctttgctacactccaatgcacaaggcaataccacatgtcaacacctcaagggttatggctgggacaggcacatacactatcaaggatgatctctcaatgactccagcgtccagtgtctcaagcatcagccttcttgcacagtgtggtgtcaaggacttgaccacgctgcaggaaaggaccatgaagattggcaaggaagaggtatactatactactttgtacatatctgtcactttgagtgaagaaaaaaaaatcttagtcgttttttttattaattggcatggttgatgatttttgtgttcaaatttaggcgctggagatactccttgcttccctgaagtctaagaccgtgctgactgatgtttttctcccaaagaagaaagaaagttgcaagagggaggtatctgcttagttatgatgcattgatgcatgagcagttttaccaggcatcacaagtgaaaattacaacagcttgttattaagccgacagtagatttcagtaggtctttattgtgaagtgtcactttgcatttcttattgtatccatttagcaaaagtagtatttccttcgttttcgttaatgaaagcgggagaggtgcggcctctttttatcaaaaaaaaaaaagaagcaaaagtagtcttgcaaatagttggcttactagtttggtagtgatatgcaattatgcagtatccacccaatgaaatctttctactatca

SEQ ID NO: 4077 - DNA, 16057 bp, Oryza sativa
gaaacgctaagcgaataaacgataaaaaataatagatcaatcgtagaagacacgagatttaacgtgaaaaatccttttaaaataggagagaaaaaaccacgggcgccagccagcaaaatatattcactatatctgaggtgagattacatcgccgcacggcggcttacaagaggtacatatattgtggaaccctgaaagggatcaagcctcccggcgacgggcctccgctccactacggtagaaactggcctttattaaatgcaaatgaatttgtatcaacatgagcaaatgaccgtggtgccaaagcgatcgcgtgaatgtgagatacgatcaactgcactggtagcgataaagagaagattgaacgcactgattctagtcgtccgttcagcgaaaagcccatctggtttaccagttggcacagcctaaattaaatcacaacccattgatagcaattacgggccaggcccatctctccatcaaaagctcaaggccatctgtgattttgttctataactcgtacagaagacatcacataatcaacaccaatgtatcttgcctaactaggtaataagtagcagggctaagtagtaggtctttataaagtgggtcccacgagaaaaaaaatattgctttttaattgctttttgtccaactcagcatgcagtagtagcacatcttgtgttggaaggagagagtgaaagagattttaatgtttttttattcttatgagtgggtcataagcttactacctagcattagttactacccactttcacaatgcttattactaggtcataggaatattatattgcctaatacctgctttttcctaacattgtggatgccctaagagtttcaaatcgactggtcacgcttgcggcttgccagcaagcaaaataaacaacaagagaaggaccaacacaaatggccatttcttccgcttcttgccaaggaaaacatctgtaagcaccgtcttcgactgcagcgacgccttcagcatagccaaaccctgcagtacagtgtaaaacaaaatggttaataaaacacaaatcaaaatgtaccaaaacttcatatgataacaacctcagtgtagccgatctgcacggtcttctcctggagcgacttgatgtgagtgacaccggatttgaccagcgcgatggtggacatgggcgcgaccttgaggtcatccatgacggcgtatgtcaccaacccctgcacaaaccccgtgcctgcgattgcagacggcgcactcgcggtcgccggcacctcgccgccggtggatccagcaatggtggtgctcgacaccatcacatgcttcaccggcaaactcatcttgccgctgcactgcggcaactgacaaggcaagccactcaccgtggagacgtagttgcagcaatcaccgaacctactcgcgctgccccggtaaagctccgtggaggccggcggcggcgccgccgcattgatctccggcaggtggagaaaattatgaaaaaaattaaaaagacaagtcgcgcataaagtattaattatgttttatcatctaacaacaataaaaatactaattataaaaaaatttcatataagacggacagtcaaacgttggcacggaaacctagggtttgctttttttttgggacggagagagtaaagtgctaatgctaacatttcgtcatagataggtgttgttctgagacaaattttttgaacgaacaacgaattttacaaccacacgaggagaacgtccatgtatgtgcacatttctactagtgacacgtgctaaatactgtttctagtatttaaaattagatgcgcagattaacactctcattattatttagtttgttttcattaggaatttactgtttccaataggaaaattaattcgtgagacttgcatatctcttaaacatgtgttgaagggggccaaaaaacttcaaatttttaagacgaatactactggtgcgttacaaaattcgcgtgaagtacgacgttggctactttgctgatctgatcaaattggcctcgattcctcaaaccagcataggaccagcggtgtgcagtccgcctcgcgccgaggaagacatcggtgagcactgtcatagaccgcaacgacgccttcagccacacttaagccaaaatctctaataccgattgcagggttagaacccttgctattgattgggccacgtggcatcacgcatagctcacgaccagattctcggctggagaacatgccacgcattcgaactgtcccatagccgtccgattacatacgaacggtgagaaaaggcctagcggacctaaatataaattgcaagttttaagaagggtttttaacaaaatgcacaatcttatctagaacagtccagagtatatgaaaaaagacccagaatcagaaaaaaaaaaatccagcaagaacaatatacagtattcccctttcctaatcaccatgccgtcgcgtagatggcaaatacggggacgatgagctcgagctcgattgacctggtgctccttggccccgccctgccttgatccgtgcgaggcgacgatgcgcctagacgatacgggggaagcgaaggatccgacgacggagttgtagacgacattggagggagcccgctgagatagagagcgccataggggatacctccgcgctggtcctggagcttgacggcccgcgcggggccttgatacgcgcctgctcaccagctagcgctgcctcatatagacgagtagggacggcggcggaggtccacgccgtcgctacatccgcggggatcagctcggctcaacgccaccctgcttgtcgccggcttcctttaccgcctctgcgatcaaccgctcgcatcgtctcctcgatatcctccttgccgcttctgccaccatggccggtcgcaccgccccctcgacccttccgccaccaccgcgacctcacctcatcgccgagccgctcgtcgccggagatcggaggcggagacaacggagttggtggtggcaggacggccggcagtcaacccgatggcggggcctccggctcactcttaacccgctgccgttcgaccacgccacctccgctgcctccgtgatgcatgcagagctggccagcttgaagccttgaacccagtgaccaaagaagccagttacctcttgcatttgcaagcggcctcacccatcagttctttctcagcgcaaatccatgctggaaagtggaaactgaaaagcacaagccacaacaatagtagcgcagtaggtgcagtacagtggagtacgagagaagaagagtgaactgggattgaaagcagaggtgggttctcaaaaaaaaagaaagcagaggtggacgacggggcatatgcatgcatggagcacgtcactgctcccaattcccaatggccacctgctaacttacacgtgccatcaactcctaacaaattttctttttcacccctaataatatttttttattctatacttcactaaatacaaaatattttaaaaaatgcccctaggttagtactcatgtatttatgtttaggaccttagaagttttgacttttcaagacttgtttgtctgtctgagtctgaatcgtctgatgtacaaagagtaacataaacatattatgactctatattgagttgatgataggagtcatttacttaaaaaaatatgcattctaaattttgtaattttcatgtaatttgataaattttgtaaatcctactaatttaaaagacatatcttccaaagtagtatttgttaaaggcatacagatacacttaaagaagttaattatccgttacaaatcttttttaaaaagttgaaatataattattcaccggacaagtactgctagctaaatacgacacataagaattagccaggcataaactaaccatatttactcttattgttgacaatattgttataattgtattctattttatctatgattagctaatcaacctgacaatctctatattgtgagataaatataggtggagggtatatcatatactgaccatataggtaagtaggtggcactaatagtaaacaaccttaagctttcagtcctctaaccatatctaatcataccaattataaatatatgttatttactctgtctaatggaagagaaaaaaggtttgaaagtaaataggcaagtattacaaataaaataaaataaagttttttaaattttttttccgtagtaatgctttaacaaagcttaaaatctttatatgaatagggttactacaggttaattgttcctcaaccttttcaaaagtcattaaatagtttcttctaaatgaacaagtgtatatatttttttctaaaaaaagtaaaatattgcatttgaaactcttaacagcaacaacaataactattataaatatgtaaatatgtactagctataagttggttttccaacgggcacgctgattttcttgaataggaaagcagggaattggaaaagactatagaaggaggatttggggaatgtttaagtttgttgccactttcaatcttaccgaattttggcattgccaaattttggtagtaaacacacttcaactattacgatgttacccaattttggcagttccagaagctctctcttaaaggcatcaaaatgtagtaaaggcatcaaaccaaacaaagcgaatgttaccaaaatttgataataccaaaatgtgttaaaattcgacattactaaaatttgatatggtcaatttttcaaacaaagtgtacaaaccatttatatctatttccgattctaatttttagggtgttcaatgaaaaatgttggactacttattatcgaaaccattcctaagccattatgcattattgggtaagttgaatgtaaaattttgtgattatgtagccttttttatatatatacaaatttagttatgatcaattcgtaattaccaggcttcataattaacagtgtactgggttcatgtaattgagctggcctatgtatactaaggcgtggcaaagccgcggttattttctagtgtatatcagaaattaatctctattgcaaatatctaaaattaagtcgatcacctgtaagtagccgacctcgacggtcttctcctacaattccctgatgtccatcacgccaagcgccacgagggcggcgatggcggagacggtggacgacggcgcgacggtgaggtcatccatcactgtgtacgtcaccttgccggggttaagccgaatagtactagttagagcaaataatagtatagtccactactagctccaatttatctatagtcaatctaatagctaattcatacaatagttgcttactatattattaatatattgtcccacctgtcatacacacattacattttggagttcgtgctgcagctggctacagatctatagcccgctgctcttctctctcatcgtttatctcattaaaatatgtttacagctggctaatagtctgctattgtacctgctcttaagcgggcctgacctatctctccctggataccccaaggcccatatgttcctattcaggccccctttgattcaaaggaaattcataggaattttaaaggattttattcctgtaggaatttttcctatatagccctttgaatcaaaggaatgaatactatggaatcctatgaaattcctatggaataccttttcccatgcaagttttggaggaaatttagcatgaggtagaacctcatattaagaatcctttgagtctttatctctccttaaattcctgtgtttttcttacggttcaatcaaacggtcattcctatgtttttcctgtgttttgtaatcctctgttttacacttatattcctgtgagaatcctatgtttttactattcctctgatttttcattcctgtgattcaaagggtcgattttgttccggaaccggtacagatgattgaagaacatacgatatcaatacgtgacaaactgacaatagaacggcaataattcatagagttcggaactctcactccccggcacataaaacaaagtagcgtttagtgcgtgattaattatggtttagctatttttttcatacatggagtataattttataagtaactttcgtatagaaactttttgtaaaaaaaaaagtaccgtttagcagtttgaaaaagtgcacatgaaaaacgaggaagaagagttgtgaacggctgggaacgaacgcatcctagatcgactgacaaaagcaccaccaacacataagatagctcaatggccggacaaggaacatgaacgttccaacaaaagcaaacgaggctcccgcgcaggcgatcacatcacatcaggccttcctcttcttgccaaggaagacatctgtgagcaccgtcttcgactgcagcgacgccttcagcatcgccaagccctgcaatagtgttgtacaaaattgacaaacagatcggaacagagagatgagagtacgcactgcaagcaatacacattgctcgtagagaaatagtagcactttacctcagtgtagccatctgcacggtcttctcctggagcgaggtgatgtcagtaacaccgaaggtggtgagcagcgtgatgccggagatggtggacatgggcgcgaccctgaggtcatccatgatcgtgtacgtcaccaccccctgcacaaatcccgtgccggcaacagcatatgctggttgcgccgcctcgccgccgctggccgatccggtagctgtagtgctcgtgctcgacaccacaagcttcattgccaccgtcatcttgccagggcatcgagcgatctgacaacgcaagccactcaccgtggaaacatagtcatagcactcgttgtagtcgcacgagctgcagcggtaaagtttcgtggccagcggcgccgccgtctccggcagctggaggagcttgccggtgtcgaagccaccggccggcgcgagcagcacgttcctggcgtcggcggagcggacgtaggtggcgtcgaggtcctcgacgctggcgtacagctcgccgatggagccgaccatggagtccttggagagaaccttgacgacggtgccgacggggagggtgaggagggagaagaggaagtcgacgacgtccttgccggcctccgcgtacagcacgcgctgcgccttgctgtccaccagcagcttcatgctcagcgccttcgagctggttgtctccgtcgccatcgtagcaactagcaagtgcttgtggctagcttggattggcttgctgtgtgagcagtagaatttatagcgagcagagacgagcaggaaggattacggacgagaggagagtaattagccgcccactgtaaattttcttgatcgatcaagcttttttgcatgcaaaaattgcagtcccaatatatgcgcgcatgtagacggtcaaattaataccgatcggttcagctccgccgcacgtagtatcagcacttgaatgaatcacccatttatgcgaggcaaccgaagcatcatgaatgcgactaccggtgcgtagaggaggttaatttgaaaagaaccaataatttgttttttttttgcgagatgtagaagttgaatttaaacttgcatgtttatgaagtgatatatcacatgttaatacgtcttcttttttttttcaaatttatttaagtgacatgcaaataacgagatgatatcctctcgagggataaaaatccactccccgaattatgaaatcacttttcctaataaaaactttaatgactatttaggtgtcacgcccggaatttctatccaaaattccaaacgcttacatgtgtgtgaacccttgtccaggaatcagccgaggcacacaataacaaattgataatagagtacaattattactctaattaataagcgaataaaatgtcattacagaggtagatagttcctctcaatcaataaagatctaagcagcggaaaataagataaacggcgcagacggctccactccacaggcagcttgaccaaggctacacctaatcctccacaccatcagcatcattgtagaactcttcctctaatgaatgattgcaaggtgagtatatgacatactcagcaagccacgcagcaaatatgtaagtgcacatgataacaaaggatggcatagtagggtttcatttgcaaaagcagcatttagcaaacatttgagaatttaataaaacagttaagtattaaacaatatttgtcggtgatatgggaccaggagtatcatgaccagaggcttgaggcagacgcaatcgcccacgtggcctggcaccttcggggacgtcgggcccgagggtgaggtgtccgccctcctcctgatttcccccgagggggggtcgggttacgcttgccccggccccgagggccgaggcaccccgaccccttaaagaagtctgcgccacatgtatgggataagtgagcacagctgtgctcacctaacagcatttattacagtctggtcaagcgtgtcacgctgcatgtaacgcagtacagcacgctcttttatccggtctgtgaccagtcacagaccggtcagatcaagggttaggtggcgactggcggtctgacgcgcgccttgccccatcccgtcaagacgaaagcctctaggcaactcgtctcaagccggagctagcgtgttatctcttagagatggcacgttagccctggttagatttataccaggcttcatcctaaccattacaggcaaggtgttacacgaagaagggcaaacatgcatcttgttaaactgacacatggtggacaaaagtgaccagtctgacactggtcgcgtcagcaacgggcagccacgatcccacgttgtgcccgtctccgccgggagtggaggtaggtgtgggctgtcccatcgaagtgtcattcgaacagcaaccataccaatctccgtccataaagagaagaaaagtccagtttggaaggaggagggtgcatgtggtatccccttgaagtataaaaggaggaccttgcccatagagaagggggttggttgattcttttccagatttagagcttagaacgggggagaagttggctgacacttggtagctcattcatacaccaatccacaaaaacacaggagtagggtattacgcttcccagcggcccgaacctgtatacatcgccgtgtctcgtgtttcttcctggcacgcgatctttccacacacagcgagagcttgagatctcaccctaagcccccggccgaactggcaaaggggggcctgcgcggtctcccggtgaggagccacgagctccgtcatctggcgcgccaggtagggggctcagtgtgtgttttctgagctctcatactcttccgtgtgcgccaagtttcccttgttctgcctaatggccgagcaagcaaaggcgcacgacctctctccgagtgtgagcggcgacgacggggagccaaacccgcgccgtcgagctcgtactcccccacctcctccacgccaaagtcctaagcagggggaggcgctcgagagggttgataaatccgcagcatcaccggtcgtgggtgatgcaggagaacggcgagatggggagcgtcgcctcctcgtctacggcgacggcagcacgcctcagggcgcgcttcaggctgctagcgcgctcctacgtcacccacccgtcgtccatgaccctgagtctccagctcagcgatggctggacgacgtggccaacttggtcgtgacggcccagcagcgcctgggtgctggtggacggtccgccaccaccaagacttccggcgccgccaccaccggttccgtgtcatcaaggcggagggcgcggcgagcggcggcggctgcacgtcattcggctgccactccctcgtcgacaccttcgactcgggaggatcagcatgaggagccggatgcccgcctcaacatcgagcgccggcgtaatagccggcgtactccccgtgcaacggagggcgcctcctcgtccagagtgtcacctcgacatggacgtgaggaccagccctccgtgcccccggctggtggtgtcggctgtagagcctttgtggcgagtcttcggaatgtccgttggcccccaaggttccggcccaccatcaccgagaagtatgatgggagcgtcaaccccaccgagtttctccaggtctatacgaccgggatcgaggccgctgggggagacgacagggtcatggcgaatttctttcccatggccctgaagggacaggcacggggttggctaatgaacctgccacccgcgtcggtccactcctgggaggatctgtgccagcagttcaccatgaactttcaaggcacttatccacgcccaggtgaagaagcggacttgcacgcagtacagcggggggatgatgaatcccttcgctcgtacattcagcgtttctgccaagtccgcaatactataccttgtatccctgcacacgcggtgatctacgcgttcagggggggtgtgcggcacaaccgcatgctcgaaaagattgcctccaaagagccccagactaccgcagagctttttcagctcgcggaccgagtggctcgtaaggaggaggcctggacctggaacccctccggttccggtgtggcagcttcggccgcccccggatccgccgctcagacagggcggcgtgacaggaggaggaagaaaaggtcggtccattccggcgacgagggtcacgtcctcgccgtcgagggcgctccgcgggccactcgaaaggggaggcctgcgtgcgacaaaaagaaagaggctggtactcccagcagggagcgccccgccggcaggtggtgctccgtccacaacacctccctccacgatctcgcggactgtcgcgcagtcaaaaacttggctgagcgaacgaggaagtgggaggaggacaggaggcaggaacgccgtgaggacaagtccgcggcagttccctccggtaaacggcgaagtgaggccagacagaaggcccccgccgttgaccccgatgacggtgatgatgacctaggtttccaagaacctggggccaccatcgccactgtcgacgggggagcgtgtgctcacgtttctcgccggagcttcaaggctatgaagcgagagcttctggccgcggcccctactcatgaggcgacgcgtcgggcgcggtggtcggaggtggccctcacctttgatcagaccgaccacccaccgtgcgttgcccggggagggcagattgcgatggtggtttcccccactatctgcaatgtgaagttggggcgtgtcctcatagatggaggagcggctctcaacatcctttcccccgcggcctttgatgctatcaaggccctggggatggtgctccgaccgtcccagccaattatcggtgtgacgccggggcacacgtggccattaggtcacatcgacctaccggtcaccttcggtggacccgccaacttccgcacggagcgggtgagcttcgatgtggcggacctcagtctgccctacaacgcggtcctagggaggcccgcgttggtgaagttcatggcggcggtccactacgcctacctccagatgaagatgccgggccccggtggccccatctctgtccgtggcgaccttaaagtcgcgctcgcttgcatggagcagcgcgcggaccacctcgctgctgcgaccaagcccgagggtggtgacgagaggcttggcacctccgcccccaccgccccgaggcagcggattgccacatgcgacgaggtcccggtcaaggaggttgccttgggcgacggcccatccaagaccacacggatcggtggtcttctggatggcaaatagggagacgcgctcgtctccttcctgcgggcaaacgctgacgtcttcgcatggagaccagcggacatgcccggggtccccagggaggtgattgagcaccgtctcgccgtgcggccgggcgcaaggccggtccggcagaaagtgcggcggcaggccccagaacgtcaagccttcatccgcgaggaggtggcgagacttctggaggccggattcatccgtgaagtcatccatccggagtggctggcgaacccggtggtcgttcccaaggcgaacggcaagcttcggatgtgcatcgactacaccgaccttaacaagattaagttgatctatacaaaagaggcatgaaggccttagaagaaagaaaaagaaaaaatcaaagattgacgggggctcgggggctcattccgacgcgcccgggtcgccggcctcgtcgccaccgtcgtcctcaccactggcatcgccctcctcgtcggagctaggggcgaacgcgagccgaggggccgagccctcgaaaccgttgacgatgtggtcggcggcatcccggacgcgcgcgcgcgcgtcgtcctcggtcccgggagggaactcctccagcgccatccatggagagaagttggggtcccgggcctggtagctcgccagcacgagttcgaccgctccctgcgcgaggtccctcgaggatgacttgatggtcttctcaagctcctcggggagttgttcgagaacccaggccatcctgttgaggtgcggagcgaggccttccagattggtggggggcaccgacgtctggcctctccagaggcccgcttgccgaccggcgcgcttcatgcgggagaccgcatcccaaagcatgtcgggcccaatctcgcccgccaagcgaagggcctcggcctccccggtggaggagtccagcgctcgctgcatttccgcgacggtgtgttcggcagctgcgaggcgggcggctaagtcgctttcgcccgcggccgccccgccgataggcgccctcgcgtccagctccttttcccgcgcctcgaggtcagcagcccgctgttccagtgcggctctctcggcgcggacgcattcaagattgcggcgcgcctgctcctcctgcgccgcctcgcgaagggacaggctgtccgccagccgtttggtcgtggcctcagcctcctcgagagcccgctcccgctcagcgagtgcgtcctcgcggaggcggagcgcgcactcctcctcggcgcaggcggcctcgtgcgccgccagcgtcgcctcccggagagcagcggcggcctcgcggtccatcaagcccctcaccacggtgccggcgtgttcttccagcgccatggcacgggactcaagggcctcctcgcgccgccgagacgtcgcttcagtctccgttacccgccgctctcgggcagcggcggagtcaaggaccccttgggcggcgtcgagctttttcttcagctccgcctcccagattgcgtgttgaaggcggagggtgtcttgcgcctcgatcatcgcggtggtggcgataagggcggcctctcgctcctcctccacctctcgggcgatctccgccagcgccgccttgcgggcttcaagctccgagatgtggcggcggtgagccttacggcccacctccaccatggcgtccaccgagcgccgcccctcctcaacgcgcgcccatgcggcctcgagctccgctcgttccgcacgcagggcctccacttgggcgttgaacccatccagcactgcggtgtttgcggcggccagggcctgcagaaggggctcggcgctcagcggggcgacagaagatgaggaaaagagccgccttggagaaaatgcgacgcggcttggccccccggaggatgcgctgggctcggggatgtcccccgggcccgtttggtcctgggcgtcgcccggtgaggtaggcccaggcgatgcgccagcggcctcgtcgcgagccgcctcggaggatgtcgcctgagggccgcccgagggagtgggcccaagtgacgcgccagcagcagctgtcgcctcagcctggcgagcccgggcggcctcctcccgggcagcttcttcggcttggcgagcccgggcggcctcccgggcggcctcttcagcttcccgaaggcgatctgcggcttcacgccggtcagcttctcgcctccgctcctctgcggccgccggatcttcggcctcggactggccggacttggggtggcgggaggaatgtgacggggcatcgctgaagcagaataaaaaaccagaagacaaacaagatgggtaagagaaaacttgcttaatgggatagaagaaagacggtcgcaataagaatggggcgaacctgcgagggggtcggttaaatgaccactttggaggggaaatcaggtttccccgggatggttccgtctcccccatcttgcggagccgcttcttcttgcgctccccctcgggctgcgacgtcggcgcggccccctccgggcgccgactgctggcacgcgccgccccgccccctcggggaggagatgtgggaggtgttcctcccagcttcctcttcccctgggcgtcggcagggcggctgctccccgagcccccgacgcggggcccagaagcacgaccccctcctggggcagattgttccccccggcggcgctcgcccgcgccgtcgtggcccttaggggctctctcctctgaggccccgacccccatcataatggttagaatggaggcgcggtcgggatcgctgtagagggggaggatctcctgaggaatgcgagacgcctccgcggagctaagattcagcaccctttgaaccacgatcttgaagtcctcgggagcccaatcccatctggctccctgatgggtccgcatgtagtcttcaggcccagtgtactcccaggcgctccgggcgcgccgttggagcggcgcaatccggcggcggaggtaatcgccgtacaccatggccccggtgagcccctgggatcgcaggcccgccaggcggtcgaggacggcgtcgtagtcctcccccagatctaccggcgcccgccagctggagacctgcgccgggggctggcttggaagtcggaggcgcgtttcgttggcgaggggggtgtagaaccagtcgctcttccagtcgtcccacttcttgcggaggacgcaggggatgtagcggttcaacaccggcccccgcggctggaagtagcagccgccgaccaccgacggcggtgacaccgactgcacggtgaagaaccaccggaacagctgaagagaggggcgcaccccaatgaacatctcgcacaggtgcgcgaagatggccaatgtcatcaccgcattgggggtgaggtgcgccatctggagatcgtagaactccaggacatccatgaagaaatgagaaaatggcgggaccagcccagccattgcgaaggggaggaagaagatggaccgccccgggtagtctggtgccgggcgcccctcgcccagcatcactatctcccgaccggtggcggactcaggcatgaagcggcgcggcagtccggcgtgcctctcgttcacgatgcgggaaggcggtagtacactgccgtcgagcagagcagagccccgtgccatggcggtggaggaagagatgattgagaacgagcgcgtgtggcgaaagtagggcgtagcagagaaagagttagagctcaggcggcgaaggcaagaggagcaatggcgaaaggaaggaagcaaatccttttctcgatgcttttatacccttgccatcgctgggcctggctcctcgtttctcgcgcccactacctcgctccttcgtatctcgctatctcgctccctcgtttcccgtccccacgcttccactaatcccattcgcccgcttacggcgcatgaagtggatatgcggttgaggcgatcgaaacggattgtatcgtgcgcgcgttaattacgctcgccgaccgaagcggcgttgccgtatctccgggcgagacgaatctgctcgcccagattcgcgcgctgctcaagtggtgtggcagtcttgaatagaccgcccattatggacaaccaaagttaccaataccaatgtgcatggattgagaccgttgggtattttgcccaactacggagaccggtcccacctgtcaccaggctttaggggtggtgtcggtgatatgggaccaggagtatcatgaccagaggcttgaggcagacgcaatcgcccacgtggcctggcaccttcggggacgtcgggcccgagggtgaggtgtccgccctcctcctgatttcccccgagggggggtc

SEQ ID NO: 4078 - DNA, 1263 bp, Oryza sativa
agagaagggggttggttgattcttttccagatttagagcttagaacgggggagaagttggctgacacttggtagctcattcatacaccaatccacaaaaacacaggagtagggtattacgcttcccagcggcccgaacctgtatacatcgccgtgtctcgtgtttcttcctggcacgcgatctttccacacacagcgagagcttgagatctcaccctaagcccccggccgaactggcaaaggggggcctgcgcggtctcccggtgaggagccacgagctccgtcaatattaatccaacgctatataacataccctgttgtataggctcaaccattctgaacaaccatcccggctgcacagttctatctccaaaccaggaatataccattccaaaccagaagctaatcaaattattaccagttagagcaccttttattatgatgagaagggtgagactaatcacgaaagacattgttagacccgcccataaccgcgggcacggctattcgaatagttttactctgatcagaggtgtaccactatacccacaagacacaaccccacatcatgtcaccatgtgcctcaataccaccacagtacctcggaaaggagttgtgacaataccccttgcacaacacaatccattacggcacacctttcctggatcataatcacccccttataaacaagacatggactccccagcgacccccgtgggcttatctccgccacttctcagtctggtgctccgcaatgaaccatgctatacaaaagataaagccgttgcccacgctggcttgtggttggcatggttaatgtttcacaaccgaaactcgtgaaccggtccttaattgtcatgagcacgactctcaaaaccatgtgctcacaacccaccattatcaagttttagttggtaagtaattaattaacctaatcacgattgaccatcgtgaactatcattatgccatcattaaataatagtgagtcataagttatcccaaaagtgtgctaatgtttctaagcatggctaagcaactataaataacatctagctgaaccaatccaatatataaggtccatgctagtcaaattataacccataggaaaataaagtcatcttcggccataattaaatgggaaaggctcaccacccaatgacattcgaaaacaatgcataagttgaaataaatcaatagctttaaacagattcaacatgctcaaagggttgtgtctaggatctgtgtgacttgccttgctggcct

SEQ ID NO: 4079 - DNA, 4924 bp, Oryza sativa
agagcttgcctcgccagacggcgccgccggcgacgtcacgactttggcgccggcgccggagacatcgtccggctcaacaagactcacctcggtcgccatcttcttcttgcacaccggacacggcgtgccgttcaccttggtcacgaagttgtagcagcttctcgagcaggcgcagccgctgcaccggtaaagggcgccgccgccgttgtcggcgtccgccggcgagcccaaccggagggcggccgtgggcgcgagcagcgcggccttgacgtcgccgcggcaggcgtagtcggcgccgagcttgtcaacgacgctgccgtagaggttgccgacggagccgaccatgtcgccggcagtgagcagcttggtgaccccggcgagcgggacagcgaggagggagaggaggaagtcgacgacgtccttgctgccctccgcgtacagcacgcgctgcgccttggtgtcgacgagcagcttcatggttagagtggcagctttagatgtttttccggccatctcacggtcacacactcttgcgtacgagagatcagaagcaccaaactagaatggagaaggtttggattgcagcgagatttgaagcaacctcgaaatttaaatggtctttttttatagtggagctgtacgatgcaggcacatcaatgcgaatgacaccgtgcacgtcgcttcgtttcccggccgtgacatggaccggcgcacgaagtcacgaaccgccggaagagggggagagagagagaaacgagaggagactagaaagcagacgatgggacgagaaaagtcgatgatgcatgggtcctacctccatccatatcccttctttctataatataaagttaaggccaaaaactcaaaccacatgcttctacatcatcatcaaatagtgaaccgttggataaatgcattagatcgcttctcagatgttggatagaatgtagcatagagctcaacccattagtcaccgggtgagtctcttcgcctcttcagtgccaaatgtaacccacatgaacacattggcccatctccacacacatctatatgtatctagcccgtcaatctgtataaaagagctttatgactgaatgccccttcagttgacatgtgctacctaaattatctacaaattttggatagagctgctaaaaagaatttattcaagaaagctatttgtttcttctgtttctttttgagattgtacctcatatctaacaatttgatgttaaccaagtctcgcagcaacacgcggggcatcctctagttggtactatggctgtgttcgggaggaggggtcttcctccccggcacgcaaaatgaaacccctcctccatctcatattactcgctttaagtttctgtttgtaacgaaaatgtttgatcattcgttattcactctattatttattttgtttgtgacttactttattattaaaagtgctttaattgaattatctatttttatatttatactaatttttcaaataaaacaaatgattaaacgtcgaagaaaaagtcaaagcgatttttattatcgaagaagatagtacgtcaatagaaatatttttttcaaaccatcaaaagcgtttatttgcattggtttttaaggtgcgggagatgttattggctttgaagatgccggagatgttatttccggttgtgtggtttagaaagacaattcaatgaggaagagtcaaaatagactttttccctccgataacgtgggcattcgtggtgggccgttatgtaaatgggccgagaggagtggtccgatttactacaggctataaaggaagcaaacctactgctcgtgctcatcgtcctcgccgtcgattccctcctcctcctcgccgtcgtcgcaggccggcggctgcggcgggcaggcctgcggcgggcatcaagggcaatccattgtgtgagcgagttcctcaccgtcctccgtgctgtacattctcctctcaccttacagattgctctctatttttgttttccttacgcgcgatgaatctgccctacctgattatttcgtctagtttagggatcctcgtggtggttgtttctccaccttattttcggttggtttttctcctaatatatatatttttatcgtcagccttgcaagcgcttggaggttttggggacggagggttttgagtatgtgggttttgggggagggaggttgtatgagtaaatacagatttcttttcacattttccatattggagactattggagtatggtgcgtgattgtccacaatttattcacacaactatggatgcctcattgattttcataactttttgagtatcgcgtgtgatttgtttctcgaagacgatatggcgtgtgattttccacagtttattcaaacaactacggatgtcccgtattgatagcagaccggagatctagcaatgcaaacgaaatgattatttgtagttgaatattctagtataatggagtttcctagcatgatccaactgtgaattctagcccaaaatataaaggactacccaatttgaatggaagaaataaaaagtaatataagcctgatctttggtatttttagtttgtgtctaacactatgttccactaatctttgtatgtccttacctgcttatgcaacgctgcaagcctgcaacctatgagtttgcctgtaagaacatttataagattgtggtttatccgtttttcctgcttttccaaatgacatgttcagaaaagcagactactgcactgaattcatttttctttcgcgaacgtgtaaaaggattgcatggcatcccatttagacgaaagcaagttgaacccatttttccatatcactatttggaaaatattaacaaactgctctattattaatacttatatgaaatttggaaattatgttatatatgcatgaattgttaccttactccgcaggagaatttgtatgtaggaggtcattttttccccttactttagagcagctatcaaccaatataatctagatgtttcaaactttcaatggaatacaatctggaacatgtttttgctttatctgctttaaattataacgctttctctgaacatttggacgataactgtagttaattgaaaacccatttaattttcttttgctggtgattgcagaagcaatcaatcaactcccaagaaatttaaagaacttcgaataaaaaggatcatggctgccgctgaattgtcgatcaagctcgtgattgataccaaagctcacaaagtctgctttgccgaagctggcagtgacttcgtcgagttcctctccagcctcctttgtctccctgtaagcaatatcatcaacctgcttaccaaggaacatatggttggaagcattgcaaatgtgtttgacagcgtggagaagctggacgccgatcatgtaatctcaaacgaaagcaaggagccttaccttaagccaatggttgcccctggagcgctctgtcctttgcagcagctgatagatgcacagctagacaccgataccagcttcttcacatgtgaagggaaattgaaccattaccacggcattcgtgttgcttgtggatattttacggttatgaaaggcagcatttgccctaagtgcggctacgcaatggagaaggcaatggcacatgtcaaagccactgggtttgtggttgggacagccaggtacactgtcaaggatgatctctcaattgttccagcatccagcgtgtcaaccatcagcttgcttgcacaatgcggtgtcaaggacttgagcacgctgcaggaaaggaccgtgaagattggcaaggaagaggtttgtacatatctatcagaatcactttgagtgaagagaacagtcgtagtcgtttttcttaattggtgtggttgatgattttctgtgttacaatgtaggcactggagatactccttgcatccctgaggactaagaccgtgctgactgatgtatttctcctgaagaaaaaagttagttgcaagagggaggctgctacttagttagtatgatacatgtatgatacatgagcagttttaccaggcatcgcatctgagaaattggaaagttccgtacaagttacagaccttcattgtgagcatggagtaggtttccatttgtcttaaagggaaagcatcactttgtattgctcatttttagattagtcttaaatacacttggaatagtttttttttaatagaaatgttacaacccagccagtgaaatcttactgtcaatttgcgtctcgctataaatatgtttctgcttgccttctagaggtaaatgtaacaggtatgacttcattttttttaaaggattgattgcattcgagggtagaagcaccaccaaggatgaaggttgagatgcagcgagattttcacaatgacggatttaaaaagaaataacaggaggtctgaacaaagtaaacacttcctatctagatagaacaaaaaattttagtaagacctcgtagggcctctcatgattctcatgccgatagtggaggcttagccctctcatggttctcacgccaatagtagaggcttagcccccgtcgtcatcatgagttaatatttccgtctcaaaatataacaactttcggtgtatgaaatttattttaaaatataacaatatctatcgcatacatttttgtcccgatcaataacaatctttcctctcgacgaaagcgatcacaatcttttttcatttaattcaatcaacttttttaataaccttattcaacttccgactgacatcgtgcacgtcggttcgcttcgtttaccgaccgtggctgcgttggggagtgagggttaccaacgctactctctagcacgcaaaacggagcaatgtttagcgcatgattaattaagtattagctaattttttttcttaaaaatagattaatatgatctttttaagcaattttcgtat

SEQ ID NO: 4080 - DNA, 528 bp, Oryza sativa
aggtcgactctagaggatccccatgtagactaggccaccctcactaaccataccaataggaaagcatactatgaaggtgctgtacctgcaaagaaatcagtatgaaaataataagtacttatttttaagagaattcacagataatgagtttcatttgaagtttgcgctacatattatgatctgtttacagctagaaccaacctaagccataagagccaggaaggtgtaaatccaaatgactccttcatgccattgaaagaatatctggtaacctgcaaggaataagtttttttttctacaaagtcatgctctgtagtgaagaaattttcataatctttgttcagctaagctcaaaacaggaactttcaaagcttggcattttctttcaggaaaacaactactatcattttaagaagcagaattataataaaattgcatccaaaattcatggtcttccaagtgagtaatttggtcaaaagttttagggagtaacatacctcagtgatgggtaccgagctcgaattcgcc

SEQ ID NO: 4081 - DNA, 629 bp, Oryza sativa
atgaaactaccgaagcacatgcagcttgaaataatggaattcaagtcaatcttgccactcactgaccttggccatgaaagactgtcaattttgctgtcagtgtaaaccttcactgaacatttgtccaactggagaacattatacaaatagatagttctataagataccacagcttttagagttctatgattcacctccaaataatgagtaggtagttctatcctttcgattcatatcttcctacttaacggggatccatagcaataggtccaatttctatataaagaagacttgtaaacaaaaggacttattgctctttttcggttttccgcttcacctattgttcttatcaattcattttcctccttccttctttcaataagaactatttgaaatgaaacaaattcctattcattctgttacagaaacagggaattataaccagcttcaactgtctacatacttcaataaagatcaacctaattcaattgctttgtcactcttatgtgacgatgatattgatcagagccattaatatttaagatcaagaactccaagattctaatatgcataacaagcatggcgtctaagtgtcacaaaatacaacatcactcaatcacaccattgta

SEQ ID NO: 4082 - DNA, 576 bp, Oryza sativa
cacttatcaaatggaggtagagctcttcctttctaagttattcaggttaccttcatgaaagggaaggcaatatagattaggccaacctcactaaccataccaacaggatagcatactataaaggtgctgtacctgcgaagaaatcagtatgaaaacagtgaagcaattttttttaagataatttactaataagataatgagcaatttttcgaagcttatgctaatacatattgtgatatgtttacaactagaaccaacctaagccataagagccaggaaggtgtaaatccaaatgattcctttatgccaaagaaggaatatctgatgacctgcaaggaattatagtaaattttccacgaagttatgctctgaaatgaagaaaaaaaaatcataatctatgttcgactaaggcaacaacttcaataactaccgtcatttcaagaagcagagttgttgtttaactactgtcatttcaaaaagaagaattgttgtttatcatcttataataaaattgcatctgaaattcatggtctaccaagcgagtaatttggtgactagttttgggggcaacacata

SEQ ID NO: 4083 - DNA, 1234 bp, Oryza sativa
catgtccagtgaataaaaagcatgcacatatggcctaatgctcttatttcatctcagcataacattaattacttttaaaagaattatcgatcaatctacaaattgaaaattgaaagcatggtactctcaatagtatgaagtgtcaaatataatacctgctcgggtgagataccgatgatctcaaaaatcctttgttgtacatcacttttgtatatcctcaaactgcctcctccaatctatatttatagcatgcagaacaaaaaagatgcatgttatgattttctacatagatctttacatgaattccagtacatataaagatacacaacttttattgatgtatcagatcagactctgcagtctgcacaccttgtttcattggctattattacagaaaaagggtctaaactcaaaagaaaccagccaaccagtcttacgaattaatcacatctatctgtcatggtcaatttgagatgagtatttagcatctgagattttaaatcacattccaatgaacaaatacagatagacttgtagaaagggctataatgttatcataatccatatttaaactagaagaatgtcttcaataaatgttgaagagcatgtgccatgtatggatacagtccacatgcattacaatacctcaaccccaagactttattaagacttgtgcttcaatgcttacacaagattttgcatcaaggagaatatgtgctaaattttctactatataaatcatgtaaaagagcatgtgcaatcttggacccttttctgaactagtatgtactgaacaaggtagcaagaaacttgatgcagtgaaagtacctccactccattgtaaatcatgtcataagccaaggctcgagctgatggtagatcattcatatcttcaggatttggtgcagtgaaaggatggtgtagtgcctatgagaacaatggagatgctcagagcacgcaaaacacaagacaatctttactttgagttacatgtcaattctctgttttaccagtgtctaaatttcttacatttaactgtttttccttctcagttgttcaggagagcaatgctcattcactgtaagcattaatgacagattacacattttgtaaattttgctattggtatccctatgaaaatttagattgaacatgtaaaactgtgtatgtttgcctcaaaccttccgtgacattgcaatcaaatttgcattctggagacttgtcaatgtccaaa

SEQ ID NO: 4084 - DNA, 3305 bp, Oryza sativa
acttggacacaggagtgtgctaacccaacccaaacaaaaattgatcgtgctttctgttgtcctgattgggatgtcctctttgactctgcgcacatgtctgcactctcttcgtcctgctctaaccatgcccctttattcataactggctgtatggaaagagaacaaaataattccttccgctttgaatcttattggctcaagctcccagatttccggcaagtaactgcagagtcctggaataggccactacagactaccaatcctttcgtgcgactccatttaaaattaaaaaggcttgcaagagatcttagaagatggaaatcaaccagaataggagatataagattgcaattggcaattgcaaatgaagtagtctttcaactggatgttgctcaagacgatagagtattatcggaggaagaacagtgcctccggaaactcttaaaatcaacggtgcttggactggcagctttagagagaatacgactaaggcaaagagccaggatcacttggttaaagcatggagacgttaactctaaattcttccaaatcaaagcaaatggtagaaagagaaaaaatcacatacagatccttcgaactccagatggctttgctgtaactaaagatcaaaagcaggaagaattgaagcgttacttcacacaaaaattaggagcctttgctctcagaaatcagagattaaactggctgctctcaatctccctacgcttgatctctcagatctcgatgataacttcactgaagaagaactcaaaaatgcaatctctgacttgccttcggaaaaatctcctggaccagatggatttattggagcctttttcaaacaagcatgggacataataaaaacagatctcatacaagctgtttccttctttggagatatgggatgtgcaagactgcaagaactcaattcggcacatatctgcctcatccctaaaaaggcggatgcaacaaaagcgaaggatttccggccaataagtctaatgcatagttttgcaaaaatagtcaagctaaatcactagcaaacagacttgcaccaaaattagatgagctagtctctcaaagtcaaagtgcattcattaggaaaagagcaatacatgacaatgtcctgtttgttcagaaaaaaaagcctactcttttcctcaaagttgacatatcgaaggctttcgacacagttaattgggcatacttgctagaggtccttcaaatctttggctttggacataaatggtgcaactggatttccaacctactaggtacttcctcttctgcggttcttcttaatggtatcccaggtcaggaaatagaccgtgctagaggtcttcggcagggcgatcccctttcccccatgcttttcatccttgcaatggaacccctgcacaaattattcaagaaagcagaggatcttggccttctctctagtctgcaaagacagcggcgcttcagatgttctctctacgtagatgatgttggtctttttataaagcccattcgagaagaaatgctagtccttcgtggaattctttctgtctttgcagatgccagtggacttcacacaaacatggaaaaaacatagatcttcccgataagctgtaacggagtcaacctagataactgcctttccatcttcccaggtggaatttcaaacttcccatgtaagtacttgggcctgcctttgcacacaagaaaattggggaaattagagcttcaacctctggtggacaaagtgggatcgagaattcctggttggaaaggtcgcttcttcacttcggcaggtagagaggtgctggttaaaaacactctttcctctaccccaatttatcacctaacaattctccagcaaaataaatggctttacaaaaggatcgatcgccttaggcgagctttcctttggaaaggtgacgatcctgaaaacgttagcgggggcagttgtcttttgaattggacagtcgtctgcaagcccaaacctttgggcgggcttggaattctcaatttagagaaattcgctcgggctttaagacttcgatggctctggtacgaatggaaagaggaaaataaaccctggatcaatatggaaattccatgtgatgagatggacagaaatctcttcagagcaagtacacaaatttccctgggaaacgaaaagaaatgcaagttttggtcagacaattggctgcaaggatacgctcctaaagacatagcgccgacattattcagattagcaaagaggaaaacaaactgcgtagcctttgagctgcacaataatcactggatcacttccttaagaacaatcacttcaataaatgagatcaatgagctggtgcacctaggcagtaagctgcatgagatcagattacaccccaattctttggatagtatcacgtggaagtggactaatcatggtgaatactctgcaaaaagcgcttatgaaatgcagtttgtaggatcagttgccaacacaaattttatgccactttggagagctgaagcggaacctaagcatcggttctttggctggttaattttacatcaaagaattctcacagctgaaaacctccttttaagacattggccatgcgattggatttacagcttatgtacagatgcttttgaggacgcaaaccatttggcaaaggagtgcagtttcactaacacggtttggtcccaagtttgtagctggctggacatcatgcagaccccaaatcaactacaggatgcaaacattttagaatggtggacctcaatcatacattcaacttatggaaggagaagaagaaaactgataggggcacttcttataacctggtggcaggtgtggcttgagcgcaatcgaagaattttccatcaaaagcaactaagtgccacccaagtagctttcttagtaaaggaaaatatagatgccattcagattttgcgccatacataaaggcttgtgcttagctctagttgatagcattatgtatgtaaatctctgaaaatgaaaactgaaaatgtcacctagtggtctactctttcttgacctctctaactgcttctccttctaatatatccggcagagctcctgccgtcttttgcttaaaaaaatatatttcatcttttttagttaagttattttaggtcggagaaaatatatatctgacgtgcctatcaacaagacaacaacgtagagttgtcagcattagcttgccacaggtttgacttgcaagttgcatgtgagtgtagcttcgacgcagcaacctggtgacctggattcgtggagagcaaacgaattgggatgtgcgagccga

SEQ ID NO: 4085 - DNA, 557 bp, Oryza sativa
attatctttccttttgagatcatatatacattactcaaaagtgaaaacttaaaaccaccaagacattagctcattcagaggaacatatagcaaggagtaaaaggtaaaaggcacattcactgaggtactggttaaacaaattccttaaacgttactggaaatggaaaacatgacttcttgtgaacatgattgagtttgtacttatattggttatgaaaatcaacctattgcatgttctaaacatataaggttgtaagaattaatatatacccatctgtggaaaagaagtgcaaatatgttcgctgcaaaagactggctccagagttgcactatcaagtcaagtatacgcctcccactttcaggtactttaacaaaatggttagcaagaatctcatagaagcacaaccgggtatcttctcgctcatctactggagcaataccatcattcgtttttcccgtgcttaaaatacatctgttaaaaagaaataagtatgtaacatagcaaaaacacttgtaacaagattgagtagtattatgacccaaacattgatcataaa

SEQ ID NO: 4086 - DNA, 2680 bp, Oryza sativa
catcattcatcagtcaacactcaccactcctcttctctttctctgttttatattagtgctttgcatgtacacgttgccatgtccgtgatgctgcatatatgttgtgtttgtgttttgtagggcctggcgatcctgagggcctcgctgcagtccaagaccgttctcagcgacgttttccttgccaggaggcctgcaaagcaagcctgaattctactactacttcaacaacgctggtcgctggcgatgtcaaaatgcaagccatctcgatcgataagtagttaactatacgactgtattggtctttagtgatgcctgtaaattaatgcgtactactagtagtatcttgtgccgtcgtgcactcgtgcgcgccccagatcttttgctagctagtagctgaagtgcagcatgatgaaggttaagcctgaagcaatttgggatgttcaagcaatacccgtatagtagtgtgcgtagaagtcccccttaatctgtgtgaatcaggactctccgctggtaagaatcaccatgtgtactactgtactgctgtttctaatgctaccgctgtttctaatgtgcttgactgttcttgatttgcttgcctctgaaactctcaatttgatccggtgttgtccggttttcctttgctttttggactggaccggtcgaggcttgcatctcttttgctcgagcaatctatgaactctcctcttgctgttgtctttcgccgttcctgtctggttcagttcaagcagcagcaatgctcagaagaactcgaaatttctttctccttaatgaagaatttggactgaattcgaaataatttccacatgagcatgacgtagactacataaattttaaaggcctcctacaagaacgtcgcagaaatcaaccaacgcattatgcttctgtttggtggtaaagttctttcaaaagtaggatctgtttttttgacattaatctgaactgaactagacgtcaaaatcatgtggcatcggcggcgcgctcttctccatctggactgcggcggcggcgtctttcttctcgctcgttgctcgggcgtcgacgttcttgtcgccggatctatggtgcttgtcgccggcacgagccttcttcttcctgttcaggaagacatctgtcaacacggtcttggactgcaacgatgccttcagaatctccaaaccctgcaaattcgcatcaaaacaaagtaagccgagtttagtttcaaactttttctttaaatttctaatttttctatcacatcaaaactttcctacacacatactcccttcgtccttaaaaaaaaagacaaaccctgggtttgcgtgtctaactttaactgtccgtcttatatgaaatttttttataattcgtatttttattgttgttagatgataaaacatgtctttttaatttttttcattatttttttaaataaaacggacagtcaaacattgggcacggaaacagggttcgtcttttttttttttgacggagggagtaacttccaactttccgtcacatcattctaatttcaatcaaacttttaattttgacgtgaactaaacacaccctaagtagtaaattagtatggagaattcgatgaagaatttatctggttaatttatcacctcttggtagccgatcttgaccgtcttttcctcgagcgcggagaggtcctcgacgccgagcttgctgagcagcgcgatgctggagatgctcgacatgggcatgaaggtgaggtcgtccatgacggtgtacgtcaccacgtcccgcacgaaccctttgccagtctgggcggcggcgaggcaggtcgaacagcggcagcccgtgtccgacgacatccccgcgccgaagggcgggaacgccgccttcagagacggcagagacggggtcgtcggccggatggtcgaacactggtaggccgggtggcccggcggcggcggcggaggaggaggaggagcaacgtacggcgcctggacgcgcgggggctggacgagggacgggaagccaccggcggtggcggcgaggcaggggtgcgccggcgccgggttcagcagcgcgtcgcgcgcctccgcgctctgcatgtacgcggcgtccatcctcctcacgctggcgtacacgttcgcgacgccgccgagcgcgttctcgcccgcgagcagcttcaccacggcgccgaccggcatggcgaggagcccgacgaggaagtcgacgacgtccttgccggcctcggcgaagagcacgacctgggcctccttggcgatgagcagcttgatggtcggcgtcgtcgacggcgccgcgtccgccgaagcgcacgacgacggcacggcggcggcgttgcccatgttgttgcctgcttcaaccaagcgccgcgtacgtaaaaccctcgcaggatcagatcgctttgtatagttgttaagtcgagcaaattttcacggaatatatggagcgtgaaaccgattggtgcacgattgccaacaaccgcgatctttccgtatatttgattttgtaattttccattatctctatgtatagttgtattctgcattattttaaggaaaacgatatgataaccatagcgaattcgacggtagatatgataggcaattgctgtgcacgcggatattacgaatctgacgataaatctgtaaaacctagtatggttctaacccggtaatccggtgta

SEQ ID NO: 4087 - DNA, 6686 bp, Oryza sativa
acacgattagccgcgttttttggcgtttcaacgcgagacactcttagtgggaaatttggagttcactgatcttcaggtgttccatcttgcgcaaagtgtgatgtcgggtatgtttagctcggttcagacttcagagtctgaaacttttatgaggtgcatgcgtgtattatccagtgtctagaatttgtctctgacgtgaattatcaagtgtctagaatttaagtcagatcaaggagccaacacccggagatttattaatcaaatggtgcatattagcttttgtcaatcgtgatttctagctttgaactgttgttaacttacacaagaaacgcgtcatgcacttggagaacggtagtggtattgatgcttcttgtcgaatttctcgtatgcatatatgctgagaaatgcgaaagaaaagcacgggtattttgtgtgatttcaatgtcgtagtgtggtctgtatcaatcttcaaatatttgcttgctaaagactgacatgattcattttgatgtaacagaacgggaccactgatcaggtggacaaaattgtgaaaattctgaatgagggacagattgcttctacagatgttgttggtatgtgggactacgttgcagattgattccttttaagtgcgatattttctgtttttatcattcccacgaaatctgtatacaaaaaaactgcatggtaggacatgcttatcaatctggaaccattgtgctgcagaggtggttgtcagcccaccttatgtgttccttcccgtggtcaagagtcagctgcgcccggagatccaagttgctgctcagaattgttgggtgaagaagggcggggctttcaccggtgaggtcaggttagttatcagttctgtttcagttgtacacccaacatgctgtaatgatcaccagaaggttagctacaaacctacttgcagaaagatgcgccattacgctgtttgattaggtctcatatttaacatcacccagaaacaatgccatcttttcaagctagcatgccatcttttcaagctagcctgccttcacttggtattacatgttgcatgttgttatatttgctcagtcacagttagtgttgtatgattggcagtctcaatagccgtcttcgcttttaggcgaggttataagccattcaccattgaactcatcttttgtttaagttggttgttaatctattatttttaatgcagcgctgagatgcttgtcaaccttagtattccctgggttattcttggacactctgaaaggaggagtttgttgggtgaatcaaatgaggtatgatctagtttacattctatgaaatgtgcagatatgaattttgtatagttttagctggaaatagtgcaacaagccaaacctggggataacggtcactggagacaatattgtagctacttagctggcactaaatttgatcctaatccaatatatcaccaacttaattttacaaaggtgatcttgttcgctacaaattggtggatgatctgctgtgaggttttcgtatcataatcatctaatggtttcctgctctttcctgaattgcagtttgttggagacaaagtggcatatgcgctctctcagggcttgaaggtcattgcatgtgttggtgagactctcgagcagcgggaatctggttcgaccatggatgttgttgctgcacaaacaaaagcaatttctggtatctaacctctacttttggtctttttgactctgttgaattccttatccatttgtgtactcgtttgatctaaatggtttgctgttcgcctatatgttcaaatggtatctaggataattttccattcattgaagctttatcttgcgaaagttagttagatctcttttgatgcactactcatttcttgtttggctaaattctacacattctacatcagaaaaaaaaaatcttgctaaaagtcttataagccacttggttatcacatattcactatgtgggagcactctaaaaatgggaacatctggtgatcagatgaatccacaggcagtaatgtaatgtaatagttcaagtgattacttgttcaagtggttaatggtttaatctagaccttaatgtaatgtctcatagttagcatcatttgataaaagattagctcatcacatgagaattcaggctgaaatgactatggactgttttacagaaaggatcaaggattggactaatgtggttgttgcctatgaacctgtgtgggccattggaactggtaaagttgctacaccagatcaagcacaagaagtaagtttcttatattgataagcacacaaagtgttcattcatgaacttctgcacgttccataattgttacctatgctctagataaaatatcttgtttaaacaaccatctggtttgtattattgtatcaggtgcatgatggcctgaggaagtggctcgctgctaatgtcagtgcagaggttgctgaatcaacaaggatcatctatggaggtataaatctacagtatattttcttgaacaaacactttacgattgattgcacaagtgcaccttaggcgacaactgtcctggtgcctggacatgattgtttacatgattttgctacaggttccgtaactggtgcgaactgcaaggagctggcagcaaagcctgatgttgatggttttctcgtcggtggtgcttcattgaaggtaaagaataatacgaacacagtagaacgattgtacagacatgattacccgcctgattcactgaataccgtctccctttctttgttctgtagcctgaattcatcgacatcatcaactccgccaccgtgaagtccgcctaagatcttcaccccattcaccttcggcgtgggaagatgtctgaagaggatcatacctttttctgtgcttatgtaatgctagtagttttgtgctggagcagctactctttttcctccccttcacttccctgaagctacctgcagcttgagcaatgctaataatgcacaccactgaacatactaccataccaataatgtttagctccttttgtcgtgagttattatcatgtgagtgtcagatcagatttcactggtcccttcacctattcttgctggcatatcagtctgatgaatcaggcatcaattctggtttctctgtgttatggtctgcaatgtctagtgaggtttaaggtttttgcatcttttggtccccatgattgattccaagtaacaggctaactgccatagtacctcaaattttggaatatcttgtgttgtgtgctgatctgctcagttggcacaatcctctgaacgcaaccgttgagcaaactttgcacggttgctgccaatcaatttgagaatggaccaatctttcgtcagatgtctggaccttgcatcacactttcgtacgatgatatattctcttgagcagtatacaaacttttaggccgccattattataaggccatgggtttcataacaaaattttaaccagaattggcaaaactcttaatagcatagtactcgatatgtaatttgattctttggccactattagcccatcgaataatttgattatttggtcagataaacaaagttatcgtgtaccaagagtttgggtatttgatctcagaactacaaaagatgaacacaaatttggcaaatttgatttcagaacggattgattatggactatggaggtagatctcagaaccaaaaaaaatgaacacaaatttgagatggatctcagaacggcttaaaaactagtaaaatttagattcagctgtgtttaactcgagttttaactcaagaaattaactggacggtccgctgccgcttcccgccattactgggcagcataaataaatgagttcccgcgagctcatctccctcaaccgcctcgcgagaattcaagccgctcatgcgttgcatcgccgcgcgcttcgcgtcacccccacgggaagcgtgaccccgctcacgccgcgctccaccgccgccgccgccgccgcctcctcctcctctcctgctccctctccaaccagcaaccgagagctcacctgttcttgtttctcccggcaccgaaagtgagaagaaaaaggagaggtataaatgagctcgccgacgccatcacgggccgccgccgcgtcgtcgtaccggaggcgtgggaggtgcacaataagaagggcgcgggtgcggcggtgcaggatgaagctgatgtacttcctgatggacaaggaggagaagcatcggaagcgggcggagctggagctggaggtgtcggagctggaggcggcgctcgacaaggagacgcgcctcggcaggatcctccactgctccctccagggccgcgtcgtctgccattgctgcctctccaccctcgttcctaacaaggtgatcgattgattagtagtagtagtgatcagcctctgttcatctgaattttcttgggttcttcgcattgtgatatttgctggttctttggaaatgatttgcagttatttttcttgaaatttcaaagaagttactgttttgcagataatttttactgtctctgacgaggtaccagaattacattagaaaatgtggttccttctgttacctcgttaaggatagtaaaattactcttttttcgagcccgaaaaacctcaataaatgactctttcgtgtctccatttcattgtcgaggctgttgagactggagaaagtttgatgaaaacatgattgcaagtgattcatcagtggcgtacagtcgaagagagagttgtcatgataagatttgacacctgatactgatactgtccagtttatgcctgctgcttgtctgcaatgagcatggagtagacacaccaggatatccccctatgataattgtgacagatgattgcttcttgggaatttttcgtagtcagggatttcagaaactcagagagtcagtgaatgattcttactgtatctcaggttgaaaaactgtgcccactttggattccttcccccaacgtacaatgttatctggatctctgactcctgacatgaggacaatacaagtactgtttgcccatttcattgcacaatcttgatttgtctacagataatctctcacaccttatctaccagatctgctccccttggatcctggccactcgtacccgttataacttgtcgatcgcttgcaagatggagccatagattcatagtaattctttctattttattcctttttaattcaccttgtggtaacagccaatgtaaaatttctgctgtatttcatactcttctgagtaacctgagcaagtgagcagcacactactctgatcaattatcggtgcatgtctgtccatttcgattatcagagaatgcgaaaagtatatcactataagccatcatatcacttgaaacactttggtaagtcaataattcattctttccattgttgcagatcaggggcctccttgcagagctagcaattgtggaggatgagatattctacctggagaagaaggtggacgacttacggctgcggcttcaccgggagcgcaagtggactgatcagtgcatttttcagcagcagcagcagaattggccgcaaaatcgccatcagaggcactccatctgcagccttggtggaaggagggagcttcaaggagctgagttgctaccaaggctaccttgtcctggcagtgatgaagctcttgaatgtgaaagcaaggcttctgttggatctgtctctagcaaaggtacacaaatttcatcattcatatgcactccaaagttctaggtctaaaaatgttctgttggttgttgagttcttgctcaagtattcagagtcatcaggacacataaaattcagtctgtcaactttttgttcatcttcgcagagagaattttagtacacaggcttctttgcagattcctcttttatattatacagcacaaacgaacatcttgctgcatctatctatcagagaaggatagaaaacattttgattcatgattctttttttgttgagtaggtgaggaagttgagcaaatacgaagaagcagccactcatttgagaatttgaagctccctgaaaggaaaatctgcttgagtggcccaaataagctctctgaggagctgatcagactgacagtgaacatcttccacaagctgaataaaacaacgaatgcagcagagctggagatgagcagcacatcaaagctcaacatctcctgcattggccccagaagtcttgttcctaagtcgtctgcgatcaccggcgcagccattagcactctcaagaaccgcagaatgtcacagggcggcgacggagcagagaaggagattgggtgccacaagagatttgttgaatttacgaagagctcgtttgatgtaagccgcatatcgtcgtgtcttgtagacatcaagaacttgaggtgagctataacccctttttttgttgcagtacagtaatcaaagtaaaactcgattctgatgtcacttgttttgcttccacagaatcttgatgcagaggctttgcaatgttgatccaagttttctgacgaacaagcagaagctggcgttctggattaacatctacaacttctgcataatgcatgtacagtaagctgccctgatcaacaaaacacactggtgatgaaataagcactgcttcattcattgctaatgcaagaaactgtactttacaatggttttaggcatgtcttcagcatggg

SEQ ID NO: 4088 - DNA, 17218 bp, Oryza sativa
agaggggaggggaggaggaagaggattggatctgagaagagcaagagaggggatgttccaatcttatctaaatatctgtctgggatttaaccgatgggatgtgggagataaatatttactcccggttgataactccaactgggactaaagatcaatctttagtcccggttggtaataccaaccgggagtaaagatcactcgatctttagtcccggttggtgataccaatcgggactaaagtggtaatctttagtcccggttggtagtatcaaccgggactaaagatcctcgaccccctgacatacatctgacaggggatgaaccgggactacaaatcatctttagtcccggttggtgtagatcaaaattttttaaaccgggactacaaatcgtttttagtcccggtttttaatggaaccgggactattgtgaaatttggtcgaccgaccaaagatggtttctccaccagtgttacggcaccgggagcagcagagggggttggccatgctaggctccgccggaggctttggacaacctggagcggaggatcctcgacgacatgaagcaggctcatgaaaaatatcctcggtgtggagcctgccattgcagagagcaaacctcggtcgttttggaggtctctatttctcttcatctgtcgctgtgcagtgggattggcaatgtttggagtctttggagatttcgcgctcgcagcactcaagagatgggccttcgatttccttcagagtccggaggtgactcagatcctcaaaaccttcatcaacaacagatattacggatatgtgactaaattggttataaacatgtagttttgttagaccaaatcttaaatatgtatttttttttataaaattaatattaaatccgtagttttgtgatacatccagttaaatttttagttttacgataatttaatcacaatatccgtgaaatttactcttagattatagactaaccatgcatacggtaacaagtactccctccgtctcaaaaaaaagacaaaccctggtttccgtgcccaatgtttgaccgttcgtcttatttgaaaaaattatcaaaaaaattaaaaagacaagtcacgcttaaaatattaatcatgttttatcatctaacaacaataaaaatacgaattataaaaaaatttcatataagacggaccgtcaaagttggacacggaaacccagggtttgcctttttttggggacggagggagtatactcctatattagtgcctgatcgatgatcaaagtatatatcacgatcctattggtctgtttagttggtgaaatgaaaatttttaaatgtcacatcggacgtttgattggatgtcggaagaggttttcggacacgaatgaaaaaactaatttcataactcacttggaaaccgcgagacaaatcttttgagcctaattaattcgtcattagcatatgtgggttacagtagcacttatggtaatcatggactaattagattcaaaagattcatctcgcgatttacatacaaactgtgcaattaatttttctttttatctatatttaatgttttatacatgtgtccaaagatttgatgtgatgtttttgggaaaagtttttgaagaactaaacagcccctataatatactccactttggaatactccttgtgatcatgcgagttttcttttgtgcgctctgaagacaaaaaggagggcaacgtagcgaccgtgtggatgctgcctacaaaggctgccagcttactcgtatccggtctactcgtagctctactgctggggcggaggatttgtccaaacatgaattcggcaataataaaagggggtagcgcacgaaacctaaaagtggatggatgcggagacaaaagatttagacaggttcaggccctctcaatgagaggtaataccctactcctgtttggggatttgaatccgcagggtgtagtatagatcttatgtgctcataccccctagagggcctcctgcccaccttatataggatggagggcaggattacaagatagaaaccttaaccattacggtatcggtttcctaaatctactttacaatattatcaaactaggactttaggccattccgtaatataaaagaaacgtaatacccaagtcatgatctgttacatattccatagatataagttatcacatataactagtcggataaccacgccgtgtgggtatggggtacccataatctccacagtagcccctgagaccttcgcagtcgaaaagataatcttctctcgaactaaattactccaaagccgagtgcttcaatcatctttgccatggtctcccgagtacttttaccaaatctgaagactgtgaagggctgaaaaataaactcaggtgcatcgactagatgcacctaataggtgtagccctcaactatatggttaattgaacaaaccaagcatatagtcaaggaataaataatccaaccaaccgagtggcttcgataattatagtcaaccaagcgacttgatattaatatgtagcatatgcggtgtgaatccctaaataacatgatccgagtgatataccgactgttttgtacaatatgatgagtgtaacctaaagttggctacatcattgaaaattcacatagcaaaacagctataaagaagcttatatgttgtgaataaagaaatttctaaagtattgggcatacgccatgcgcacactgctttaacagatgtgcttaagtccctagaagacacatggttccaccacacctggaaatatatggcatatgtggtataaaatccgagtaaataaactcataaaggattcaccaaccgcctggaaaatgaccaaaatatataatcagcctaagccataatattggtcaataaaagtgcacacttacgtggcaaaaagcaatgatattgtatccaatcaattgctttatgaacccaaacaacgccttgacttatataaaaaagtcagcggggagctatataaagcattactgtttggcaccttttaaaatgcattgtaccaactcctaaaaagttgagtaactgcggtataaaaggattttaaggtatagggcacataatcacgcgcgcttttgcctaagcaaaaagatgcctaagtccctaaaagaacgtgacatgccacacctgaaaatatgggctgcagacatattaggcctaggccaaaaaatatgccttcgacaccctttaaaggatgacgcatgtaacatgctcccgagtaataaatctttcgggtgatatagacaaagtgtaactcatatgaatagcttctgatctgagtgattatcctttatgggatactccaaaatagatataacaattgaattccgactggcgcaagtattcggttgataacccttacggggaataataaatagtccagtctttgagcatagaaaatagacccatgatcatcaaattcatgttgcatgtatccggaacaagtccaaattgaaggtatgatacttgtgtttgaggtagtgagcccctgagtatatagcttgtccttctgtcgtagtcacaattgtccattgatggtagctgacgcggttggcatagagacaagaagaccaatatagagataatattgcccaccagaggtggcaaaaatattggtagtagtgaagatagtgataccaatcaaaagtgatgaagttgcccagcgataaagttgtgtagccatggcagtgaaataatcattcggtgacagacgatgcagctggtgaagaagatgaagatgcccattagtggtgacataagctatccatgaaggcgaggataccggtcggtggtgacgaaagataacgatgtcggtgatccagtcgatagcaaccgtgaaagtgaaataataagtcggcgaagacatagtcatccattagcaacagagttgatgtcagggccgatgaagcagaggtgctggtgatgatgtcagtgacagtaatccatcaaattggtgttatagctgttgcagatgcttcacttggaggaaagtagatgatgttgtccaactcgtcgaaactgagctgattggttgataactctgctataaagcaaagacgaagataatgactcctagaattgactcgttggctgattaattgattgcttcagcttgtcgaattttgaaagtcttgtatttgtgtagcccccgactctttggttagttgggaaacaactgaacatagagtcgagaactgtaacttcttgtcgtcgagtagtcattgcttgagtgaagataaatattgaagattggaacaccacttgttgtaataaaataacacggcatcatatttggtgacgtatgccgaggtgtcgaaactcttgtagtcgtcatggttggtgaagtagcaaagcttgcgaagtagaggcaatagagtttgccgatgccgaagataataaaaatgaagttgctccaccatggtgacaaagttgcatatccgtgatgaagtgaacacgagtcggcggcaacagaagcaaaccggtagtgaagacgcgcaattgtgaagataaaagcaccagtcggcggcggcataaccagtcggcgacggaagacgatgatgtccatcagtagtggtagctgtataaaccagacgtagaggcgagggcactagtcagcagcagacgagatgaccagcgatgaagacgataaggccaatcaacactagcagaatcatgcagccatggaagtgaagaaactagtcggcagcagacgtaggcagcttgtgttgaagatgctgacgcctattagcggtgacggcgatgtagccagccgtgaagaagatagcatcagttggcgtcataacaggccagccgtgcaggcggtgacaccagtcagcggcggatgaggcggccggtcggtgaagcggccggtcggtgaagacgtagacgccaaacaacggcggcataataggccagccgtgcaggcggaaacaccagtcggtggcggacgaggcggccggtcggtgaagacgtaaacgtccaacaacggcggcataataggccaaccgtgcaggcagaaacaccagtcggcggcggacgaggcggccggtcggtgaagatgtagacgcccaacaacggtgacataataggccagccgtgcaggcagaaacaccagttggcggcggatgaggcggccggttggtgaagacgtagacgcccagcaacggtgacataataggcagccgtgcaggcggaaacaccaatcggcggtggacgaggcaagtcggtggtgatgttctaactgatccattcatggagcgtaagagataagcttaaagccataaatcccttttatgcatatctggatctggatcctgcagaacaaacatataggatgactagtatctgatataaatataatacttgagaaaaattcaagtattttaaaatatttataaatatgtatttcatctcttgtcaattttgatttccccgagcagatgactcattacgtttaaacactctgcccgactagtcataaccaccaagcaccgggagtcggcctaagcacttcccaaacatgcatatgagtgacatgagttcgtcattaatggaacaaagtttcacgggtcggagtttactactcgggtacttttgcaattattaagagcagaaaataaattatcttatctctatgcttttgatttattccaaataatacttagcaccttgcgttattcagtccatccaacaagcccccaggtgctaggaatcggcccaaaggcaactatccattggcaaaccaaacggaaagcataggaagatggaactccataactcgataggcacttttgtactcagaatatgtcgcaagcaatcaagataaatattatgaaaattgtttaaaaaatatgatataacatctgtagcccccgactcactagtcaacgacgaaccagttgatgtagtgaggcaaaggaaaaggcaaaatatcatataaagaataaaataaatgatgacttagctttgtcgtattccctcggtgacagcaaaagtagccgatgtgggaacgaagcaatccatcaatggtgacaaaaacaccagtcgacgccagtggaaccaagccagtggtgtagatgatgaagtccattaacggcggcgaagtccgccaaccgtataggcgaaaacactagtcagtagcggcagaggcaggtcggcggtgaagtcgtagacgcccaacagcggcggcataataggccagccgtgcaggcggaaacaccagtcggcggcggcgaaggacagcctgtcggtgaagacgtagacgcccatgtacggtggtgtgaccaaccaaccgtataggcgaggacaccagtcgacggacgcccaacaatggcagcatataataggctagccgtgaaggcggaaacaccagtcggcggcgacgaaggcaagccggtcggtgaagatgtggatgcccaacaacggcggcataataggctagccgtgtaggcggagacaccagtcggcggcggcgaaggcaggccggcggtgaagtcgtagatgcccaacagcggtggcataataggccagccgtgcaggcggagacaccagtcggcggcgacgaaggcaagccggcggtgaagtcgtagatgcccaacagcggcggcataataggctagccgtgcaggcggagacaccagtcggcggcgacgaaggcaagccggttggtgaagacgtggatgcccaacaacggcggcataataggccagccgtgtaggcggagacaccagtcggcggcggcgaaggcaggccggcggtgaagtcgtagatgcccaacagcggtggcataataggccagccgtgcaggcggtgacaccagtcggcggcaacgaaggcaagccggtcggtgaagacgtagacgcccaacaatggcggcgtgaccaaccaaccgtataggcgaggctgatttgcatgtagattcgtctctctgattttgttgacatgatgggcttggtgcagctaaacggccttagaggttgcgtgtggcatgagcaaacgctacattggtagtcgagccacgcactatgtcctggtgtacccctcttggcaacatggtagcagtgggaagcattgcaccgacggccgtacatgcaataaaaaatcgtgagaagattagtgtacgttagtaattaatctaaatatataaattacaaggaggttaggaaccggcagcacagccaaatcccatcactcattaaggaacgattttttgatctcgattgccatcctgtgcatgtgaccaaccatcgctccagtatacatgcaaaacaaacagatatagtttgattagccttaaaatattacacgcttaattgtgtaatgcatatatcaagctagggtttgatattaagccgtgcatatcagttgatcaacacatgcacgtgaagcactcagtcgctgttgatcccatggacatgaattgtccccgtgtcgtatgaaggttacgccggcacctgtacagatcgtaccaggcgacgagcagacacaccgggacttcgtctcgatctcagccggtgcgtgaaaacaagaaaaagaaaagtaataggagattagtctgcagttagagaataatctaactagtgaaaacgacaaagccaatgatattaattggagatcgaatcgatgaaattgccaagattgatcccttcgactggattgaatccgagacgaaaaagacatgcttgatgaatccggcgatgtcagagattggttccatcacacttgtgataggaaactcgacgaacccctacctggcgcgccaactgtcgaaacatgaattcggcaataataaaagggggtagcgcacgagacctaaaagtggatggatgcggagacaaaagatttagacaggttcagaccctctcaatgagaggtaataccctactcctgtttggggatttgaatccgccgggtgtagtatagatctgacgatcatatgtgctcataccccctagagggcctcctgtccaccttatataggatagagggcaggattacaagatagaaaccttaaccaatacggtatcggtttcctaaatctactttacaatattatcaaactaggactttaggccgttccataatataaaggaaacgtaatacccaagtcatgatctgttacatattccatagatataagttatcccctataactagtcggataaccacgccgtgtgggtatgaggtatccataatctccacaggattatataaagagtaggacttaattattaaagtatgaacttctggaacgaattttaataaaaaattagtaaatttcttggtattttttctgccaggtgtcacctggctcctccccaccaacagctagcggtgcagcaagctcgagcaagcagaggcgaatcatccatagcattaactagttctcacatcacattaatttaatattaatgattggtcctgtatagatttcagaacttgaaaaacaccaaatcaattcaaacaaatattttcctttttttttcaaacacgttaaaggatcgaatgttaatactatatcgtatgaaagcaacaatcagcagcgcatatcgcccatcagctgaaaagaacattattgcagagacaagcgacgggaagctgagatagcatcggtcgtcagtcttaacaaaaactagtgactaccccgcgcgttgccgcgacacttttatatgataaaagaaaacttttagatgcaacatatatctagcctgatgtattcctacgttggcactattctaaatttatacattacttcaagcgtagggtacacttgattgttgtgattaaaatacaccttgcaactattaaaaaacttacaaaaattcaacaattaatagcaagatagagttatgcattttctgatgcttgcttcaactgagtcaaggtcgttggaaaggaagattgttcattcatccatgctaacgaacttaggctgacatgcatcattccgatactaacagagatataggcctcctatgaaatagcaagtgaactttaattagtacccgagaataaacttaaagaaccattgccgtatgaatgaatatcatagaaaaaatagtggtctgatagggagcttagttgatcattgccatgaagcaacatcatcaggatcaatgtccatagaagcagtagaaaaactgaagaacttcagatcgcggtgagcaaaaacagataaacaaagaacacatgagaaagaaaatagtaacatacgagtaaaataaaaataataatttaaattgtaggccgaggaaagaaacacaccacaaaccatgaaggaatgactgtagcatggcaatgacagcatgacatcaaaaaaaccatcaataatttaaagagatcacagccattgcatccactggtttcacaaagaatctgttttgatcctatacgatggctaagacatgccattgtggagaggcatataaatagtgaggtgagaggataggtgaaaggaaaggtcgagtcaagaaaaatgcaatcgatgaatatatgcatgtaactgtttagtttattgatggtagtaattaagatagaaaattaagcgatatgcatgcaacacaattatcatgggagttgggccggtctcctcgatcgatcccgcataggtttaatccaccatcagctgcgcgcaattagccccgctcgctcgcttcctggcctcaggatctgtttcgattcatctcgcgctctccccacccgacccagattagagagcacaatttggggaaaaagtttcaatcgaagtttctcttttctctactcaattgcttcatggcctgcctgatgttaacttaccttgtctctgcatgcatgcatataatattgtctattatactcccttcgtttcataacgtaagtcattctaacatttccccacgttcatatggatgttagtgaatctagacatatatacatccatatgaatgtgggaaatgctagaattacttacattatgaaacggagggagtaaattgctggcttggtaagctaaatatttaggcccggtttagtttccaactttttcttcaaacttccaacttttccaccacatcaaaactttcctacacacacaagcttccaacttttccgtcacatcgttccaatttcaatcaaacttccaattttgacgtgaactaaacacacccttagggcatgtacaatggtgtctaataacgggctctcttcattgtcatgtaagtaaatttagtgacgtggaagaaagagatggaaggaatgggttgctacgcgagtcgactcttagcatttattaatggaaaatttgttgcatgagggctctcttcattgtcatgcaagtaaatttagtgacgtggaagaaagagaaggaaggaatgggttgctacgcgagtcgatccttagcatttattaatggaaaatttgttgcatgaggatggagaaaaggaaataagtatgataaaaaattgcaaaatttgttgcatgaggatggagaataggaaataagtataataaaaaattgtttggtgcattaatggtttagaaatcttattgtctctactattgtaggaggatagtctttagtgatattaattagtatatagagctcatattagactctatcattgtacatgcccatatattattaagtgtgcatggatagaatcgtgcaaagaattagtgtccctctatatatctacatactggtagtatgtaacagctaggcaagtgcaagatgcaccagttcagggtatgtgcaactgactaaatgaaatgagcgactagttatgctagcccttcatctgctggctgggggcatttttcttgaatcaacagctgtttgtttgcacttggcaatgcctagcaatctgattctgtttcttccttcatgtggaaccatagggcacagcatctcccaagactacaactcctactggcaagggccgtgcctctactcttgaagaggacaacatcaggtttcttgctgaattggctaaacgacatgcggatgaagcaagatattacaggatcgtggcgctgtctgctgtttctgcctctggtgttgtgttcttcaccctgttaacccttcgcaatcatttgaatcacctgtctgaatgttagctttaccatatctgcgttagcccttcgaatcatgtgattcacctgtctgaatgttagctttaccatatccttgatggttatgtattttgtggtaccaagtctaagcaccttttatctatgagacgatgcaaacctgtggctttgtattgatatggcatgcatttggataatgtgtaacgtatgcactcttatgtatttcaaccttatatatatcgttctgtgtgcaattagatgctaaggtgaggttcattcttggatgaatttggagcgttcactgtttatatgtagagactaatacggatagctgttatggtggaatcatgagtcatgacgagggttgcaaaggaaggaattagttggggtcgcttctttgccatgccatatgcttctgttctgttttggatcattattcatcttttctccttgcacttcttgttcgttagtgtatatgaatcagtcgatgtggattacaatgaaaatatatagagagaagcatccaaatcaattataagtagtggtggtcttgcaagttgctactactagctagtgaagaacacaagatatgtaattcaaaataattgattgcccgtcggccagggccagtgcgagttgttcaaaatataagcagttgaaaatcatctcatggtgtagtgtggcaccgatcgattatcgaaacctcttggttgttgttgggaggaatattgatcgataattcgatatggtgcatctagggtttcgatcgttcggtttctttcttaaattttttttttgggagctggctggccaaaatctatacctattcctacttacaaaatacgagggacgtcgggtccagggccccaatcgccgtctccccaaacccaagtgccacctccgcaaacaccctcaccgtctacctctccaaatggctctccttcgccatattcagggtgtgtttagttcacgctaaaattgaaagtttggttgaaattgaaacgatgtgacggaaaaattaaaaatttatgtgtgtaggaaagttttgatgtgatggaaaaaattaaaagtttgaagaaaaagtttggaactaaacaaggcatcagagaagtagaaatttgggcagggtaagttctttcaaacattttttttttttgcttttccacctttcctgtttctgagtagtatttcttgaaagtagtacagggcatgcttactatttttgacagaaaaataaattaaatcaaacataaaaagtttgatctttcacaatttttgttcattagttatactaagcctgatcaaacagagattccaaaccaaacaatgcaaagttcttacaaaataaatgttggcagaattcctttcaagcaaaacatagtattctactgcaacctccaatgactttcggtctcatcttttcgcttatgcttattagccaaaatttaaattttcaatcttaaattttcccaggaatcaatccggaaaactctgcagatcaaacttcaaattcaaatttatcctcaaaatttgggctttccaactctgcaggtatttaattaactaaacattaaattaaagacacagtaaatgcaattaagtaactggatttcaccctgaagatgcaatgcaggctccagcaagtcgaatccttcccacatctcactgcttaattaactaaacattaaattaaagactaaataaatgcatttcagtaactggatttcaccaccctgaagatgcaatgcaggctccacgctccagcaagtcgaatccttcccacatctcactgcttcttgtttccttgagctccagctgggacgatagcaacggggctcttcttgtcacgggcaccggcacccttgctgctccagaacaggctcttgatcatctgacggaggcttctggccgtgaagatatccttaacagctgcatcccaaacctccgcggcgacaaccctcctcagctcacaagcttccggctcgcgtgagaactccagcagctggttctgggcctcatcctgatggcgcctcaacacagcaaacagctcagggcagtcaaggaagtccaaaaacctcatcctgaaaagcttcatgagagcagcagcaagcaaggctagacgccaatgtgagcgccttgtctgctcaatcaacaacttttggttgccaacccaacacttggtgatgcgctctcctagtgcttcttccatcttgttcaaatgggcggcgataaccttggcgatagccttctcctgatcatcccaggcctccggcggagcctggcatggccagcaccgtcgggtgacgtaggaccgaaccccctcggtgatggcggcggccttcttcttcaccagagatggcgccgccttgccctccaacgccagcttcttggcagcagggccggccatggaggtaggcgcgaagagcagggccttgggcttgggcaccaggtgtagtgacgatccccccgcggctccggcgtacggaaagcccgaggctttggccggagatcccgactgtggtggcgccttgggcaccggcgggtcgacggtgaccagagcgcgttcccgggctccggcggtgcacggagcacccggtggcgcgaacagcagcgccttgggcaccaggtcgagcgtgaccaaagcgcgttcccgggctccggcggtgcacggaaagcccgatgatttctccgtggcgaggccacgggcggtttgggcgaccagtgccctcgcggcggccgtcgtccggccttgcttcgcggcgttgaggaggaggagggccatcggctggttggtggcggcgccggcggcggggaggaggaggtgagggggcttagggttttgagacgaggaggacgagactaggctaggctactagctttctctctctacttcttggttcttgcttgccttgcccctctctcctctttttactccggtagaggaaggaggaggaggagtgggtgccagcctttcaatcccacccggatggccgacacgtccacagccctatcaatccaacggctcccggctcctgacgcacgctgacatctgagagccgagccatatactactatctaggagtaaataataataactttcacataataattctttcttgaaaaggataaacgaacacaaagtatacgttttcctcgatccattgatagcttttcaattcctaaccctccctataattaaataatgagagtattttaagtgctttattttgtgtagcgagatccttcaattctccagtggcggctcgtctcacacatatctggccatatatatactcattgaaatgagaaattcaaacaaattaacgccgttgataaggcctcatttcaacaagtgacattgaacacgctaatttatctacaaaatgacattataatccagtatttctttccctaaacgcccaacaataatactacccgttagcgttgtagagtagtactccatccgttaagtcgttttgactttggtcaaaatcaaagctgcttcaagtttaatcaacaaaagtaatacgtaacatttttaactcaaagacaaatttattatagaaatatattcaattattaattttgacgaaactaatttggtatcataaatattactatatttgtctataaatttaaagtagtttgacttggcatgtaatccctccgtccctaaatatttgatgctgttgacttttttcttattcaaaaacttttatgaaatatgtaaaactatattatacataaaagtatatttaataatgaatgaaatgataggaaaagaatagataattgctgttggggggatggctccggatgacggagccaccctccgtcagtaggaagactcagctcgaagccatccaccacgagagaatgatcgaaggctgtagctaccatgatggttgactccgataaggggcttcagaatcaattaggagctcacgaatcatctcggagccgaccacgggtaccggagtgggccaacgactccggagcgagtcacgggcccgcagctaaccaatggcttcggagccaatcaaaggctccggagtgcccggggaactagagtgctcatcaagcatggaggaatggtccacgggtgtagaggggcgccattaatacgcactacgcatctgtcaaccacctctgacatcctgacagtggcaagaggcatccgctattatccggaagcatgcctttgcccaaataatagcccacaccctcggaaagcgtcaccacctccttaatggctagggattttaccagtagccctacgactggctcactggccagtcactccacatctgtttttagctagggtaaagatgtaacttccccttgtaccccttatatataaggaaaaagtacgaattaccccctgaactattgggtgagtacgaattaccccataaacccgaaaaccggatatttttcaccctcaactatcaataccggatgaaaaacccccctagcagctttgcaagcggttttggtatacgtggcagtctagtcagcaattcttttttttttaaatcagcggggcccacttgtcagtctccaaaactactatcccatagactagcgtggcactggcacaactggcgagcgacgggtacagcctgtcgactgatgaaccgctggcggaggagcacacggaggcgacgaagcggccactcgacgacggcgtggtcgagatcatcaacctcacggacgcgtccctcccgtcgtggagtgcgacgtcgccatcgtcggctcagactgcggcgggggcgtggcagccgcggtgctcgccggggccggccacaaggtggtggtcatcgagaagggcaactacttcacgtcgcgggactacacatccttcgagggtctgtcgatgaaccagctctacgagtctggtgggttcgtcaccacgatgaacggcggcgggctgctcctggccggatccacggtcggcctgcctcaagacgcccgagttcgtgctcagggagtgggcggccgcgcacgggctcccgctgcacaggcggggacgggcgaggcgagcgtggcggggacggccagctgtggcggtggaggcggaggtgcccgggcggttggtggcggcagcggaggcggaccgggcggcgggtgacggtggcggaggcggacagggctgcggcggcggcgtcgatggacacggtggacatgatgagactgaggcggggtcggccagaagcgtcggcgaagcgggcggcctccatctccgtcgccgaccgcctgctctgcctccatctctgtcgccggccacccgagctcgccctgcctccgtctcctccacctgcgcggatctcgccccccagctgctgttgcggccgccgccttcctcccgccgcagcgccgcgccccgccacagcctcccgcgacgccactggtcacccgagctcgcctccgccaccaccgcccgcctccctagcggccaaccgagtgggcagactccgcctaagatgacgccgatgcctaagagcggccggccgagcaagacagagaaagcaaagggattggggaggggagagggatgacatgtgggtctaggtgtttttttaattttatttgctgactggattgccacgttggcgccacgtgtgcaaattcaagtcgaaaacagctaaaaacagtgctgagggtttgtatagttgaaggtgaaagatgtccggttttatggttcaggaggtaatttggtcgaccacgatagttcaaaggtgtaattcgtactttttcctatatataaatatgtaaacattgtccacggttgggacacattcaatacagaacacatattaagcacactagttggattttgttccaacaattatttaaattttttttaataaaacgaacggtcaaacatattttaaaaaacgatctcaaatatttagggtcggagggagtaatataaaatggaaggaataataaacacgataaatcgaccaggtcgaaggagggaggcggtgtgaggtgcaccacagaagaggcggagggctttcggctcgacggcggccgggttccaaacttccaatcctagacagataggcaacgcaaacgtgccagccgccgtggaaggcaagacgatcggcggcggcattttg

SEQ ID NO: 4089 - DNA, 710 bp, Oryza sativa
gcccgcacaagcacgaagtttggacgctggagctgcgggccttccaccggtggtgcaaggctgggatgcacagcagggcgtgcaatggatggacgaaagggcctgccggtggccgaggccgccacgcagcagtctgccgcactgcgccagagatccagtacaacgtgattgcccccatgcgctgggagtccgcgcacctcgatgtgctcaagcaaagcgcggccggtttgtggattcgcaagcaggatgcggtgtacgccgatgcgatcgtgctgcgcgatgactggccatcctccattaggctggcatgacacgatatgttatcttgtgttgcctgtgctacttgttgcttctcagtttgtctctatggaaatcatgaagccaccccaggtgagcagacgagcggtgctctaaattactatatcatctgtcatattgccactatacaagctatgagtggctggcaatttgatcctttttttctgcagactgatgatccatcgcagaagaacacactgcttgttttgaaatttcttccatttatgatagggtggttctctttgtcagtgccgtcagggttgtccatttattggtatgtgcatttgctattagttgtatgagtgtttcagtcatgttccatgctatagtgctatgcctcatagagattgtgggactcctccactgctcatttacttcttgcaattgatcaa

SEQ ID NO: 4090 - DNA, 12416 bp, Oryza sativa
actgcatcgagccatcgagggccaccgtcttctccgccgccggcggatggatggccctctcgctcctcgcgctacctctggcgccgccccactgcctgtgcttcaccgtccttcgcgtcgcgcggcgccccacgttctgccgcgcggagcgaattaatggaggcgaccacgacgaggagctcgacggggtgccaaatctgagccgaccaccgccggatcggatggacggccaaatctgcgtccttctgccgcgcgcagcagccgcgatggccggcgacgacgatgaggacctcgacttcgaggcgcgccacgccgcggccgggttgtcgatccgtgtcttcaggggcggcgaataccgcggccacggcccgttcccgtggcgcggaggctgatgccgccgcagccgccggcaacaggtgggcgcacgtcgacagcgacctgatccacttcagcaacgcgcgtacgccgccgccgtacgtcgtgctccatggttggcagcttccatagtcgttagtatagtaattaattgtctggtggaatcatacgcatattgattgccagtacgttggaatgtcctaatatcggagaaaatggatatttggtatcttcaaaactaggtttcgctattacatcatcatcaaattttcaaatggaatgtgctgacatgtgcttttgatctaaaacaggtcaaggaccttcaccatgcttcgaggaaatgagcaaaaaatggggatagctgttgttctatggtcaatttacaaatataggaataatgcatgttttaagcatgtcatccctgatgtggagattatgggtaccccatacccacacggcatggttatctgactggttataggggacaactaatatctatgaaatatgtaacggatcatgacttggggcgtctacgtcttcaccgaccggcttgcctccgccgccgccgactggtgtctctgcctgcatggctagtctattatgccgccgtcgtggggcgtctacgtcttcaccgaccggcttgccttcgtcgccgccgactggtgtctccgcctacacggctggcctattataccgccgttgttgggtgtctacgtcttcaccaccggcttgccttcgccgccgccgactggtgtttccgcctgcacggctggcctattatgccgccgttatcgggcttctacgtcttcaccgaccggccgcctcgtatgacgccaattggagctatcctcttcacggttgcccacgtcgtcgtcatcattctacttctttcgtcgccgactggttatgccgccgtcgactggtgtttttaccttcacaactacgcgtcttcgctaccggtttgcttctgttaccgccgattcgagttcacttcatcactgctatgcaactttgtcatcatggtggagcaacttcaacttcattgtcttctgcaccggcaatctctattgctgctacttcgcaagttttgctacttcaccgaccacgacgtctacatgagcctcaacatattgacgtgtcacgaaatttgacgtcgtcctaatctactactacaagtggttctacaattttcaagacttcaactcggacatcttcaacatgtatcctcactcaagcaatgagtactcgacgacaagctacagtttttgactctatattcagttgcttcccaactaaccaaagagtcgggggctatataaatacaagactcaaaatccgacaagttttatgtcaagataaagcaatcaattaatcaaggagtcaactctgggagtcattatcttcgtcttcacttccgagcaagctttctacttcatcaactccaattatttcaccggcaattttggcttctctgtcgtcgccacgatctacttcaaatttctctagtatcaagtttgagatttaatctacatattcgggaggatggagttatcaaccaatttcaacgagttggacaacaatttctacttttcttcaagtgaagcatctacaacagctacaactccaagttctattgccatctttataaatcaaggggtgttgcatcaatctttgttatgtacacgctcgcatcaaggaaactactcgagtttcaatatcttctcaacaatttgatggattattgtcactgacatcatcaccaacacctctgcttcatcggccctgacgtctccgctgttgctaatggatgattatgtcttcgccgacttattatttcaccttcacagttgacctactacgcaaacgctgatgagcatctttgtcattatcatcggctgctacaccgctattgactggatcaccgacatcgtcatcttcatcaacatcctgtcaagcctcttcaacatagcccactctactaatattgatgggcaacttcgtcatcatatttgatcatctctattgttgccaatcgtcattaccatcggttgcatttgttgtcgtcgactatttcctgcattttcatgattggaggatttcgtcatcgtcgttgatgcgcgtctacatcttcatcgttggcttgttttcatcgccaccgactggtattctcgccttcacggatggcttattatgttgccactagtgggcatcttcatcttcttcaccagctgcctcgtatgtcaccgactgattatttcgctgccatggttacacaactttattgttgggtgccttcatcttcattgttggctgacctgactgctgccgactggtttcttcacctctacggctgtgcaacttcatcacttttgattggtatcactatcttcactaccaccaatatttttgccacctctgttgggtaatattatctttatattggtcgtcttgtctctatgccaactacgtcagctaccatcaatggacaattgtgactacgatagaaggacaagctatatgctcaggggcttactacctcaaacacaagtatcataccttcaatttggacttgttccggatacatgcaacatgaattcatgatcatgggtctattttctgtgctcaaggactagactatttattattccccgtaaaggttatcaactgaatacttgcaccagtcgggattcaattgttatatctattttggagtatcccataagggataatcactcagatcagaagctattcatatgagctacacttggtctatatcacccggaagatttattactcgggagcatgttatatgcgtcatcctttaaagggtgtcgaaggcatattttttggcctaggcctaatatgtctgcagcccacattttcaggtgtggtctgtcacgttcttttagggacttaggcactttttgcttaggccaaagtgcacgtgatcaagtgcccaataccttaaaatccttttataccgcagttacttaactttttaggagttggtacaatgcatcttaaaagctgtcaaacagtaaagctttatatagctgccccgctgacttttttatatagtcaaggcgctgtttgggtttatcaagcaattgattggatacaatatcgttgctttttgcgatgtaagtgtgcatttttattgaccaatattatggcttaggctgattatatattgtggtcattttccaggcagctggtaaatcctttatgagtttatttacttggattttacaccacatatgctgtatatttctaggtgtggtgaaaccatgtgtcttttagggacttaagcacatctgttaaagcagtgtgcgcatgacttatgcccaatactttggaaatttctttattcacagcattcaagcttttttataactgttttgctatgtgaattttcaatgatgtagtcaactttaggttgctctcatcaaattttacaaagcagtcggtatatcatctggatcatgttatttagggattcacaccgcatatgctatatattgatatcaagtcacttggttgactataattatcaaaaaccactcggttggttggattatttattccttgactatatgcttggtttgttcaactaatcacatggtcggaggctacacctattaggtgcatatactcgatgcacctaaatttacattcaattatttttcagccctccacagtctttggatttggtaaaagtactcgagagaccatggcatagatgattgaagcactcggctctggagtaatctagttcgagagaagattatcttttcgactgtgaaggtctcaggggctactgtggagattatgggtaccccatacccacacggcatggttatccgactggttataggggataactaatatctatgaaatatttaacgaatcatgacttgggtattacgtttccctgtatattatggaacggcctaaagtcctggtttgataatattataaaatagatttaggaaaccgataccatattggttaaggtttctatcttgtaaccctgccccccaacctatataaggcgggcagggagccccctctaggggcatgagcacatatgactcaactagatcgatagatcaatacaacacccggcggattcaaatccccaaacaggagtagggtattacctctcatcgagagagcctgaacctgtctaaattatttgtctccgcatccatccacttttaggtctcgtgcgccacccccttttactattaccgaatttatgtttcgacacctgatgacccaactgacatcatcaactgaatgtcgaattgggcgatcctgcgtcgcgttttgggcttttggctggagaagatgtgcacgaagactttaaggttgaaaaaaagatatgcatctacaggtgggataaaagaagaggcttggatcctgaagtggagtcttttgtatgcagatcatgttgcatctcagtttcattgtttcttcaggaaaactatggaaatctggatgtttttgtatttataatatatatgctcgaataggttgttgttttttctgtctttctggaggcctggtccacgagtgcagaacactttatgcagctctatctcatttctcttaatggaaatggagggtatatccctttgataaaaaaaaatttaaaacgtgattcgacaaaatgtcaatctcgagcacatgctatttgccgctttgccattttcgtttttccagtgatttccaaaatgtttttttgcccttacgcgtggtgataagatgaaaatgcccctatctatggtaagatgaaatgtttttttgctctttttatttgacgaaacgaacgcagccggccacggcaacagccggcgcagagcttcttctcagcggcctcgtcactgtcgcggctctccttcacgagccacgccaccttggccttgggcagccgcatcagcctccatcggcgacaccgccgtcgccccccaatctcctactgcctttgcctcctctgctccctccaagccgtccccaccgaccgcctcctctcccacccactcccgtccaccgcgcacatctgcgtcgccgccccacctcctcgtccgtgactgtctctacgcccactcttgccgcctcctcggccccggccactcccgctcccacccccacctcgccgcctctctcatcgacctccttcactgcatcgtgctcgccctcgacccctgatgcagaggaacacgcctccgtgcccgacacgcttcatggccccatgccgccacctccactactctcaccactaccgcactctccaccttcacgccgctagccgccgccgccccaatctcccacctcctccgctccctccaagccgtccccgctgatggccccgacgtagcgcgcttgcctctgtggtcgacacgctcctctccgtcctcaccgaccgtggcctactcgacgacgccgctcaggtttttgatcaaaccaatccattgacacaaacgattgatgggcgaaaagtgggttgtttggatcttggagataagtgagttgttccggtcctggaggattgacggggagaactgcaagttttcggagccgagatatccattcgagtcactatgggcgtatttgttcaattgacacgtccgaaggaatcatcgttggacttactggatctttagctattcatgtgagaattgatcagctaatactcatccgtccaaaaaaaacccaatcatagctacaaacatggatatatagtgttcagattcgtagctaagtttgtctttttttttaggacagagtagtaatatttcccaagtatagtacagtacactaaataaaacgggagagcagtgtacaaaacatactacctccaatccaaaataagtgcacatttgagtattcgcgtccaacgtttgaccgtccgtcttatttgaaaaatttatgaaaaaatttaaaaatattaatcacacataaagtgctatgcatgttttaccaactaatagcagtaaaaatactattacatcaactgattcatatacactaacgaacaagaagtgcaaggagaaaagatgaataatgatccaaaacagaacagaagcatatggcatggcaaagaagcgaccccaactaattccttcctttgcaaccctcgtcatgactcatgattccaccataacagctatccgtattagtctctacttataaacagtgcacgctccaaattcatccgagaataaacgtcaccttagcatctaattgcagacagaacgatatatcaggttgaaatacataagagtgcatatgttacacattatccaaatgcatgccacattaatacaaagccacataggtttgtaccgtctcatagataaaaggtgcttagacttagtaccacaaaatacataaccatcaaggataacattcagacaggtgaatcacatgattcgaagggctaacagggatatggtaaagctaatattcagacaggtgattcacatgattgcgaagtgctaacagggtgaagaacacagcaccagacgcagaaacagcggacagcgccatgatcctgtaatatctcgcttcatctgcatgtcgtttagccaattcagcaagaaacctgatgtcctcttcaagagtagaggcacggcccttgccagtaggagttgtagtcttgggagatgctgtgccctatgcatggttccacatgaaggaagaaacataatcagattgctaggcattgccaagtgcaaacaaacggatgctgattgaagaaaaatgcccagccaacagatgaagtagctagcataactagtcgctcatttagtcagttgcacataccctcaactggtgcatcttgcacttgcctagcagttacatattccctctatccctaaatatttgacgctgttgacttttttaaacatatttgaccgtacatcatattcaaaaacttttgtgaaatatgtaaaactatatatatacataaaagtatatttaacaatgaatcaaatgataggaaaagaattgataattacttaaattttttaataaaacaaacggtcaaacatatttaaaaaagtcaacggcgttaaatatttagggacggagagagtacaaccagtatgtagatagagagtgacactaattctatttaccataacaaaccggatactcactacttacacgatcctatccatgcactcttaatataatatataaatattttgcttaccaagccagcaatttaagagacaatattatatgcatgcatgcatagacaaggtaagttaacatcaggcaggccatgaagcaattgagtagagaaaagagaaacttcgattgaaactttttccccaaattgtgctctctaatctgggtcgggtggggagagcgcgagatgaatcgaaacagatcctgaggccaggaagcgagcgagcggggctaattgcgcgcagctgacggtggattaaacctatgcgggatcgatcgatcgatctaacgaaaatagggaagctgagaaggggggcgaaggaagagagacaacctcgaggcggtggagggagcgcgatggcggcggcggcggcgcccggcgcagagcagccgggaccggcatgaccttcctcgcaagagtgcgcatcgccatagccgccatgccgccgacgtacggacgaacgggagcaaggtcgggggcggcggcgacagcgagctagggtttttctctctctctctctctctctctctcggtcgcttcgctgggaaggacgaaggcgtcttggttgagagccttgtgtgtttcttcgccttttccttttctctctcttttgttaccgctgccctacccgttactgggaccgactccagatgcgccaataggttcggcccagcccaccagcctgtaatcctgtatttatgctgttatagaaaaactatacatataaattttaatttcatattttaaaactttatacatacaaacttttattatttttttacgatcactctacatgaaagcatataaatctgaaccaacgtacatataaaatgttttgttgtaggtgtaaaatgtttgatgcataaacttgacaaaaggaagacatggttgttgaaataggaaatcttccatgtttctatagttaaattcactgtgtcgctttaggacaagcacattttcggcgtctactttaggctccgccatctttgtagtcttggtagcctagttttccctaattaattgtgcgttgtaaggtttagtcttattttctctttaaaatgtgacaccttcttctttatataaaatgtcggcaacagcctaaacgttcggaaaaaaaagtttgctagatagtccgaattttttatttatagtaattattgatccttaaataaaataaatagtaaatctcagattaaatttgtaaaaataggaaggacgttgttcccaatagcgtccagacttggacacacttctgaggagcgtccaaaggtggacgctgttccggacggcgtccaatctggttcacctcatcctcttgggttcggttgttcttcgacgttctccacaaccatttgcaggcgaaggtgcaccatcgccggctttcctctcctccctgcacggctagggcagaggagccaccaccgctgtccacctcgacgtctgggtggcccgcaccgacttccacctccacctgggaaggtactgagtccacctcggctccagcctccggggaggcggcccatcgctgtcctcctccacccttgagaccgtagccgcttgcctccatgcccaagaaaccaccatcgtcgttcccctccatgctgtcttccatcccttctcaagtacgccacaaggttgctgccaccgccttcagaggagatgcgagcctgttactcaactccgcagtgctcgtcggtggtagactggaagcccaaacgcctccattgcctctcaccgccctttgtgatgtgttctcttcaggtaattctttatttggagcttccattcctcagcagttcatggcctaccaaattaaagcaaaatgattagttcatttacttcagtacttggcaatacttgcatcaagttcagaaaaaaatctctggcttcacgaacaacaatattactgatgctaatgtccatcatgacatacccccaatgttgcattggtgatcgatcttcttgataaatttgaatgcaggttagaaaaaccggctactaattaataatgtcaattatgtgttatggatgccttggccagtcaatgtatcaaaactatccgaaaacaagacattggttcttattttgctttattttgtgtgctcaacgtctgtacttacaggctatactttcaaatattagtgaattccatgcataccactaccagttaattgtcatattctgtttatatgtattcttctgtacagcctgctagacgctaataggagtaaaaagatagagtaattgagtaaatgactgcatcacattgacaaaattgataacgtgtacagtctgtctgttagagaaagggatgaaggcaaagctattatatatgcacttcaatggctaaagacaggggtacagtacgtaaatattccattaaggacgcaaatcatcatttgttgatcctctcctttcggcgtggtgggtgaatggagaggagacttccgcacccagagaccccaaatgtgcgatccattctggccggacgcgttgcgcttgcgaaccaggatatggacgctgttgccaacaacgtcccgatctggacgcacttagttacagcgttcaatcctggacgctacagtcaagagcgtccttcctatataggtaaatcccaccccataattactaaatttttaatttaggtataattaattattacaaataaaaaaatcggctagatagtcttttggggcatgtgagtgctgcagccatttagagttgggacaacaaacatatcaaagtgaagaacactactactccctccgtacgtcccaaaagattcgtctcgtaattttacacgtaatatatgtaattattttttttatatttaatactccatgcatatttttaaatattcgatatgacagcatataaaattttgacggggcacgatctgtcgccatatattctgacggagggagtatggttcaggtctctttgaatttttgttaagactgatggctgatgctatctcggcttcccgtcgcttgtctgcaataatgttcttttgagctgatgggcgatatgggctgctgattgttgctttcatacggtatagtagtattaagggcctgtctatattccaccctaaaattttacatcatgtcatatcgaacgtttgaacgcatgcatgaagtattaaattatagactaaaaataactaattgtataggttgtgactaatttgcgagacaaatcttttaagcctaattgctccataatttaataatgtggtgtgacagtaaacatttgctaataacggattaattatgcttaataaaatcgtctcgcggtttactgtcggattctgtaatttatttttttattagcgtccaaatacccatacaacactttatataatatccgatgtgacacaccaaaactttacacccctgtatacaccccctaacattcaatccttctgcatatttgaaaaaaaaaagaaaataattgtttgaattgatatgatgtttttcaagttctataatctatacagggtcaaacattaatattaaattaatgtgatgtgagaactagttaatgctgtggatgatacgcctctgcttgctcgagcttgctgccttgctgcaccgctgtttgtgcgagcagtagagctacgggactctttcgatccctgccaaaaattttacgccatctcatatcaaacgtttgaaaaactaaataaagtataaaatataggttaaaaataactaattgtatatattacgattaatttatgagacaaatcttttaagtctaattgctccataatttattaatgtggtgctacagtaaacatttactaataacggattaattagacttaataaattcgtctcacagttcactgatgaattctgtaattagtttttttattagtgaccgaacaccccatacaacaccctatataatatatatccgatgtgacataccaaaattttacacctctaaatctaaactggttttccctggattgttagttgtttgaacctaatatatactatgcttcgagattacatcctttagttctaccggcgccctgcctctgcatgcataacagtattgtctcttaaagtatctatggctagcaagtctaagaggatatgtgcaactgactaggtcctatttagattctaatttttttcttcaaactttaaacttttccgtcacatcgaacttttctacacatacaaactttcaacttttccgttacattgttccaatttcttcaaacttctaattttagcgtggaactaaacacaacataaatgaactgactagttatgatgttcctccgctgcttggttttatatgaagcaacagctgtttatactgtttgcacttggcaatgcctagtaaatgtaatgtggtaacataataaattcataatgccatattgtcatagataaattaaaaaccggtttgattctaaaaaaccgccatcggttcactgttcccataaaaaccttccggttcaccggttttttaccggtttgattgcaggaacagtcttttttgctaaactgagccaccaagatgctagttcaggtttttttggtttaaccgtcagtccagtccggttttttttattatggtccaaagtgatacaatatggtaagaataggggatctaaagtgaaaataagggctaaaggtagttcagaaataaaattcggttagacatgggacctagggttcatgcaggagctagtctgctagtgctaacacccaagcacgtgagtcatgtgatagaaattcgccgcttatatataagttacctagaagttagaacgtgattacatttttagttattattataccgtctatagttatatttg

SEQ ID NO: 4091 - DNA, 641 bp, Oryza sativa
cctgcagcccactgagttaacacatgcaggtaatgagtttcgaccattttgtaaaagaagtagaagagagctggagtgcccattatgaccgtcatgtccacctttcggcagtagacgcaattttgcaaagggcaagtctagatcatcatacatctgcagagaataaaaaatgaatgaagaatcaaaatagcaatctgttaaaaaaaacagcaaccagaaactcgaggatagcactttaccacaagaacttgattaagtggtatcttgaaatatgagaccaactgccccacctgtataactcgatttgtcaaacgaaaaaggtaaaaaaaagaaggaacaactagtagtgaaggttgttttggaatcagtatacttacagactcaccacttgcattcataaaagtttgtggcttggccagcatgataggggcatctccaatacgacctaaatattattttctgttatgaatgtttgatagcactaccttcagaatttcaaataagtatatgcacctgctcatgtttaatattcaagcatagagtatcttaaacaaatagcatttgtttataggtaatatttatgaaaaccgcataaatattgttagagttgaaaaagtaatgtgcaagacttgaggaacaaa

SEQ ID NO: 4092 - DNA, 548 bp, Oryza sativa
tacggcggcgccgtcggcgagaggttcgtcgccgacgtgcggcgcgccggcggcatcgcgaaggtggacgacctgagggcgtacaaggtcgaggtgagcgacgccatgcgctccgacgccatgggctacaccttcctcggcatgccgccgccgtccagcggcggcgtcggggtggctctggtcagtatccaaattcgtcccagttaaattctgatcatctgttcattcctcgatccatccaaaccaaacttgaatatgattaattccagattttgaacatcttgagcggatacaaatcactcgagttcttgaaaggatttcttggcttgcaccggttcatcgaggcgttcaagcacatgctggccatccggatggatctcggcgaccctgactacgtcaacatcaccggcaacgtctcggagatgctctcgccggcgttcgccgacaaactccggcagaggatcgtcgacaacaccacgttccctcccagctactacttcccaaagtacaactgatctcagaaaatgtacacgttcttgttcttgcag

SEQ ID NO: 4093 - DNA, 4819 bp, Oryza sativa
cgctgaacaaagtatttctttaccaccaggcttcagtgaacgtgggaggaacagttctgaatgttctgtcgatcgagcatctcatcctgagacactcccctgaaggcaagcaagtaagcagattcacaacaatccacatgccattatttttcacagttcttatacatcaattagtttgattcaaactcaacaatgataaacttgatgaacaaaaagggaatcatggacgaaagggagagagatttgcagctctcctacgggctaggataccctgaacccaacgtcgtgttcgctctgtgcagaggcagccgctcctcgcctgcagtacgtacaatcttgaatcgtttcattggcagatcgaaacacagtctttcctgaacaaaatattttcattgttcagaattcagattaagaattcttgtgtgtttggatttgcagctgagagtttacacggcggaggacatctcgaacgagctggagcgagccaaggtggagtacctggagtcgtcggtgcgcgcggcgagcaagaagaaggtggtcgtccccaagctgctgcactggcacatgcgggacttcgccgacgacgtcgcgtcgctgctcgagtggatctacagccagctccccggccggtcgtcgtcgacggggcagctcaagcgcaccatcagggagctcctcggcgcctccggcgccggtggcaaggcggcggtggcgaaggcggtggaggtggagccttacagcgccgaattccactacctgctgccactctgatgcgatgaacctctgatgatgagtttcttctccttgcatgcagcattgctacgtacggctttgaagatattctgttatttcgccgcgtataccaacgtgtacatcggtgcaagtgactaatctagtcaatcaaacaaataaatttagtgaagtatatatagttcaattttcccccctactgaatccaacgatgtgcagccattttagaagttagtagttgtagtatgactgatactccctccatccatcccaaaatgttttgggggagtaattgttagaaggaaaaattgcaaaaatgtccctcaatatcatcctgagttaagatcccctataaaatatttggtgcagatccttcctcctttttttcgaatacgcaaaaggattgcacatcaatatattagaaggaatgaatatttgttacacacgcaatcagccagaccaacttatgtgaagaaagggagggaaacaaaagaccaagttactacgactccaaacagtgggaaaggcagagcccactactctcccaaaaaaccctaaaattagcaatgccagctaacgaccatagatggccctctgagaggatggattgtaggacctccgagaccgaagatagtgtagagttgaaaaccttggagttccgttccttccacagttgccaggaggatcagagaatcgaagccgggatggagatgctcaggcaagcatgccctagacgaaggccaccagatacactcatatttgaatactgatagacaagaaattccccgcacatcaagcctgagatgacacgattagcgcatcctcactcattgcactcaccacgttgttgggccacggcgatcgtaagtctccactatgggataccggaagatgagatgttgtgcttggctcatgggattcggtggcggctggtttctttggcacattcaaattcagtagatgattttggtatgacattgtgccgctaagaatgaagatgtgtcaagggccatgtccatcaagaacataacacaggtggaaagaggagaaaaaacacgggagcaaaattgattggggataaatctcaaaattaagatgaatgaggaggtatttatagcttagaggggaatctgaaactgagatgagatgatggttttgcaattttcaatttagggccatttgaatcagaaaaatttatatatgatttcatagtattcaaatcttaatggaatttttcctatgtgatcatttgattcaaaggttaaagctttccaaatcctatgaaatttatatgaaatggctcattgcatgtagattttggaggaaacttagtaagagttctaactgcttagaaatttttttagtctatattaatctctcaaccgatttctatttttcttacaatccaatcagacgactattcctatgttttacaattctctattttacacttgtattctaattttacgttcttttttatttctcagtttttccaaccatgcgatttcgagtgggctcttggattctgaactcccgtttatgctggcagaacatttcctacacgttgcaacgctcaacagacaagaacaaacgacaaacgcactgaataagcacaggccatcataaacccccatggagtagtacgaagcatcagctcgtcaggtcaaagctccctgacatgtgggccctacagaccaccgacaggtgggacccacccgtcatcatcatgaccgcaccaactcaactctcactccccctcacctccctcccccttccaccgtacacccccaaaacccccctgccttctctcgccgattccgccaccgccgccgcgccgcgcctcgccgccggccgcccttcgatctcctcctcctcctcggaatggatctctacatggacgactacatcgacccctacgaggaggccgaggcggaggccgccgcggaagccgccgggctgacgtccgcggcagcggcggaggactcctccgacgagggcgactccgaggacgactccgaggccgagagcgactacgaggagaggtcctacggcctcctccgctccggcaaccaccgcgtgcgcaacccggacggcaccttccgctgccccttctgccccggcaagaagaagcaggactacaagctcaagacctcctccagcacgccgacggcattggcgcctccagcaagcgccgccgccacggccgcgagcgcgccttccaccgcgccttcgcccgattcgtccgcaccgacccttccttcgcccaagacctcgccgccatcaacgggatcgccaccactgctgatgctatctctaattctagtgctgccggtgccaaggagaaggcggatgccaatggcgacacagacggatccgcttcggtggcggctgtggccgcggggaatagacgggaggaggagaggtttgcttggccatggagtggggttcttgcagctggtgcagggttcaatgccgaggacttcgcggatagggtcgcaatgtttggtttggatgatgttgtgcctttagttgtcgatgatgcggaaggcgctgatagctttgcgattgtgaggttcgctaatggttggggtggattcggcgatgcgctcacgctcgagaaccatttcaacaagaataagcttgggaagaatgaatgggatgcaaggggtagtgctggagatgctgtgaagggagatgatggggacacagatgttaaggtttatggttgggttgcccgagaaggggactataatgccgggaatgtggtgggcaggtatttgaggaagcatacgaacctgacaaccatagatgaggtctccaagagtgaatcggaaaagtcggggaagatggtagcgatactggcaactcagatcgaggcgaaaaatcgattcttgcaggacttggagacaaaaaagaatgcaaccgaactctccattgcacggctcgaggaggacaacaggaagctacacgatgcatataatgaaggtatgatgtgcaactgtgcttcatttcttataggcgtagttgtcacatgcctagccatgttagctgagcttgtatgaactagaggaaatcaagacatgatatatttctttttctgtttgacggttgcactatcaattagctgttgtgatgctaaaattcataaatgtcagaggtacaggagatatgcatgtcatgtgcattaagcaaagaatatatgtgctacaaggacatgtggcacatgagtatccccatttgcccactgtcataacccatagtcattgtagcatgcgtgaagataacaagaaaaatctaagagtatcactaacagcagaactagattaggttgtaggtagttctctaatgcaatttgatcctgcttccatccgctgttcacaatcaggcctgatctgtaaccactggtcctgtaacctgtcatcgcttactggtagtttctccaactctccatacctcaaggacatgaattatctatagaatctacacagaagcagcaaatgatggattgtctctttgtcctagaggcacatgtcaaatactcaaatgattgattgtggaggagccctctgcactgcaactgttgggctatttagcttcagcctttatattagacatggattatttagagaaatagcatcctcttagttggttagactgttagacaaatagtggtcaggtctgccattatctatgtgattcctttcttgttttgttgtatgctattaccatataccacaagaccaacctggttagataaatgttggtaacagggacaaacacaataataatcctaatcattaactttcatcgcttagctagtaattgtattttcatttcgttataaaataaaataaaaactgtctaagacatcaatgtacgacgttgtaacaacatttatatttccatttcagaaatgcgcattacaccggagagctcgtgattatgctttaagagttttccaggataatgaaaacttgaagcttgaattagatagcaggaggagagaattgaattcacgtgctaagcagcttgaaaagataacagctgagaatgcaagcgacaggaaaaaact

SEQ ID NO: 4094 - DNA, 870 bp, Oryza sativa
caatgcaggcagaggaaaaatttggctatcttttagaatgttttgacatgggtgctcctcctcatggtatgctatgttcaaccactgaactccatgtacatatttttggattagatttgagattttggatcgcatactgaactttctattactactatatgcttgtatgtttcattaagacagtatttttccacaaacaagagcaatctttcaaatcaatcctacttcttgttataaccacaccatcagattttggacagcatattgattctaagatgctttaataaatgcaagcgttagtgatatgcttcttgcatattcaagaaaaaaaaacgtcagcgtttatgcttgtacctgcgtattgccatgtactcatgtgttatagtatgtctagttccattctgcttttagttttggaatgttgagctcaaattccacctaatttttataccatggcaggaggaattgcctatgggttagatcgtttggtgatgcttttggctggtgaaaattcaatccgggatgtgattgctttcccaaagactacaactgctcaatgttcactcaccaaagcgccatctcctgtagatccacagcaattgaaggatcttggcttccgtacgtgaagtgagtgcactgcttgtaacaaggtttgagttatataggaacatccattgtctacaccgggcacccaacctgtcacagcacattcaccttttgcgaatgtgcttctgctcttgagaaattttgaccatggataggctggttgtccatctcatgaatccaataaaaagtttaaagcagatcaatctcttcgtgactattgtcggatagcttgtcaagtgcccaagctatttggctgttgagtta

SEQ ID NO: 4095 - DNA, 5054 bp, Oryza sativa
  unsure (1)..(5054): unsure at all n locations
cagccacggtccagggcactacggcaatcaccaccaccaccggagccggcccccgccgccgccgccgccgccgtcggagttccggccgttccggcgctggttcccgttcctcgtgccgttcttcgtcgtcgtcaacgtcgcgctcttcgtcgtcacaatgtacatcaacgactgccccgcgcatatgcaggccaccggcgacgcgatcggcggtgacgtcggggagggcgccgcgtcgcaggggtgctggctggagccggagctcgggaggttcgcgttccagtcgtacaaggagaatcccctcatcgggccctcctccgcaacgtaagccatccacgcaccaccccataaaatttgagatccttcaggtctctcattctcatggttgaggaacaatgcagcggttagggtgaaatttcgctcatttctgattggtgagatgggtgattcggtaggccattggggtttcgtttcttatcaaaactttggaactggcactattagcttaggtttagatcaaatggaatgccttttcatccatgatggttcaatcttggggattttttgggggagtcaattttgtagattacataaagatagtgactgttgcaatgttgtctgttgacgctatttgtttgtgcatctaattttgttgtggatgtaaatcttgtgccttcttaaaataaacaatttaatgaggaaagattgctgggtataatactttatttagctgtatttgccttagcaagggtggaataaataatgttgatacataagacaaaattttcagtgaatactcaagctttatttctgtttattgaagatggtgctaatttgagagttcaactgacatatctaccaattcgtcaggctgttgaaaatgggggcactagaaaccagtaaagttaccaatgaccatgaaggctggcgcctcattacatgcatttggttgcacgctggtgttgtccacatacttgctaatatgttgagtctcctattgattggaatcagacttgagaaggaatttggtttcagtaagtattgaaataatttaacattgaacttcttgtgattcttcacaaatattacatgttttacttctgcagtctgtataatttcttcaacagctacttggcatataactaagaccatagattttaattattgtctattgcagtgaggattggcacgctatatgtcatctctggggttggtggtagcttgctgtctgctctgtttatggtgtcaaatatctctgttggtgcctcaggtgcactgtttggattgctggggtccatgctgtcagagctgataacaaattggacaatatatgagaataaggtttgatctcagatctatgcatttattttacacaaatcctactgcatttcttgttgctaattgcattcttgtttaataatccagtttgcagcattattaactctagtcataatcattctcatcaacttggctgttgggattcttccacatgttgacaactttgctcatcttggaggatttacatcggggttctttcttggttttgttcttctagttcgcccacagtttggatacattaaccaaaagaactctcctcttggacttcccatgggtacaactaaaagcaagtacaagacataccaaatcatactttgggttattgctacattaatattgatttctgggtaaatttcttctccatcagcaaaagagcaatgataaatatatttagccgcgcatttgaacctcatgcctgcatttgctaaacttcactcttggcaggttcaccaatggattcatattggtactgaaagggttcaatgccagcgagcactgttcttggtgccattacctgagctgtgtacctacttcaaagtggagttgcaacacgccaaacaactattgcatggtaagttctttctatgggtatgcttcttactaaaggtgatcttcagtcttcaccaacaaaatctgatatttttgcaatcactaatggtatttatttccttttttgttatcaggctttatgggtgtattttatttaccagaacaanaatgatccatataaaatggatacaagaatcttgcaattagatgaaagccgtttgaactttattataaaaggttgccttgattggttttgacctatcatttcgttaacaattttgcagttctgtttcctttctacttagggttatgtcctgaagctattttactgtataatggcccagtactttttgctacttttgctaacattttgtgacctttctcaacccgtaatgataaccatagagctcccttccagaggttatttatctttcagtatggtcatctttgtagtgcctacattaatatttcacttttgctatatgttcttattgtaaacttactaatggggagcttctcctgcagtcttcgcagcttggaaatcaattaaatctgacatgcgaaagcaatggaaagactgaggcatatactctcaacaacccaaatagcacggaagcaattaaacacctgtgtgttcacctttgcagttaacgatgaatgtttgtactttgatgacaagtacttctcacgcaatgcacatttctggaagagagagagaagccaatgtggttacaatgagatgctctggtaatgcaatacgtttggcttctatggtttcattctgttgtatgtactatgtgatgtaaatgtcagtgggcggttgtggaagatggctaacttgcggcactagttctgatttcagaaatgccaatgcacaacttgcattctaaccttttcttgtgaagatacaaagattgtcttgggtataagctgttgtatcaagagaaggaagcttggtgaatctctccagtagatggtgtgttgcataccatgtataattattatccagaatattagatactgagttgttggatggagggcaaccatggctaacaagtttaggaagtagaactatatcctggttgtcaaataaagttagatcaatccaacacacaaggtcaaggatggctatgcggccccatgtaaatgtcaaaccatgtaatcgcatatattctccactgttgagcttctccaatgtataactatgatctaggtcagttcatttatgcttctctaccactggtcagacatgaatcatgcaaacatgtatgctcagtgagttgacatgagaagatgagcaaacaagacaactgtgaatttgtgacagaccaacatttctattgttgtgtatgttgtgtgtgaagtgttcatgtcaattgtcagactgagaactgttcgtcttcagctggtctgagatgtacttcaccacctccttcgtcgtcgccttcctgccctccctgaagttccagagctcattcatggtgtgccgtccacgaggattgtactcgttgagctcagccatggcggctttcactgcattgcagacactatcaccgtaatctttgcataactgcctcagtttttgatcatcttcatctacaactccctgcaatcgtcaagaaatgcagcagattggagggcaataattcttagatttacaagttcagaaaatgcaacctcagaattcagaaatggatgcggagaaattgaccagtcaccttatcttctccatcaacctgaataatcttaaacggatgccatgatggattcttcagttcttcctgccagtatgagatcagcattgcagctttgccctaggatcatcctccctgtgcttcctcttgcatgcaaggtgaaatggcctctcatcaagttctcccatcctttttatcccaataatcgtgctcgtggtgatcgtcatgttctcgacaccctgagaattgtggccattttcatggatgaaaaatgtactattttgctacaatctaagtcccagttcgagcagtgagaacttcttgtcaatggatgggtgtttaccttaatcaactcctgtcgatattctttaagttcatcgctgttcgtccgcaatcttttcatgatttcagcacatgagtcaaccagcatttctttttcttcatctacaatcgttctcaaacatatcatgatgctgtaaatgtgttcatgatcttcctttctgaggctcccccctgcttgtaaattcatgttcatctgccgtattatggactctagtgactgcctctgctccagctgcttctcaagctgatttaattttgcataaatggcttccatgtcttgctacaataataaacatatacaaataagtttaggcaagaagtgtctaatgatgatcgcaattggtacagatgaaccttgctaataattgttctagtgttgaagataagagaagaaaccttatgaattttatgcagcatttgagcatggacatcacgattcatctccgggatgataatttcagcgatttttcttagctctgcttattatcaacaccaaacaatctctgaacaaatcaatttctgacgaagatattgacgaattcgacatgaatttcgtgcaaaccgttcacaaattcggacagagatatcaacgatttcgccatgaaatttctcacaaacctttgagctcgtcgtgcagcgaggtgttgcccgcctccgcattctgcaccgccccggccatctcctcgcacttgcgctacaagaacacggcccgcctctcgtgctcgccggcgatggccgcgagcttcgccgccaccctcccttcgtccctctcgacgtcctccgcgctcctcgccgcgccgccggcatccccaggaacctcccgaccaagccgtcgccgtcgtgcaggtcgtcctccccggcgggccagccgtacaccgcgccggaggtggcatcctcccctgcgagccacccgtacacggcgccggcggtggcgccctcacctcgccgtcgacgccgccactccctcctcccggcgccggggaagcggccggggagcgacatggcgtcccggagcccggcccagctcttgccgaagtggagcaccaagaagtggtggtggtggccgtcgcccgccgtcgcttcttggagcgcggtggttgggacgccggcgaagtgctgatgagcgtggaa

SEQ ID NO: 4096 - DNA, 4441 bp, Oryza sativa
gcttaatattgagtcactaggctccttgtgacttaacatctagatgcccttggattaatttttcaaggcagattttgcctcttgagaaccatgataacttttagattttcctgccagaatttcaaattgttgatgttatgcaatatttaatctatcgttgcgattccttatttccgagtgtaatacttaggaataattgaataattattatcttggaaacatcattaggatgatactttgctaatcttcatgatatttgagtttgcctgcctacctctctgtttcagagatttatctttggatgatgtgtgggaatatcaattcaagtttgacaatatattctactagccttggacaaaaaaaacactctcctaacattttgttttcatgtaacaggatgaccaagaaggtgtcagaaccttagatgatgataacttcattgatgatactggggttgatccagctgaccgttatggcagcgataatgatggccactcacctcggcattaccctcaggtatccatcctaacatccttaacttctcagatgcttttcaggttattattgcatttcaagtttacatgaaaattatatggagaaggaaaagaaaggaaatgggctctatgacaaaaatatttgacactaagttatatgctgtggctgcttatatttatgtcacataccaatgattgattatagtgactaatgcccatatcatagtaggtaaggttatggactttctcaactagtatttagttacacacatgctgatatttgcatcttccagaagttttacatagcataattaccctgcaggaatcatagggtataatatccttgttgatgaagctctaatgccttgctgtctcatagatttccaattcaaaatagtcggtttacactagaattgcataatattttgtctgtcctgctttattttttgtcttgtggctaccattctacattgcaaactaattctctttatcataggcagaggaaggggaagaggatgatgaaattgagcggctctttaagggtgggaagaagaagaaaaagaacgatcgacctcgtgctgatattggtcttatagtggaacaattcattgctgagtttgaagtggcagctgaagaagatgccaacttaaataggcaatcaaaaccagctattaataaacttatgaagcttccactactcatagatgtactctcaaagtaagaagttttgaatgcagatagtagcattagattgttgcctctggttccagtccaagttgctatttcgtagctagtcataagtcataactattttcttctatatcactattttgcaggaagaatctccagcaggaattccttgatcatggagttctcactcttctaaaaaattggcttgaacctttgcctgatggtagcttgccaaatatgaatattcgaacagctgttctgaaattattaactgatgtaggctatcttgctcttgtttcgttcttattgcaccataaaagcccactagctttagcatatgcacacacttttagttcatatggctttattttcattcctcaggactactttctcatggaaggtttttgatctatttacacagtttccaattgatttggagcaatacgatagaagggagcagcttaaaaaaagtggtcttgggaaggtataagcatcttttgatggtccccacatattatgttctgcgtactgaatactgagttactgaccatcaattcttttcccatgtcacatgtataggtcattatgtttttgtcaaaatctgatgaggagactacttctaatagaaagctggccaaggaacttgttgataaatgggtaatttcatgttctttctagtaatttctaattgtatggttgattgatgctgaagattcctggtctctgtgagactgactctgagaaaaacaaacatgtagagtcgaccaatattcaacaagagcacacgattcgaggatatgaggagatatgatgatgaaagagctccttacaggcgaccacaaatgaagaagtgagtcctctgtttctcgtttattcatcaaccatcataagaattactatataaacaatatctaatcttaagtttctctatatttgttctattttccactttgatgtaggccttcatcaagtagttctggaatggaatccagggacgatgatcttgatgctgacttctctcagtaagtccgataatgtgtccttcagtgcaggttgaatcttcactccatcatgtacttattttttttgttttgtgctatgaattccaggcgcaagtctgggcaaggtggtgcaaggcagcatgcttctaggccagaagcatcacccttggactttgttattcgcccgcagtccaaaattgatcccgaacaaattagggctcgtgctaagcaggttgtccaagaccagcgccggctaaaggttctgtccctgcctacaagacttgctgtttttgctagcatgttacattgctggacggttttgccatgccatgtgagttacgcaattaatcattcttgtctgtcatgcagatgaacaagaaattgcagcagctgaaagcaccaaagaagaaaaaccttcaggcgtcaaaactcagtgttgaagggcgtggaatgatcaagtacttgtaaaatatccacttcgaagcacttcgaagttcttgcatggttgcatccacagcgccactgcaaagcagtgtgtgcattgggccacggagcagtatcaagtaccctacctctatcggggagcgaatggtttagccttgaataatttcttggataatcttggactgttgatccaagctctttccattctggtagggtgctatatgtgagcttgagagacatggtgattcgggcactatttataacaaaggtttatactattgttggtcatgatggatatattgtgtttaaagaagaatgatggtgcctctactgtatacatgtttatcatgctttacagcaaaatctgatcgggctgtaacttttatttgattgaagttcctgacctttgtactaagactaaagacatgaaagtcttgctgtggaataaacatattgcgacaacagaattgtgcttacggcacccaagagagttgaatacgtgttgttctactataagactttgttgacttgttggctgattcactataactttttgttgtcttgttggctgatactaggattcactataagcagtttgaggccttgaatagcctctgctacagctctacaaaggttgtcaaatgtcatcctagagttgcatcttgtatggtttgttgatcacgcagacaccccgttatattttcaacgctatacgccggcacacggatatctttggcattatttttttttctagaaaaaataaaataaggcgtcagtatacctttgtgtacgaattttgaagaatttcacgacttcacctaagtgatcatatgctgatcttttctggtggaagataaattacgatgccggtaggcaaaaggcgaaatctgaaacataggtagagcgaaacatggcgtaaatctgaaacgtagataacggactaacggctgctgctgcctggaacgtaaaattgttgctaagcaaagcacttcaccgaccatggcgtaaattgcgcgagacggcttggctgtttcgccagcgacgttattgcgaattcacttcgtcaaaaaggatcaatggctgatgcttgtatttttcattcctgtgtatagattacagtaccaaaaaaaattacagattaaagtcaggccaaataaaaaaaaatgaagcctgcaaccagcaggaacgaaataagctgctgctgctgccaaatggaacaaagaaacagccaaagagcacaggacaaggcgactgattacctgaaagggacacaacaaaagaaaacctgaacaacaaaatccattctcctctctccgttcaatatatatatatataaaatctagattcgtagtattaaatgatttatttttcatgagatgatgaaagaggtgtgtaaaggcacttcttcactctggcaatgatctccgtagcctgttcatagtgtatttaaaaccttgctcttttctaatatagtgacgtgtaatttcctttaaaaaaagacacttgcatcaagaacacacaaaagaaaactagcactccagcttgtaaggaaactaaaagaaaataaaagacagagaaaaaagaaactaaaaatagaggtcggcgttcgtctccctcctgtcccccgtttccacctctccatttccaaagtccaaacttttctccctctctctctctcttctgaggaggccaaggcagcacgcgtggccgaccaacctcccgagcccgcgtgatccggcagcatcgatcgcgcgacgcgctcgcattcctcctcccgcggggaggagccggcaggatccggcagccggcgcc

SEQ ID NO: 4097 - DNA, 14500 bp, Oryza sativa
cacgcccaagatgaccgagacgacgatgccaaagctaggtgggtgcggcgaggagggcatgagtgctggtggctggtgggtagaacgggtagaggtcgccagagctattgcacctggcgatcacgttcctggtttccaaatccttcacagaaagaccaaacggatcaaactcaatagaggctcaagtgaaagtgtgggaatgattgattgtattccacaagtgtcaagggattacatataggggcagctggggtggcactcaggcccaccgcacgggcccaattacatccacaatcaaggcctaattacattagtctaacatgttcagctgagcagagatttgcttgcactactgttcgccttggtcttcgtcataatgttgtataattatgctgtgtagtggccattctgagtataattcgatgtatacgtgggcattatgctttgagtatggtcactagtcgtttacccatactatgtacagtacaggctatatatcattattgatactgtgaacatactttacgaaaagcagtgactttttgtttcttatatatctgtaaattcgtagcttttgtaagcatacctgattaatagcagattagactacttgattagaaactatttgaagctatttaatctcaagcatggaaccaaagaaatcctgattctctcgtttagttacctggtatccactatccagcactcgtgcaagcaaaccaccactttataagcccagctacgctcctgggcccaatcagcccagtagatatttggatcgtaggcctacttgggctccaccctctgatccgagtgcacggctcagtaaatctgaggcccaatctgtggaaggtcctggttaagtagcccactgcagctcccttctctttaatcactgcggccatcaccacggcatgaaaccagtcacagtttcatgcttccgaactctccacgaaatgtaattaattgaactgaaaattaatgctaccaaggccattcccaacccaagacactagacatagtttccataatctccacatcattaagaaactagcactagacactactcttccaatgcaaacactactattccatacttaaatttaatgatacttgtctaacataatgtcttggatgttgtgtagaaaccatgtctcatgcaagacatggttttcttctcttttttcatttattcacttgccacatcatttttcattctaggtggcagcttatttaatgctatggacaccatcctatttattgcgttgggaatggcctaagcacaatgtactagtataaaacactcgtcgattaaaccggccaataatcgaacaacatgacagccataaaaacagtaaacgtacgtatttgatagtgatacacacacaattaatgtactactataagaattaaggagtactagtacatactccaagacacgacaacgacgcagcaagcgaacaacagaatcgaacatgcgatcgatccaaatggaagaaaagggtacatatatcttcattgatgagaacacaaacagcagcaagctagggacgccggcaatatatattattatcgttggctccgatcatatataggttttgatgcgaccggccattattgggcacaacgaagcttgtgatgagacttaccagagcagcgccgccaccgatagaccgacgacggtggcgagtggcgactagcggcgggatggcggcgtagaggagcttcttcccggcggcacggcggcgggcagccggtttgtcggacacccacactaaagcgccgatcagggtcaccccggcaaggaaggtcactgccagggcgaggttgtagtaggtgttggcggcgaatccacccgtcaccgccggctcgaacgctgcagccaaagcggtggccgtggagacggcggccaggccgagtgttcccaacgccgccgcgatcttcgactcggcggcgccgtcgccggcctccgcttcccggggagcagcggcacccaccagtagtagattatttgcggccattaatgtatctcccttttggtgatctctatatctctcacttcgatgatcgtcctctctttcaaagagagatcagagccgataaaaaaaaaaggaaggattattagagagatcgtcgaggagtgggggactggccggtgacccggtgtacagtgcgagtcttcacttccgtcggagcacaactgcgtaagtatatataaggggctttatgacgtcatatgaattaattcgaatgagatgttggagtaaaaattaaataaatcaaggagggagtggtcgtcgtcatatgagctagctgaggaagccatacgctgggtgcaccgttcacactgtacactgcagggtgcagaaattgtggaaccatatatgtcaggtagaaacgtagggtcaggcgtcagcacgggtacgtaaccctaatttaactgggccccgcatgtcattggcgtgctggaaattcaggggatgacgtctttggtcaggaaatttcattcactaaaaggacactaaaaaggaagctaagctagtgccgcgtgtgcagcttacgtcatccattctgttatgtctcgggtagccaaagaagtggagtacttgtcatctgcgtggagtacttgtcactgtcaacgtggagtactttatcacgcgttacttaacttgtccccactgcagtaatttcctgtttatgatatccaattactcctaatgttgtcgttcatggagtatttacctgtatttttgcacttctcccgcaccctaaattcgccaaaataatttggtttggattgacttttgggttacaaatacacactcacacttaggggtgaaaacggtacggaaacggacggaaacaacctttatcgtttttgttttcatatttttttcggaatcggaatcgaaatcggaaaccccggaaatgaaaacgaaaacgaatattatcgaaaccgaaaacggagcgaaaacgaaccggtgcggatacggtaacgaaaaattatcggaacacagaaacccctcaaactgagcttcacagcaaaatatagtcttctataacttcatataatttgcataacaaatatttaaaaaacttacagcaagacactggtacaaggtatagacttattcagtgctttcactccatcatcagtacatactacatagttcatcaattatcacagaacaacaacacatatcaatccatcaatatttcagtacttagttcaatctcataacacatcactccatcagtattcatcagtcatcacaaaacaaagttcaaatcacaaatctgtatgataaaagaaatcaaatcaacggtttaggctcaagaacaccgtctgtctttagctggacatactagcagtctgtctttattggagtgcttggtgaatggcaatagaacatattaataatacagttctcttctacaaaattaacagaacataatataagcagaagcaggaacacctgctgccactgggctactggctgctgctgcctgcaaggcgaggcgtcgtcggcatcggcggtgtggccagtggccggcgtcatccgcgtcggcggcggcgtcgtcggtcctgtggctgtggccggcatcggcagtgtggtgttgtggccggcgtcggcggtgtggccagtggccggcgtcgtcggcgtcatccgcgtcgacggcgtcatcgtcggtggtggcggcggcgaaaatgagcgagagaggaagggcgacgagacggcgggggcgaggtcgcgactcgcgaggagtcgactagccaaggacggcggccagcggtggcgtgctcgactcaaccccctggttgcgctgcctctctcctagggttagcctctctcctcggttagtagggacttgggttgggctgggaacttgggaaggaattatggactatttggatgggcctttttaacttcggaaattccgacaaactttccggaatttttccgaccgattccgagttccgacggaaactgctattatcatattcgattccgtttccgaaaaaatatttccgttttcgattccgtttccgagaaattccgaaaaaattccgaccggctgattccgtttccgaaaacaggtccggaatccggaaaaattccgaaccgttttcacccctactcacactagctagggcaccacatgcatgcacttctttaatttattttcgaaacgagacctatgttatgtgcatataataataaaaaatgacaagagaacaaatttaaagcataatagctaacccaaaaggaaatatatcttatttcggtagaaattttattattaaagtggatgcaagccatgaacccagggcatgtttagattactaccaaaatcaatcttaccaaaatttgtcaatgccaaacttttaacttttagcaagttggcagaattgccaaattttaattttcctaaccatatatttgtcaatttcaccaaataatggtacgatttaaaatgacacgaatctaaacacgcgcccccacttataaactaattagtaagtaaaccgtatatcaatccacgatttagttactaattttatcaataagtgagtttccgagtcaacccacttacatccccacgtgccgtgctattgttgcgcttgtgtattgcgggcccaacagcaacttcgcccactggcccatcaatggtgctcgcggtccataccagcccattaattgcttggctcacttaaacaggcccatttgtggatatcgtaattcttttcggcctattgagctgtgagagcagcagatccgtcctgccctctcgcccgctttaccggaaagttgaaaataacaatgtctatcaaagtgaaaaataaccagaacgctagtgctctctccgttccaaaaaaaaaaaacaatggtttccgtatccaacgtttgaccgtccgtcttatttgaaaaaaatataaaaaaaattaaaaagataagtcacgcataaaatattaatcatgttttatcatctaacaagaatgaaaatacgaattataaaaaaaattcatataagatggacagttaaagttggacacggaaaccagggtttgtttttttttttgacggagggagtagactttatcgtcttcgaccttgcatgtacacctctgaccctgagcctgaggaagcttcctgtaatcgtaggaggagcacgcatggagggagagtcacatcgatccatctgagtcacatcgataatccatctgctcatggatcgattccggccgtccatttgctaacacgcctcgtcattacctaatctgcataaccgaaatgcacgcgcgcgtcactctcgatagccacgatcctgaatcctcctaatgttagcatcctagcgcaatccagcgtttagctcattgtcgcgtccaactgttgatgattatatatgaatttatgatgcatgcttgctaaaaatgggaaaaagaaaataacacagtttatgtctttatcgtatggatatttgtccctgacgtgtgttagtgtaagggtggaaaattcccttgttgctcgtgcacgctttccgcactgataaatggtgcattttttttaaaaaaatatagaaatgttacttttaaaagtatataatctatttttcaatttaaaataattaatattcaattaaaaatacgctaacgactcatctcgtttttatgtatattgtcgataatttattttcccacactgggtcgatccgcgaactcacttatcccttatttatataaagctaatgtccactgaatatctaaagctcaacatgtaaacatagtatttattagcactgtgagcgaatttttcaagatttatcggcgttgtgctttcagtggtaggcgacgtacccgtcgatagcgagacgcctgtggtgacttcgttaatctctccaggatttgccggctcagttttcaaagatgctcatagaggtagggtttgcgtgtgtgttcattggggtgtgtgcgcgtgcattgtgagtgtctgcgttctactgcgtattctcaaaaaaaaaacctacatacaagcatgtcacatcaattcattaagcacacaaagctcaacatgcaagcatatagtaattatatctataatttatttaattctaaaactaaatatacatatgctaaatgttcattctcaaatcattttcataatatttcttgtctaaatcatttcatcatttctccaatatcaaacatatatcccgcagtaaagcgtggggcatcatctctagtttatactataagtaggttcaagacccacttacacctttacatgcatgagatcagtgtttcatttccaccatcacgtaccaggtatgttttttttaataaaaagaatggctcagagagtccggctttttactgaatgcgtaaagagtttttggttcgatacaaaatgctggggtgtaactctccagcttttccaagaccgctcacagcccacaccgagactcaggccgcaggccaacagacaggaaaacacactacaaagaaggcaaaacacacacacacacacacagataggttatcctgcttgcaaccaatcgttcgtcttgtgtgagccccgcagcaagaccccactcttcatccaatcccgtcctctgattgaagtagacgaattcttgcatcgagcaagcctctgcagttttccatttgctccaccatcttccccggcaccaacgtcttccactgtagcaaaaacagcaacatcttgtgaggtgatattgatcgaatcacattacttaaaagttcagttcctagtttaccaaatagctagcccaggcatccaccacaaaaactgtgaggttgattaggttagatttatcgcccaccactcctaacacttccattaggtcgttacaagaaccctttcatcactagccatccaaaaatctttatctttaaagacgcagggaccttccacatctccatctgtctcagcctctcaggtcaatgacacctctaaatgttagttattggtacatggatctcggagtatactgaccgctcttttcaagtttccaagtcattatgtacatctctcccctcagttagttgcacttctcccaacctctccatgagctcatcccactccacttcctctatggagagggtccttcttaagggtatctctcccattctccattcctaaagctcctccttactgtcaccggcccagggttgagagtgatatgctaaagatgtaaggataaatcactcaccagatatgattcagtttctatggagtcattagtgagatctatctacgtacccaatgtagcacttttgtagtgttggaagtactcaattacttctcacttcactcaagcattgatttcaccctctgagtcttgacttatggccccttatattcttttctctcagtgacaccaactattagggcacccacaatggttatctataggctctctacaagagatccatgtcagcatattttcctacatggaagatattaaatgaagagaaagaacaaagctatctactaacttagagatagtctatagagaaaaacaaggcaatgcatgagagagctatagatacctatgtagacatactattgaggcggtttactattaatctagtctattgctgagatgtacatgttttatatatagcaccttactttaccattgcgggtgctcttagtggatgggataggggttcggaacaataaagtggtgccactgggaccgacgagaagcctggaagaaattcttgtacaaacaaaatgatgactgatagtttgatcaggaattgggaccagagagcatgattttgtgaaatcatgtgatgatttaatcgatgtgatgaataattgtcaaaggtaaatgtttgttgagaaaataatgaatagtgttttcggtcggtgaacagtgcagttggcactgggtgactagtcagaccaaaggtatccgggcaatttgaccaggtatccacggcggcgccggatctgccgcctccggggtcgccgccgccaccttccacgggagagagagggagagggagagagcggccagatctgccgcctccagccaccggacgatgacgacgactgccgtctccgccccgtgcgcgctcgccgtcggttgcctctgccccggatctaccgctccggccaccagacgacgacgacgacgacaactgccgcctccgccccgtgcactcgattcgggggcggtggcggcggcgggagagagagggagagggggggcgagcagaggcggaaggcaacggcgagagagagagggaagcaagcggcggcgggagcggcggggagagagagggaagcaggcggcaagtggaacaacgggcggagggagagaggaacgccagtgcggtcgtgcggagggagaaagagagagagagagagggggaagagaggggtaggataggaaagaaaggaagagaagagaaatgagcttttttgggttggaacattcattaggctattcaaacatggtctgcattgtagaggtgagtacccctagagtccctcagttattgagggcatcctaggaatggctcacattgctatgccctaatggaagaagaaagtagctgcgtatcgtgtttctcttttatgtaccctgttcattttttcccctacgaaagaggtgtgatgttagctgtagtccttttctaggaggagatgctttgtatacctagcaggctagcactctggatcgaacctttttagtaaatcctgttttttagaaaaaagggacttcatataacctaaacaaaagcatgggagcttccaaatcgaggctactgttttattacagttacgcagatgcatactatatactttataatacatccctttacttatatatatagtacatatatatactaccaggctgctagctcttgctcgctcaaaataaaactgcaacttcagtgtgagctagggcccatttaattaggtacaagtagatcagtagatggcgataccaccggcactggctcggcgagaatcggagcacgacggtgctgcgtcgtccaacatcccggcggtgctgttggtgctcggcgtcgccaccgtctccgtggctattaataacaccgccgcggctgccaccaactaccactgctccctcgccttcgccatctctctcgctgggggcattcctctccggcatggccatgatcggcgcttccgtctgggtgtccggcgacccacggggccgcactgccgctggtaagaagatcatctacgcgtccatggcaccgctcgtgctggccgccgccggcctagcggtggtgatggcgcactcttctgcaggtaactagctctaatatgtactccctccgtcattaaaaaaaagacaatcaattttcttatagtgcaatgaatctggatatatggttgtctagattcgttgtatttttgagggatcatatcctttttagattgttctttttttagaatggagggagtatggtcttgacgctgacgacgcactagctaggtttacgtatgtcgcctctgccgtcgggccggccaaccgcgagcgccgatgaaataaatgaataaacagatcatgtagtacgcacctagatctagctgcgcgcgtgtgtgtatatatatatatatatatatatatatataacattgtaaattaatggatatttgtactttttattggagatctccatttacaagtctattgcttgtaattaatctttcatggcgcaatttggaaaaggaaaagaaaagatacgaaaagggaagcttgacgggatggggagaagtgcgtgtaggcgtggcgctgctgccgacctgcggcgagcgtactgaccatcgtgagctgcggcactgcggctgcgccccccaccggctgtccggtgaccgaaatgatgatactggtttgattggggctaactcatgcatgcaccgtatgctcgatcgggacaactacagagttagtgaattttctaaagttaagagagatttcattaatgactaaacattagattacattcttggttcagaagttcaaggatttctgcacgagcacataatctccactccgtatcaattcgtgaacccattaccatttgagacaaagcatgagctatctcatttgaatctctccttatcttatgtagtgtcaaacactacatggccgctttaatttctgaaattatgccaccccattctgctcttgaggccgagttatattagtgatatttgatatgcgttcattagtactctcttaccgtgttctcaaattttaactgtgcacttgtttactgtgtactccgtataatatactccaatgcgtatcggtcgccagctaggcaaatcgagtagcacctagctagcgcgtggggctagaaagactctgtgctttttataacgtcagtgctcccgtctaccgctggtccgctgcgtagcctgcggttatcagctaaagcgatgacgtggagagccgagagcgacgtcgccgccggtgcgctacgtacgccgatgccgaccgaaccgcgctcctgatgactcagcttacatcctcttcttttcgtttatgttatactccctctatctctaaatttcttattaaaaaatttttataaaatatgtaaaaccatatatatatatatacacacacaccaattgcttaaattttttagaataagacaaacggacaaacatgtttaaaaaaatcaacggcgtcaaatatttagggacgcagggagtacttattagtcaaaacttaaattttcaacctaaaatttaaagttaattttgattttatttataaaagtttatttttcatcatttgcttttagatcgttaagaacacgtatataaaagttttattcgtaaattatttttggtttgcaaataaaacgtaagcaatgggaccattaattagctcaaccaaacgaacaatgagcctcgcaagacgtttagagccatcgatcgttcgattgcctaacgagccgatcaaaattttaattttagaacttaattttgaaatttattttaagatactatttttaacgcgcgctactcctcgcccgcgacccatatatgcagcattccgagtctccgacgatcttaaggacgacctcgtggacggcggcgctggcatttggatcgtaggcccaggaagcgatcgtaggcctgcttgggctccgccctctctcccaaggaaaaagtccacttagactccttaaatgttcaccgaatctaattcgcaacccttaactagaaaaccgggtaggacgactccccgaattattgaaactagtgcaatttgactcctctagcggttttggagggcggttttgctgacgtggcgctgacgtggcggtgctaacctggtcttcatcccacgtggcgcttatgtggcattagaattaaaaaaaatatttgtggacccatctgtcattcgcacactctttctccatcccttctccttcctctctctctctcccttctctctcttttctctcctccttcggacgcacgcgaggaggagccggatcggcgacggcggcgtgcaggcgagggctggagcgacgtcatgctccttgagatgctcagggggcagactacagagggtgtgcgactgggtggcgacggcggcggccgacggggcctgggatctccagcggctggccgcgtggctcaaggagaagatgaagcgcaacgatgacaacgacgaggtgtcaacgtggctggaggagtcgtggatgcaccgctacgcagtgatttcaaccatgtgcaagcggccgcgatgctggagctgtccgtttcttgcgtggacggtgaaccaaacaggaggccaagcatgaacgctgttgcgcagaagctcgagggtcagccttctcgaggggcttggagcagggcttgccgcacgagtgcggcgtgaggaaagatcgttgggtggctcgcggcggtgcccgcagaagcaggtgtaggcgagctcgcgcgcggggacggcgtgcacggactggcacccggggcagcgccaggaggagtccaggtcaggcgcgtcggcgacggacgccggggagcacgcccacgcccaacgtaacgactaccaacacgacgacgaccactaccacgacgaccaccacggtggccgccgagatcggggcccaccagcaccacccaccacggcccggtgttcgtcggacgccactcgatccgcgtccgaccatggccacacccggacccgacgagctgctcaagtcgcaccacatcctcgccaaacgcagggagatacggaagcgggagatggagggtgtcgtggtgttcgccgacgagaacagcatcctccggacggagctgttcgacgaggtgcagaaggtgaagtcagtgggcgccatgcctgtcggcgtccttggcgaggacgaaggcaccaacgagatgttcctccaggcgccgccgggctgcttgcccttgacagcgggctgctacgcgtcatcgccggtgatcgcctccggcgaacccgagttcgctccggcccccttctgccgctgcccctccgacccccgcccgccaccgccaccgtcgccgtcaatccggtctctgctcccccgcgcaggtctgaaggggaacagaaagggggagaaaagcgagagaagggagagagagagagagggaggaggaagaagggaaaggagatatgacacgtgggacccatatgtcagtgggtcccataattcgatgtaagggacatgtcgacgccacgtggaacgaagaccgagtcaacaccgccacgtcagccaaaaccgcttacaaaaccactcagggagtcaaattgtaccggttttaatagttccgggagccatcttatccaattttcttattaaggggtacgaattatctgcgacccaatctgtatgactagttaagcccactgtggatctcggttgtgtttattcaccgcggacatgcgcgagaattggccacagttatgctttccgatttctgatcggtccaaacagagaaaaccgatcggggacaaagatcatttcattattggataatttcaattttaccttgattctccaggtccaatggcttgattggcggggaattaaggaaggaaggagggtagattatttgctagaacacagctaagtaaattggagcaagcaggctttgactattgactcagctcagttcttttttttttttgggcactatcagctcaattcttgagatggcgacggctaccaggaaggcaacacctggctatcctcctccctctgtcgaattgaatcgttggagagtttgtcgacaccactgaaaaatgagaatgacgattccatcttctccctgccgacaaatatagctgtttgggcatatgacgaaggcctgctttggtgatcacgcctcttgatttgttcaggcccctcttttaatttggtcgtgcgattaaaaaaaaaagagcgggtagcagaacataatttggtcgtgcgattaaaaaagaagaacgggttgcggaacagagtgaatgtaaggcggttctgagctctgatccttgtggagtttgtgggtgctgtgtgactctgactgactgtgtgatctgtcttgcttccaaattaagtgttgttattattccctaggggatgcgtctggcaatcaacaactttataaaagttgatttttcaaatataactaataaaattaaccgaaaatccatcttattcataaattttatccccccaagttagcattggctctaaggataaattaattcataacaacataaatgataattacataattttttaataagacgaatggccagacacattttaaaaagttaacgtcatcatatatttttagaaaaaaaagtagtatactaatttattaatataatagataattgttcttccacatgatcacatgttttcatccaattctaaccccagcagcaaagataagcatggcatgaaaaatcaaagccagggatagagaaaaatatgctagggggcaaacaaaagaataactatcaatcgggtcaattttggctgctactcccttcgtttcatattatatgtttattttttaaaaaagttatttatgtttgatcaaatttatagaaaaaacttagcaacatctacatcactatatcagtttcattaaattaatgaacattaattatattttgataatatgttttttatactgtaaatgttaatatattttactataaactttattaaaaataaaaagtttgataagaaaatagtcaatcgatttatattatggaatggagggagttttttttaagagtaaatttcacaaaactacatgtaacatctggtccaaattgcagaaaaccacacgcactttgacacttggcacttgagtaaatatattttgttgtttaagtttcacaaaactacactatcgatgtatagattcacccgcgagatgatgtggctgtttcccctaggacgaggacaaggcatcctgttaacagccatcgcacgaaattaata

SEQ ID NO: 4098 - DNA, 841 bp, Oryza sativa
ttcatgataagatggagaaattgagtgaaagattagaacatgaaaagaaacgtttggaagaattgagcggagagctggtgaagaaagaacgtgaaagcaacgatgagttacaagaggccagaaaagaactgataatggtattactccatttctctatgatgattggcaaaattccttatacctatctgttctttatttctttaatgattgatattcatgaaaaggttttcatacatgatcataatcatttgcaattgacagggtttggaggacatgctaactgggcgaactgctattgggataaaaaggatgggggaacttgatgagaaacctttccaaaatgcatgcaagagaaagtacggaaacgatgactatgagaccaaagctgcggagctggtctcaagttggcaggaggaaataaagaagccatcctggcatccttataagattataacggttgatggcgaagataaggtatttgctctgctgttctatgttttactcttgtaccatctctgacattagaccctagggtttttttcgtaagtggtaaccatcgtcgaattttataggaagttgtagatgatgacgacacgaagctgcggcacttgtggatcgagtacggtgacgatgtgtgcaatgcagtgaagaccgccctgagcgaggtcaatgagtacaatgccagtggacggtatgttgtgcccgagctgtggaacttcaggaaaggccgaaaggcgacaatgaaggaggtgctcaagtacatctttggacagatagagacaaccagcaagcgcaggaggccgtgaagttcgtccttcgatggatgaagaagctgacaggc

SEQ ID NO: 4099 - DNA, 514 bp, Oryza sativa
tgaccgtgagagagaggagaaatacattaagaaattggacaaaaaactcaagaacaaggtgaagttgctggaaagacaaaagtccggttacaagcagaaaccccttggacaatgacaatcaggaagtcttctgatcaacatcagctgtagactcaacccaccagaccatgttttgtcatacggcaatcgaacacattattgcagctggaagaggtaaagcgcgaacgcagcattgttgtgaatacgcattgtttctcacctcttcgatctccctctcatctccgaaggagagcttggtgaagctggaagctgcctggactggatccattcggttttccttgttcatatagtggttataaaattatgtcacatagttccactgattcgattctttatttgtcttcctccactgccacggcagtggcagctgcgagggcagcagaattttggtagtcatatgtaaaacctgtaactcaccatcatcactgtacatgtaaatttccagttggtataa

SEQ ID NO: 4100 - DNA, 7086 bp, Oryza sativa
caggaatatttggcaatgtcagctgcagataccttggagcatcttaatgatgagagtgatcgttggacatatgtttggggcaacggtattttttcttcacagaaaatttatgccatgaatttttctcatgtctatgtgcctgtttatattaaatggatttggaagagcagttgtactatgaaagtcaaggtgtttggttggctcctcttgattgatcggttaaatacttatgacatgttagacagaaggcgttgctcccctcaaaatgcttccttgctctgtgtactttgttcaacaggatcaagggaaacaactctccacttatttttccagtgtccttttagcactcaatgttgggtgcaatttggtgtggtttggaatctttctttaagctttggtgaaatgttgatcacggccagaaattcatataactctacccattttgttgagaaggtgctttatgctgcttggaacatttggaagcagaggaatagtttaatttttgaaaacattgttccctctgttccctcttggagagttctctttaggaatgatctctcccttttagttcatagagtcaaaaattctgagagagatacattattacagtggttaaatttgttgtaattttttcccctttattaatataaaatcttaacggtgggggcttcccctaccgtagttctttcaaaaaaaaaaaaaagtcactgccaggctggttcggaaacgccatgttagctgagaattccgcagaaaaagaactttgcaagcttaattcgtgtcacaatggcatggtgtagtgcaggatttagacagctgcaaagataaatgtgttatgcagaaaaggaaaataatatcttgggaaaagtattcttagcaacagcactgtgtttcgcatatttatacgaacttaatttactatcttgtagctcggatcaaagatattacgaatacgaagtgacatgaatgtactagatttacctaataatagttctttcttagcgaagcatttgtgtaactgtactgactcgtgattgatatattattagcaaacaacatgtactccttacttttcatcaaaatctcagcacaaagcatatagaaatatactactattttcttctgtttataccctcaagataaatgaatggaatttcatctcagcaccagcacagcactatatggccattttcccatcatttgtcattgcagtttttctcccatattctaaacaggtcactctaaattcgatgacacactcatacgcttagaaggcatatatggccagctttgtggctcatgtcaaatccctactatcaacgtcgaagtactgtcaaagaacatctcgacccatccatgtcgtaggagcattagttttcccaatgcctttcacttccatttctaaattgttcatgtatggaaaaaaaaaactaaatcttcactggagcaatatatataggcacctgctgcagtaatattacaactaactctagcatacatcacttcacacacacatatatatatagcttaggacctgtttattcccaaaacaaaattttcacgctgttacattgaatgtttgtacacatgcatgcagtattaaatgtaggcaaaaaaaaaatcaattacacagattgcgtttaaattgcgagacaaatcttttaagcttattaaattgcgaccaactgtactatagcttattaatcaagctggctatgcagcaaaagttcgaagccgagaagatgattctgaaatcatcgttctctcgccaacgaatgatattttaggatacattaattacatcatcaagaactaatgaattaactagcaaagtgcttttgtgttacaacggaaaaaaatacttcctctatttcaacttactttgtcattctaattaattttgtcataagtccaattttagtaattttgattatatataatctgcatgttcttaaactatatgattttctataaatttgtattgctattagcttcagtacgaggaaatacaaatttctacgtacccgagagagtaagaaagttggcaaaatagagcggatttggttggtaaatggctcagtgaggcagtgtggagggagagatgggtggttgttcagcatggagggacgacacatcacaacttaccggagagatctagaggatcacttcaatatgcaattagatcgatgagataggaattcttgacttttaatttttatgaccccctaagttgtatgttctggatgattgattgtttccttctatttcttgttttaatttaaagtatgattatggacttactcatacatgaagatggagtagtttgacatcgaacgaggagtttgattggcagtaacatattacgattgcagctaatctatccacatgagatggcagcagtggcccatccatgcgcggcccgctgccaagggtccttgtgccacctgaagtatgaaatgccctggcacaatagaatcagacgtgaatcgaaagacgtgaaaaaaaaaccatgtgctctccaacgacaggatcgatctagacagcatgtcggtggatgaaaatcgggcagaaacactattgctttttataagtacagataaggattaaattgcatccatactggcatttttgttccagccccccaaaatattcggaccggcctatctttcctacatgttgtcggagttgaatctttcgctcctagttctttctgcttatgtgatatacctaaaaagtactcgatcatgaccaatgatatgcgacatgggacaacaaacactatataacaccaccatcctccacaagcacacatccttttatataggctcactctttacattcatcaagcttatgttgactggcggtataaaaattgtaatatgttcactaaatatggttcagttgcctcctaccgttgcaggtgtatgagtaggatggagcaaacagatcgttctatatatgctgtgttaaactggcctgcaaaccatgtacttgcatgttcagtgctcatagaaagaggcagttgtcttagagtaaagccagagcagttttgtattgcgtctaaggacgttggctacctagacgttggttctcttgtttaggcttgttggttggccaactcatagtggtctcctttggttcctggtgtctccaagtcctatatgcttaggtcgctacatgccacatcctagtgaagcaccgaaccagtggcttcaaataggaatgcaaatgattggaaatgatctgaattggtagcatctctttgcaaacgacgctcagtcggccagtatttgaccatatttatcatttaaattactcagtattagcatgaatatgatgcagaaagaaattagaaaaaaacaaatttcatatacaaccaataatggtaatgttagaaacagtaccccttagacgaaaacaacactgggtcgattgggaatttccatgaccattttcgcccctacccattcttatggccacaatgtgaatcatgatctccggccacttcacgatgctcaagcatatttaagttagatgtatcatgcatcttcatagaaagaaaagttagatgcgtcatctaggtgaacctattggttatgatattagagtgaacctattgtaaaggaatcaaaggagcccagattagcctcaaattaggtaaaggcccaaaaagggaaatgtgcctatgtgcaaaaccgaaaatgggaaaagaagaaatcatcatacggtcctaaaaaagggaggaccgcttgatctcaccctctcactttcgaattagcactagaacggataccatcatcttaatcgggcggtaagccccatctcaatcgggcatgacgtccgtcatcacaggctataagtcactcaatcgggccacaactagcgcccgtcacagatgacctatctcaatcaccatgccgtcccacccctctcccaagtgggtctttttttatcctcactcgtgtgcaccagggaagaacttcccgattggtcacccatcctaaaattgctccaggcctaacatgcttaacatcaaagttctttggagatcggcttccggaaaagtggctgtaacttgttgatatgagtattctattaatcttattaagccctagtccgggatgtcacaacatcccccattcatatacattcattcacatacacaaccatcaatatatttaacacaaccacattcacctaacatccattttgatcatatatttcatatccattcacatatttcacatatttcactagcaaaaccgagttaattggatcaaatatatatttagcaagtattatcatgaagaggaagcaaatcagacttctaggaaaatgaattttgaactgaattttataataaactcatatgtaaaagcagtcaaaaacaaagttgtagaactcattgagatctgtaaaaaataaagcctgtcacagatgagaacattaaatttaattttaggccgatttttgtgtgtcaaatgcaaaaatcataaacaacaaaattgtataacatttttattttggtcatttctccatctgaaaagtcaccaaaaccaaagttgtagaactcatcgaggtgcaaaatttttattttggtcatttctccatctgactctatttaaacaatttgaaatttaaaattcaaagtttcaaaaattcaaatagaattttagatcagtgaatgactttaactgaaaaagtcatcaataacaaagttatacaactcatcaagatctataacttttattttggtcatttttctgtataacattttttgaaccgtttgaatttgaatttgaaaatatgacaacttcaaacaacattttcaaataacaaatgatatcaactgaaaaagtcatcaacaacaaagttgaataactcatcaagatctaaaacttttattttggtcatttcttcatacgacaaagtgatagtaacattgttcacaaaattgacatatctcttatctgatttaaaaactataacacatatatgtaaaatttgcgaataatattactaacattttgttggatgaaaaaataacaaaaataaaagttttagatcttagatgagttattcaactttgttgttgatgactttttcaattgaaatcatttagtatttgaaaatgttgtttgaagttgtcatattttcaaattcaatttcaaactattcaaaaaatgttatatagaaaaataaccaaactaaatgttgtaaatcttgataagttatacaactttgttgttgacattttttccatttgaaatcatttactacccgtaaaattattttgactcataaaatgaattattatattgcacttaattatttagctatagttcaacttacaaatataaatatttcatatgaaaaatggaaaaatactcatcgttgacgggctttagttattgcccgatagagattaagtcatctcaatcgggcattagtatatagcccgtcactgatgagtcatctgtgacgggcctagttgttatctcaaacgggcctcaagttggtacacgtcacggatgatggtcatctatgacgggccccaacttgaggcccgtttgagatatgaaatgttatctcaatcgggcctaaagttggtgcccgccacagatgatggtcatttgtgacgggccgtaaatttaggcccgtttgagatatggaatgttatctcaatcgggcctaaactatggccagtcactgataggtgtcatccgtgacgggcttaagtattatacccatctaacatgtctgtgtgaccatatctcaatcgggcacttttcggcccgattgaaatgacttccttgtgatggcccgctatttgtaggcatattagaggccccacagatagaaggatctgtactagtgtagcattttttcaccagatgtcaagttttgccaagtcggctttgtccatatgctgcctcctctgagcctagttggtgactcatgtcccctgtctatgctagactcggcagcatcccagcccgcaaggccacttctgctttctccatatcctcccctcgatgtagggctgtcaaaaaagctcgaggctcgcgaggagctcgagcttggcttgtcttaggctcgattcgagctcggctcgagctccaaacaaaccgaacccaagcctgagcaaaagctcacgagctttactgagccgagctcgagcttctaccgagcttgaccgagcttgattgtgtatagtttatattacatgttcaccttattgatataataaactaatagataaatatatatattagtatctatttacacaacaaattagcatgttttagcacaatatatttattttaattattttctactcttttattagtgtgattaactagaaaataattatatttatcaagttattatcattaaaatattgtaacaccctgaaaattcgaccgacaaaaccaaaactctaaaaatacggattttcaaaaactttttaaactaattgcatcatgccgatcttattcgtctattttatctggagttgatctcgaagattattaatcgtgagtaaagaatagttaattagaaataaaccttaaaaacaaattggtaaaataaatataaattaaaaataaagattaggtgtggatagtaataaataaaatattatcgcgaccatatttggatcaattaaatttcattgcgatggaataagaattaaccctaattaaaactcaaataaattatataaaaataaaatatgagtaatattaatctagggtgaattcattagttaagataacacgaatattgagtaaaatgcatatatgtaaaattaggaattgtggaatcaaatttagatggaaaatacactaaaatcgggataaataagaaaagtcactgttcattgcgcctaaggtgttcgatgtggtccctagccttccccctcctctcccacctctgcccctagccgccccgagcccgtccatcgcgtcgccgctgccgcgccgcgtcgccgtcatcacgcgccgcgcgccatcgccgtcgccatcgtcgccgtcggcctcgcgccccgtgccgccgcctcgagccccgtgccgccgccttgcaccc

SEQ ID NO: 4101 - DNA, 40076 bp, Oryza sativa
ccgccccgtcctgtcgcctcgcgccccgcgcgccgcctcgcgccccgcgccccgcgcgccgctcgcccatcgcgtcgccgcctcgcgtcccgcgccgctgccgcgccgcgttatcgtcgcgtcgccgtcgccgtcacacctagccgcgccgagccccgcgcgccgccccgagccccgccgcccctcccctctccttctccccctcttccctataaatattccccctcccccattctctccactccatctcccccttcctctcccctctcccctctccactgcgctgccgttcccgtgccgctgcgccgccgttcccgtgccgccgcgctgccgttcccgcgccgccgtgccgtcactcctgtgccaccgtgccgccgcttctgtgccgccgtacgccaccgtcgccaccgccgtcgtcgccgctgctgccgtcggtgagccgccctccttccccctcgcgtccaccaccgccaccgctcgggtaggagggagagccgagagagagagagagccgagagaaagagaggaagaagaaaagaaaccgagggagggagaagccgaggaagagagaaaggagccgggagggagagaagaaagggaaaaagaaagagaggagagaaagaaaagaaaaggaaaagagagaaaaaagagaaaaagaaaagggaaaagagaaaagaaaagaaaaaggaaagggagaaaaaggaaaaggaaataaataggaaattagagggagtttggggaagtttagaaaatttaaaataattagaatttaattatagattaattatagtcgtagaattgcaaaatttaatataaattatggattattcttggtaatttctataagaaatcaattcgcggtagtaatttagatgtaattaataactaaacaaataaatgaattcttatagattattatagattatttttgggtaatccctataagtaatcgattcacggtaaaaattcggatttaatcgctaggaattttagacgtatattatatttaatcgtttagtcatagactaaattaaattgtataatatttctaggatttcgtccaatatttagctcgtggtagaaatttctaacctattatatacaatgctcggggagactaaattattgacaacgaaataattatacccgcaaaatagtttaaatcgaaattgggtttgccgtagttcgcagatagtaaagttaataaaaagaatcaactttcgcgttcgactttcatttggatttatttggatttttatttgaattctaaccaaattcaaatcaatttttgcacgtaactatagagcccgagggagttgcggatccaagtgaaggccaagacccgcaagactttgagcaaggcaagtcatcgctattctttgaacatgttgatcccaattgcgaaattgttttgtttacaaataaaattgcatgcaatcatgaacatcctacttgtgattataccatgccttgattattgttcacctttaaatctttgtaaccatagatacgtacgagtccctagtcaactatgacacttgcttagaaatgctattttagattcatgcatactcatatttatcaaatgttatatgcttgggcaattacctttgggaaggtaattgagatgcgacatgtggagacatgagcgccacattgccatgatattgatgacataatttgtgaaaggaaaataaagtaaaacaactgttttcgactggggtggctggaggacttgggtggtgtccggaaaaggctagtgccgtccctggtcaattaaggaccgagccatgaagttaagcatgaaacgacccccgtacaaccgcacttctcgtatgggtatagacctagcggagtagatagctgagcggaggcagtatccatgcatagtggtttcttgatgtgtgaggcaggggctctacggtggggcagccattggtaggaccgcgaggcgggtgtctacagtggtgtcgccatcggtaggactaccatgtgagaatctaaaacataattataacttaatgcatgtgtgagtcttcccttcccgggtgcgccagaactcctctcactgctagaaaccgtgtacgcctagagtgcatgaggatgaaaagttcatggagcgggtactgccaatgcgaggttatcaaaaagctttgccgtgacgcgtctcatgtgttgggacgaggctcatgtgttgggcagtcgcggagtgcgggtaaagtgtacatccactgcagtttgagtaaaccaaatctattcgaatagccgtgctcgcggttattgagcaccgggacatgtattacacttggctagactctaaattcttaacttgtgtgggaggggatattgcatgatgaatcttatgctgttggagccacttcctgagaggcgggaaggtggacgtcctcagaaaaccatgacgaatcaatggcgggaagctatccttgggatcacaatggatggtggacagaaccgtcgttgtgtaaatacaaactctggtactaaaatttgatcagtcaatgctaggtcttaggcttgtgaaaagaattacaaaacttgctttgcgcaaaagaactatggccatcctttgaactccccctttcatatgcattgttgctgtggtggcttgctgagtacggttggtactcatccttgcaaatataaaatttatcagaagcgggagatgaagcctcggaggatcccttgcctactatcaggagggagatgaagacgatggcgtccagtaggtcttagtacggtcgttgcctgtggcaatggcatgccgctgcctgaattccgctgccttatctatttctgcttttggatgtattccggacctctcggtccgatgatttaagactatgcctgcgggcctatgatgtaataattcgtattagacactcgtgtatgtgcacttgatattccagctatgaattcgtgtgtaccaaactacttgatccagggaaatggtactgtttacacgatcgattcctgttataaaaacgggggtccacaaatatatattatactacttattgccgagctcggtagccgagctcgagctcgtagcttgcctaaaagctcgaaggtgcgataggctcggctcgagcttggctcgaacttgtgtcgagctcgagcttgggcagacgagctcgctcgagcttggctcgttgatagccctacctcgatgtcaccacacctcccagtgtgccttccttatctcgccaatggcatctgcccaccgcgtacatgattattcccgacctcaaaatagactaatggctagctagtctacagtatgtacaccctcactggtacagaaccttacatctgtgacggactgaaaaagcgtccgattgagatatggtcgcacagacatgttagagaggcataaaacccgggcctgtcacggatgacacctatcagtgacgggctgtatttaggcccgattgagataacattacatatctcaatcgggccacaagttggcgcccgtcacggatgatggtcatcacagatgactcatccgtgacgggctctatactaatgcccgattgagatgtagaatttttttccatttgtcatatgaaatgtttatatttgtgagttgacatgtagcaaaaataattaactgcagtataataatttattttattagtcaaaataattttttaggtagtaaatgatttcaaatggaaaaattgtcaacaacaaagttgtataacttatcaatatttacaacttttattttggtcatttttctatataactttttttcaacagtttgaatttgaatttgaaaatatgacaacttcaaacaacattttcaaatactaaatgatttcaaatggaaaaattatcaacaacaaagttgtataacttatcaagtgttaaaacttttattttggtcatttttcaatataaacttttttttgaacggtttgaatttgaatttaaaaatatgacaacttcagaaaaaacattttcaaatactaaatgatttcaactaaaaaaatcatcaacaacaaagttgtataactcatcaagatctatagcttttattttggttatttttctatataacttattttgaatcatttgaatttgaatttgaaaatacgacaaattcaaacaacattttcaaatactaaatgatttcaactaaaaaagtcatcaacaacacagttgtataactcaccaagatctataacttttatgtttattatttcttcatcagacaaagtgttgttaacattgttcacaaaatttacatatatgtgttatagtttatgaaaccagatgagagatatgtgaattttgtgaacaatattactatcactttgtcggatgaaaaaatgaccaaaataaaggttatagatcttgatgagttatacaacttttttgttgatgactttttcagttgaaatcatttagtatttgaaaatattttttgaggttgtcgtattttcaaattcaaattcaaattgttcaacaaattttatatagaaacaagaccaaagtaaaagttatagaacttgatgagttatacaactttgttgttgataatttttccatttgaaatcatttactacccgaaaaaatatttaaatttcttatattttgaaattcaaattttatatagttaaatcaagaccggatggagaaatgacaaaaataaaattggtagatctcaatgagttctacaaatttatttttgacatcttttttatataagttcatttagtattgtaaaattcaattcaaaattcgtttttgtctagaagtctgatttgcctcctcctcatgataatacttgcaaaatatatatttgatccaattaactcagttttactagtgaaatatgtgatcaaaatagatattatgtgaatgcgattgtgttaaatatattgatggttgtgtatgtgaataaatgtttatgaatagatgggatgctagggtgtgtcatactggcccagggctttataggattaatataatactcatgccaacaagttacaatatattttccggaagccaatcttcaaagaactatgaggttaaacgtgcttgttctagagcaattttgggatgggtgactgacatagaagttcttcccgggtgcacacgagtgaggtcaaaggcttgaggcgaacaaaaaaacaaaatttattttttttgattatactcatccgtgacgagctataatttagacccgttagagatgagagtcatccgtgatgggctataatttaggcccgttagagatgagagtcatccgtgacaagcttttgtgttggcacgattgagatgtgtgtcatccgtgatgaccggttgcccgattgagatattttctcacgtcactgacctttgcttagtcacgggggtcatgcccgaaagagatgatgtttaagcccgttagagataaccgatcccgttctagtaacataggtcatgattgtgatggattttaacaaaactaaatcaggataccatgatgttacaggactaatcgtattgcatgttacttttgtcaaaataattgtcctcttttagaacatggtttggatattagatctcttgaagaagagagggtagccgaataattacttttgtttgctgtgctacaggaacctgaaaatgcctgatagccaaagtatggaattggtaagctgatcgcctaggatgtgggcaattgaaataagatacatggcttccctccacatcattgcatgacttgttcatagacacatacggctcattggaacagagttttcgcgatggctatggatcattatatatcttggtgcgacgggatgttgtaaacaaacttataaacgttttctgctcctactaatacaaaatcaacaaattgttcaatattgcgaagaaaaagtattgcgtggtacacggtactacactctacctacaaaaccttttggtcctaagaaaggtccttggagtcggagtgtccatcgatatcaccggaaatccaagctgaccataaccccagccttcccttcaccctggcagtgtgcatcattatgttttgatacaaactgcacaagctggctagtccagtttggtgtgtgtcgtctgctctcaattgccctccatgaggtatggtctcctcgttcgagtggcaaagaaagatgcagttgttaatcatagagattttatcgcacctcgtgttggcaaacacaatgctgctacttatttgggcttggatgattcgccaagtgatactgcgctccttcgcttcctggtgcctcccaatcatataagtttggttatgccaccgaaactgttgttgctatgaaaatctcatatataaagaagttctcagctgtcgtcactggtggagaaatgatttttactcctggttggtaacctcctatagtcccggtttttcaaccgggagtaagatcgttaccaaccgggattaaagtttttttttctttttttgctattttgtatatctcacgcccattatcttaaatcattcaaagcaacgtatatagttcatcccaaatcattgacaacaacatagttcattctcaaaatcattcacaacaataatacagatcaaattacacattaaggaaaaaagaaaaaaaagaaaaaaaatcccgataggcgcgccgacctccaccggctgccgccacaccggcctccgtgccggccgccgccgcacgaggccgccttcgccgctgcgcgaggccaccgccgccgccacccggcctcctgagaatgggaaggagaggggagggggcggatccggaggaggaagaggaagatggggtgagtgaggagatgaggaagagataaaggtgagggatgaggagatagaacttatgtcgtgcgcctcctcctcctcgatctcgcgcgctcgcctcgtcttctctgcgcatgccgatctttttttctcgattagtaatatcaaccgggactaaaaataattaatagaggggtctgacatcacctgccgtttttttttgaaccgggggtaaaaatgatctttagtcccggttggtgttaccaaccaggacaggactaaagattaaaaagtagctctaaccaattgaactttagtccctatttttattgcaaccgggactattgtggaatttgttcgaccgatcaaagatggtttctccagtagtgcatattcttggtcgtttatctaccctcattttatattctgttgaagaaggattgcaacaatgctacagtgatgtaccgtcatagaccctggttataaattccataattctaagtccttaatgtttttgaatctgagcaaggggcatgctgacaaagcgtgtggaatagttggatgaaaaatgattgaggaattaatagctcaagtacatttgaactacttatgaaaaaatgggtaatggcttttcattcgtattttaccgtaaatggttatcggtaattcattagacacactttgattttccgactaaaaataaaagttacagctagcttacctgctgcccatatatgatcttctcagtttccctttttctatttccttgtttctttatctaataataagcatgtttatatctattaatacgtactttagctagctaggggacatttccctttatagcagcgccaatttttcaaatacctcgctatatgcatatagcagtagcaatgttgttaatcacaatcttgtttatttaagttcaaggaaaaaaatgtttgaaatggattgattccccaacattttagtcagacataactcatctaagcttttatttgtggaaatgatttttcttttgcttatacctttaaaaatgcatgtttggcagttcaggcaaatacagccagccgaggagatagcaatattatttggaaaatttgacacttagtagaatcttcctaattaaccagcatgatctgtcaaaaatccttgttacaaacaagtttggaaatcatgtgttccaatgagataatagtttctttgatttgcttggttatatgcttgcataattgatctcggaccgctcaaaaaaattacttgcttggtttaggccggctgcagcgaaatggcctgccaaatcagtttgtcatctttgttcaaagctaaaccacaatgatcagtaatcacgtataattaatccaattaagtttgagacagatccctgcttgttagcatattgagctcaaacgaattttgatcacttcacttttcgtaaaccttgatcaattaaggaacactatttgatgacgagcgtagttgcatgtctccgtttcttggattcaaatgacaaatagaacacatgcaagtcccaggaaacctagagaagttggtggaggccctttgatcgagctttttctcaaactctggtcagtattggctttccaaatgccttccatttctctgtctcgtctcatgagtacatattcagaagttcttaacttcagaactttttcgcagcaacattttcttcatcggtcatcactttaaatatttgcttgctcctgatcatcagtttatttgcaaggccaatgtgaatgcatgcataggttggcttaggttgggccggaatgcgcaaaccagaaattgtagcaactcctgatcatcagtttatttgcaaggccaataaatgcatgcatgggttggcttaggttgaaccggaatgtgcaaaccacaagttgtaacaactactagagaactgatatttagtcctgatttacaacccccattttctaccagttgtagcaacagagctggtactaaaaatatatagcaagtgaaaaaatatgtgggatgtgggattcgaggtcaagatctctcacctcagccctcacacgtaaccatcacacctactacacacatctaacttgaacagagatactttccttttgaacttaccttgaaggcatctttaacaccggttgataacacacatcagtactaaaaatgaatctttaataccagttggtaacaccaacccagactttttgatcttctatctttagtctcggttggtaacatcaaccgatactaaatatgcatttttaatatcggttgataatactaaccggaactaaatatatttccaggggcttggactttaaatgcaacagaaacaggatgtagagacgatttgaaaattttagaaccggtactaaagcatctctagtattggtttttaatctaaccgagatatttatgattttaggtaccatgtcaaaagatcagttctctaatactgtgtggcataggttgggccggaatggtggtacgatgaacatgtggcccatattggacaggatatttgaggtacgatatgaagaatcttgggacctactgatattctgtgaggctttggccatacaaataaatgtcggcttgcatgggcgggattgggactgtagtggagcacatcaggccacttggtttgctcacaccggatgttcaatgttgcgaggttggtttggtcacctcaaatggcagagctacctctcgggcaggttgagcggccgcacgggggtttcaccattgttgtttgcactacggatatttattaacacctattaaaattagtcgatcatcaaaaaacactattactcgtcagggtttaacggtgccgccggctctatcactgtactcgcctcttatgcatgatcatgtcgcccgtgccaagaccgttgatcttcctcgttgacagcgtcaataatctctcgccggccaagtttttgaaatctcagattttttaaaggttaggtgtagtaatcccatattttgagggcattaatgttgaagacaaatgcaatatgcacatcaagtcatgtggataatcaatatagtcacctcctttaagagcaatagaccaaaacaaccattcaatttatagctatatcacaacacaataaattttatgataggtgatgctccatttacatcacaaaaaactaaaaaaacatgccacgttccaaaacctatgatgttgacatgacaaaaattctttcgtcacctatcatgtgtttttaatcatgttctgtgatgaaaacacttttttttccattatgaagctagtgacgatgtcatttagtttatgtctcttagttttctcattgtcgaacctaggaaacgtcacacattatcttgtgccatgtcaagagccatgctattgtcaagttgtttatgtgctaagcccaattataatcccggttaaattttggcctacccatctaaagagtagggatttacgcattattggcatgtgaaggtccataaaatgagcaacctgtttatgagctcgatataattgcaaacctagttagatataaatctagttaagatgtagcaatttacataatatgttcacccaacttgttaattcatttgaagtggtaaataacaagtggactaagggtgtgtttgaggagaaggagattggggagattgggaagatacgcaaaacgaagtgagccattagcgcatgattaattgaatattaactattttaaatttcaaaaatggattaatatgattttttaaagcaactttcctatagaagatttttttaaaaaatacaccgtttaatagtttgggaagcatgcgtgcagaaaacgaggtcctttctcaccctatatcacacaagctaacgcagcctaagtccatttcaaaatactacataggtctaaatattatacccagtaacaacccatatggccatatagcacagaggttattgcacaggtaatatccaacaaaacccagtggagatctaatacagtgtaaatacatatggacaaacccagtcacatatccaaataatagaataactgaccataaattaattataggtcactaaccaaacaagtacatgcaattgcatcacaggttcacagccctaaaatacattataggtttactgaccaaattgaccaagctactgcagaccagggtctgttacacataaatgtgttgcttcggcctgggctttgttacttgcaattaagacaaccatcaagctactgctgactggtatatataaagatatagtattatgttcaaaaaaaaattgaatctttcgaactaacaacactaataagtgattcatatatgataacataatcatatgagtgcctcgaaaagggattatctgacttagctattgtgcagttgagtcactgacatgtggattatagcaaagtgggattcatattcatatgactgtgactcaattgcatgtgtagttaagtcagagaatcctgtcaggcatttcccttaatcccggcagtgggcactgttctattttgttacatctcctttagtacaggttgctccgttggttggtgatcgttttgctgtcctaatctgctattcaaaccaaatactcgcttgttcaattgatactcatcgatcgaaagatgcagacactgctgcggggctctcagcatagcttggatggcctactcatttggctgtgttagagtaaaaccagagaagttttatgttggctacctcaacacagattcttgggtaggcttggttggcctaatcacagtgcactcctttgattcctggtgtttcccagtcctatatgtgtaggtctacatgccacatttcccatggtttccgttgctatggtctcaatgcaaaatcatgagtttccctcttcatgatgctcatgcatgttggcacggctatgttttatttataaccgtatgtgagcagatatgcagagtttaaccatatttgagttagatgtatcatctccacagaaagcaaagttggatgtgtgtcatctggatgaacctattagcagtggcattagttacaatttgttatatatatatgttcgtgcaaaaacatttttttcaactagcgtagctctgcaaattgtgaattaagcaacactaacatctgagctgttaatattgtacgacgtaacctagcggaaaaaaaaatcttagaacggaggaaatgaaaatagtacaaggctttttattttctttatacaacgaaattcatgtaacatgtttggcagtttgggagaatgcagccagaaaatatagactagacagcgacacagagatgaaattaactaaactgggaaattgcaaatttgaaaactaaacatggacgaaacaatgctgcagtagctcacatttctaccataactgaatttgcacatgtgatccttctgtgggacccgttgtctctcttcctcatggtagagtttgcagccatcatcgtgcatctttactttatttctgtccggtggcattttagccgactgatctggagagtagactagcactgatatatgtgcttccataacgctttactccccctagttgtgggacactttgatgcaggagactctatatcatccggtttaatttcaataagacgcaccattgatactttttgaaggttagacggttgcgcaagtagatttgccatcgtttgggtcatgatgcttcctaagcctatgtatacgtgtgcctacatcacacaattgcgaagtagtaaacctctcattggtatgtacaattttcatggacgagttgtaggttccgtaagtctgcttcggttatctctttatgctcatcttttatatccaaattaggagatagtacatatgtacaacggaaaaaaagtgttgtaccttttgtattaattaagtataaatatgtgggtccgcatatggttttcatctgctataaattttaaaattgagtcaataaagcatatgtgttaagataaatggtgcccatactagataagtcgcaacaggttacaataggcatctatgccatttcagatggatgaggacaggatcgcaacattatgttgcctatattaaattggcctaaacatattatgaaggacacgcagcacgtatacttggctcgccagatatcaggtttcgctaagtcggcttcctccatagcgtggttgttgactcacgcccatgtccctgttgtactctgtggcatctctttgggctccctcttccatgtcgagatcctctcctcggtgcgaccacccccgtctttgtgtgccaccatcgcgttcttcatctcgccaatagcacccgcccaatgggtatatgattattcttgacctcgatatggactaatgggtagctagctcaagaatgtgcacacttcatataggatgcgataacaatagttttgacaaaactaaatgaggacacgacgaagttacatgacagatgatattgcatggtacttttgtcataataatagtactgttttagaacagggtttggatggcggatcacttgtagattagatgatgagcaaataactactttgcctgctgtaatacagaatcctggaaacggctaatcaccccttcaaggaatggacccatgtagccgcgaagtacggaatcagctagcttaattatcacctgagattcaggcaattcaaacaagatatagatgtctttcctcgacagcagtgcagttcatagacatggcgaccttgtcggaacagaatcatcacgattccaaaggcaggatttttttcagaaataatgatattgtctggtacatgctgaatcgtatgagtctaactgcattcggcagcaggtgatagagaatatttctctcgttgtgtgtttgttgcaaaaaatttctatcagaaaattgctttaaaaatcatattaatctatttttaaaatttaaaataattaatactcaattaatcatgcactaaggctcatttcgtttgtctaggttcccaaccccttctcatcgttttccgctcacacgcttttcaaactgctaaatggtgcgttttttttaaaaagtttatatacgaaagttgcttaaaaaattcatattgatcaatttttttaaaaaaaattgctaaaacttaattaatcacacgctaaaggctgcttcgttttacgtgctgggaaccctcactcccaaacacaacttaataggccacctcgttttacgtatcttcccaatcgtatgtgcacacacccctacagtcttggcatacatcctgacagtgggcatcactctatttttatagatcttcgccacgctggttagttaggtttggtgattagatcctctgcttgctggactgggattttgggatttgactaccacacaaagggcccactagttgtgttatagtgaaaaaaatggaggctatatatcattaggtttcaataacactctgtggatgaaatggctcatcggtgattgctctgaatgccctttttggcccagatgaaaaaaaaaagaaaaaagaaagggacacccctttcgttctttcagctaccagcgaatgcgtagttgcttttgggctcatgttttcaacacgagtggtgttagaggtattctttggtcaggcttctgggcctttgtgcaacttttttttattgcgttaggtttttgttttctactagcccacgtatgcaaaaaaacaaagcaatggcccactaagtagtaactactccctccgtttcaaaatgtttgacaccgttgactttttagcatatgtttgaccgttcgtcttatttaaaaaaaaattgtgaaatatgtaaaactatatgtgtacatgaaagtatatttaacaatgaatcaaatgatatgaaaataataaataattacttaaattttttgaataaaacgaatggtcaaacacgtactaaaaagtcaacggtgtcaaacattttgaaacggagggagtaggttatatggggcctcatgtgtttaggcatgaataatactacctccatattttaatgtatgacgccgttgactttttatccaacgtttgaccattcgtcttatttaaaaaaatttatgcaattatcatttattttattgtgactagattcatcatcaaatgttatttaagcatgatatataaatattttcatatttgcacgaaaattttgaataaaacgaatagtcaaatgttaatcgaaaagtcaacggcgtcatacattaaaatacgaagcgagtatgtagctcggaccttggccttgttgcatttggtaattaattaagaccttcaatatactgctgtgagtatttaaaaatactattatgttcagtaacaaaactaaacgggaataccatgctgttacatgaataatagtactctttcataacatagtttggaaggcatatcagttgcagattagaggatggccgaataaccacttttgtctactgtgtgctactataatgtgataataggcgccatctcttcaaggaatgcactcatgtaggtcgaactcactggttagccaagacaaccacatactgcagaaacaacaatgtgtgccggttggaaaaccctcatgggtgccagatttcctaatctgcatctagcagacagccaatgcattgcaaaacaaaagtcggatcaatgcatttgcttgataatagccaatgcattgagtagctcctcatcccacatccgcatatcaccatccatccatcccacatccatctagagcaaaatcgaagaaattgaaccacaaatttttcgcacaaaaattcatcactccaatgaaaattcattacaggaaatatttgcatgcatcaaacataaagaacaagatgaagaaatcagaaaaaaaatagaagttagtccacatgccctggtaattcagccaccatcgtggagaaacctctttgcatgccgtgctgtgccaaagagggggtggcgccaaaaaaggaggcgccggaactggccacccccgagcggcggtgggaaggggccgaaaggaggggttgcactggtgggaagaggcggagaggaggtgcgacgctggtggggggtagcgccgtatccagccgctccatagcaccggtcggggggaatggcaccagatccggtagcccccaagcaccgggtgggaagggtggcactggatccggccaccaccgagcatcgttgcggaggggcggcaccagattcggctgccgaactcgacgttgcaggtgcgggagccatactcacatggctgtgttagagtgaaaccatacaagttttatgttggctacctcaacacatattcttgagtaggcttggtttgcctacctatagtgcacccctttggttcctggtgtttcccagtcctatatgtgtaggtctacatgccacatcctagcgaagcaccaaaccggtggcctccatttgctaaggcctcaatacaaaatcttgaatttgcctcttcgcgatgctcattttgacacggctctgttttatttgtaaccatccaagtggcagcaatgatgtagcatgccaattgtgttgtatatatggagtatctgtcatagcccatgtgagcagatacgcagagcttaaccatatttaagttagatgtatcatctctggctctctgcagaaagaaaaagttggatgtgtcatctggatgaacctattagaaatgactttagttataatctgttttatttatgttcgtgcaaaaacatttgttcaactagcgtagctctgcaacttgtgaattaataagcaacattaaatctgatcgagctattaatattgtacgacctaacctaacgggaaaaataatcttagatggtggaaatgaaaatatagtgcaatgctttttatttccttatacgacgaaatacatgtaacatgtttggccgtttggaaaaatgcaaccagaaaatatagacttgagacagcgacagagaagaaactaattaaacagggcaatcacaaatttgcaaaaaactaaacatggactaaacaacgctgcagtagttcacatttctaccataactgtacttccattccattatgcttactcccccaagttgtgcgacacttcgatgaagcgtaccgtatatcatccagtttaatttcaataacacgcaccgttgatactttttgaaggttagatggttacgtaagtggatttgccatccttcgcttcacgatgcttcctaagcctacgtatacatgtgcctacaccacacaattgtgaagtagtaaacctctcattggtatgtacactttttatggacgagctgtaggttcccttagtctagttcgattatctctttatgcttatcttttatatccaaaggagatagtacatatgtacaacagaaaaaaagtgttgcaccatttgttttaattaagtataaatatgtggatccgcatttggtttccatttgttataaattttaaaattaagtcaataaagataaacggtgcccatactagataggtcgcaataggttacaatgggcatctatgccatttcagatggatgagaacaggactacaatattatgtcgaatatattaaattggcctaaacatgttacgaagcacatgtagcctatatagttggctcgccagatgtcaggtttcgccaagtcggcttcatccatagcgtggcatctctttgggctccctctgccatgccgagattcactccatggtgtgaccaccttcccataattgtgtgccaccgtcgcgttcttcatatcgccaatggcacccgcccaacgggtatatgattattcccgacctcgagatggactaatgggtagctagctctagaatatgcacacttcacataggaatgtgataacaatagttttgacaaaactaaataaggacaccatgaagttacatgacaaatgatattgcatggtacttttgttattataatagtcctcttttagaacagggtttggctggaggatcacttgtcgattagatgatgagcgactaactactttgcctactgtaatacaggatcctagaaacagctaatcaccccttcaactccaatgaatgggcacatgtagccgaagtaaggaatcagctagcttatcagttatatatcacctcagattcaggcaattcaatcaagatatagggcctgttggcggagcatctcccagaatcagaagctcccccaattaaaagcttcaaacaagatggctttcctcgacagcagtgcaattcatagacgtgatggccttgtcgaaacagaaccatcacagttcgcaaagacaggatatttcagaaaaaaatgatattgtgtggtacatgctgaaatatactcttatctatcgcaccttttgatcctatgactctatgagtctaagtgaccagtcaaccaacccctacacagccttggcatgacagtgggcatcactctatatttttaagatcttcgccacgctggtagtcaggtttggtgattagaacatctgcttgctggactgggatttggctagcacaaaggtcccattagttgtgttgtagtgaaaaaaatggaggctatatatcattaggtttcaataacactctgtggatgaaattgctaatcggtgatagctccgaatgccctttttggcccgatgaaagaaaagaaagggacagcccttaatttgtttctttcacttaccgtgccgaatgcataattgcttttcgggctcaagtttttaatacgagtggtgttagaggtatttcttgatcaggcttctgggtctttttgcaattttttattgcgttagggttttttttcctactggcccacctatgcaaaaaacaaagcaatgacccactaagtagtaactaggctatatggggcctcatctgttttatttattttttttaattcacttgcaaaaaattatataccaaaactttacacatatgaagtttctatatacaaagttttcatgcatcgtgtttcgttgcatatagtttatgtgaaaattgctatgtgtaaagtttcaacctatcaatttctttttctaggccagaacattgttcagtgggaaaaaatatgtgaattaaaaaaggtctatgaagaaaagcaggttgtgtcaatcgtgggctcccaaataagaaggccaacaacgcatagcaggctattactccctccatttcaaaatgtttaacaccgttaactttttaatacgtgtttgaccattcgtcttatttaaaaaatttaagtaattatttattcttttcatatcatttgattcattgttaaatatacttttatgtacacatatagttttacatatttaacaattttttttgaataagacgaacggtcaaacatgtgctaaaaagtcaatggtgtcaaatattttgaaacggagggagtattttgaaaattactcccgcacgtgggttctctttgttcaaatgcaacagtgtgagcacacaatgtcacgcagaacaaaaataaaaattcaatgggacggacgacatctttatggtggagacgtcttatagaaaagaaacaacatgtggagagacctggacgtgattatgtgcggcgaggtctcaggatagcttgtgaactagacctaccctatgatggattcattctgaaggtttgacgatcagcaaactagctgtgacattctttacttcacgatgcttcctaatcctacgtatgtacctacactacacctatacggatggacaaaggtaccccaaattggtttgagtcagaaaaccggcatctattgtgggttcccaacctgttctgtgtgtagtgaaacctctcatttgtatgtaaattttccatggacgtgctgtaggttccccttgtcttgtcttcacctctctgctcttctttcatattcagagataatagacatacacgatgaaaaaaatactgtatttttatataaatgcaacatgtgggatcaaagtagtagggagaatccccataccagatagaccctcaagcttacatccgactcctagcccattttagatgtataggaaaagggctgcaacattatgcagcatgtattatgtattaaatggacctaaacatgatatgaaggacgtgcaacatatagtagtcccgcaagatattaggtttataagtttttagtctaaatactcttatattagttttggctgtacacatcttttgggtatatacagaggctggattttaaccaatattcctattaaaaaataatatgtttgatcaagttgccttcgtccataactccatgtaccgtcgcctccctctaagcccggtcgccaaccggcttggctctccctatgctgctgtgatcctcccctcgccgcgaccaccaccctgccaacatgtgccagtaccgcactcttcaacgcgccgatgacacacgccatgccgggcatgcacatgatagataacattgactgtgttctttcctagacgaattttacgaaaataagatagcacacaccaatcaatggcgagaaggaagattattgacgatgttcctaggcagtgcaacgagtaggggtgggcattcggactagaccgaagtttcggtccggttagttcggttttttaaaaattcggtctttggaaacaggaaaccgaagttgttaagcaaaaattactaaccgctacttcggttaaccgaaaatttggttcggtcttcggtctaaaccgaggtgctcgaaccagaacgtgcgtcctcttcaatcttctcgtcttcttgctcctgaaaacctccatggctccacctcagtcacatgggacggatatccactagcatggattgcatggtgacaagtgctggcgggacggaaggcgacgacgcggcagaaatcagccgcgcgacgcagacggcacgcgatggcacagcggccggcatgcggctgtgcagcaggatcagcaagccagcagcctgtggccttgttatggcttccacgtgaccacacgattgcatgcgacactgcggcgacgccggcgagtagcagcatgcggcagtactgcagaagacagcggcgcggaaggaaggagacatgcgcgtgggctaactagggttaggagtgcttcggtcaatcgaatggtggggtcatagggattgggtcattgacgtggatttgggcctcaccttgttgttgggctgttttggtccatgggatggtcacgttgtctgtttagtgattggtattgatttggtttcttcggtcctcggtttcttcggtcctcggtttcttcgggtagtattgcacgatgaccgaatctttcgaagtttgttcggtctttcagatgtcacacccgaacaaatgaccgatgcccgagagttcggtcttttcgggtttggtttcggttttttcgggtccggtcttcggttatcggttttaatgcccacccctagcaacgagcgtgcaccagatggaaggcacctcctctgccaatggggatactcgtacaggaatagtagatgggggtaggggaacctacaggggtgaattacctaaagattgttgaactggaccaggccactggccgtctcccaatctatctccaccgcacggctgcaatcatactgattctgactggtttattatttgcaaacaacacataatacctatctatacgtcagaatatcagcattcggtataaaaaaagtatgataaatacttttattctgtttataccaagatacataaaatttgagcaaatgtgcaggtagtaattacaattagagccattttacggtccttgaggaggtactatgagataccactttttctattgtaaattgatacctcgtggtacctaggtactacgaggtaccatgaggtaccaaattttacactaaatttttggtacctcatggtacctcctcaaggaccgtagaattgctcttacaattagctgtgcagtcagaagcacagcgttgcccgctgttctgcccatttgtgttggcactaatttggcattgttgttttagatgcacacgctacatgtcatgctaatcgccttcaatagcacacgcctctgctttgaagatcataagcaaaagcggtataacgttctgtcctattagagatcttcacgtacgggcagtaacaggatatcgaagatcaccttgtaccatctctgactcattgtgggtgggaggagtatcagtattcccaatgccttccacttctatttcttatcgcgcatacttgaaaataaaaacctcttgaactttgatggtgttgtccattgcttgcaaaaatatccgtcctcttctatgcatgggcatccactacttgacatatatagcagtttcaccattaataaccaaattattagccaagactaaatgtacacacattaaaaaaaataacatcactttagatgtagtaattcctgcacatggtatacatatagcaattacttcctctgtttcatattataagactttctagcattgcccacattcatatatatgttaatgaatctagatatatatgtgtgcctagattcattagcatctatataaatatgggcaatgctaaaaagacttataacctgaaacggaggtagtagtaaagagtaccgtttgtacttgccgaatggaaaaaccaaaaaaagatatgaagcccaaaaatcctttgaatgaaacaaagccggcaagtatgtgcacaagaaaagtctgaagcccaaattaaaatctagaatttatatttaagatgacaactaatgatatatagttttctaataatagttaacatcaccacaaaaattctatctcatccaatctccagaatgttttggccgaccctgtcatacattttcccatcgtcggcatcatgacctaacctcttctgcccctagagcaaaagactagtccccctcccgtcgcgctgtcctttcatgtcccatttgggcgcctacttcgcagtgctattggttttcccaataacttccaaccctatttgcatttgtctatcattctatgtgatatgccttaaacttcactagatggcctgactggtgccatgcatcagcagcaacaacactacaacagtaccacatcctcgagaagcatcagcgcaacactagctagcttcatatatgatgtgcccaatttatgagttgggcattgcaaaaggtgaaaagaaaatatatcactccccacatcactgtaactcttgcacatggtgcaatttaatcaagtgtacaattgtacttggtgaaagtaaaacaaacagagaagctgtaccgaaatgagtgaatgcaattctggtttgaaatttcagtaatttcggaacaccccaaccaccccctccaccaaagcaagtcattatctcagtcgaaattttcgggttttcataaatttttgttgaattatttagtcatattcagttaaattgggttaaaaattaaaaaaaaaggtccaaaagtaccaaaaaatcatgaaattgcaggaattttggttctactgaaatggcctaaattttcggtgaaatcgaaagtgaaaaccctgggcaaaatggtgaataggaacatgactttaatttgagtcaaaatagccccacaacggctagcttattaaggctgaagtggacatgaaaaaccagaagtttaaatgatatgctgttgtagctaacacaattttattatatcacaatactatgacacagatttcgtaattgttttcgtcatcgcttcttagtctataaggcttggacaaatttagtactagcatcaatcctcaaagagcacgatggttccaacttgcctaagctaacttaagctgcttccaagatcaccaaagccctgatggtggaactctcctggattgtttcacaactagtatgggttttcctggatgccttccatccctattatgtctatttttcaggtaaaagacaggagcatgaggtctgttcagtgctatacttatagcaactatttatacaacaccattctcatagtcgggcaacactttcaatgttaaagtttatgtcaaatatgtgtatgtatatagtcggttatagtttaggacttgaagttgaaacatgtatatgatagagttaggtttggactttatcctatgctctctcttaaatagagaggcacatctattgtaaactcgtgatgacttggtataggcgcgagggagcgtctgccggcaatgactggctgagggtcgttgtaaatctaatacattgtaattatgatggaccaaggaggagtatccgtaatcagtgttatgtatatataggctacggctgaaatctgttattaagtatcgtgtctcggtatcatcaccgtgtttggatcttctatgacgtttatttcgcgtttggtttcaatggtgatttcggacgagttttacaacatccaatttactaacggaccatttgattgcataccgaaaagaaaattgcacaatgaaaagaaaaaaaatattgatatcagaatgacgagtacaatttcagggattttagaaaatttcggtacaaaattatttaacaatttttttaagataatgaaaatctaataaagttatgactgaatttgaataaattttgaccaaattaaaattttgaaaaatacaaaaattgtggataagatagtttatggctgggggttcaaaattaccaaaattgaccaaaatttcatccctactggtaagacgactagatgagatagcctcgatcggaatggaatgattcttgtgctcctttgtcatccttgaccaacaattttgaccatctatcctcaagctagaattcataccaatgcttatttgacttagtttttcttcggcagcagctaaaaaggttgtacaagcattttcttgtcaaagaaatcaccatgtttattctttgcttcaacctctgtgaattgtgttgatcatccaatctcaccatgctactgtatggaaaaaaatttccttgtctaaggagcaccaaacttggttgccggtgcgttcaatccatatcggtcatcaactgctaactgaaggcgttgtacatgttcttagtgactgacgccctcgtggttccctcaaaccacctctaacagatgttaccttgcaggagtattagtttacccaatgctttccacttctatttctataatatatatgactctaaaaaatattgaatctctactggtgaactgcggttgtaactataatagtacaacactaccttcttccccgtgcaactatcacttcatatatcatatatgttcatgatatctgatctattgtgacgacttcttccttgtgcagcctaccagtaagacagtaacacagcttttcaagaaacgactcccacactgagggatttgctctgcaatagttctcacctgcatgttttgactagtactacagttcttccatgtctttcactcctataaaattcacacacatataaatatattggcatacaaagtttttgcgcattcaaaaaaaaaaaacttcattctctgccatgagtgagttcacacatttatatgctcaaccttgatgttcatttattagaatggccagtgtactgaacagtacttcctctatatttgctgaaaagaaaaaaaaacagtagaaaataatttggccaaaaatgtgaatctgagtgtaagaaaaacaaatcgagttaaaaagcactactggcattcattaggcaaacatacccataagtattaattttattcgagaaatcaacgtctggaagtttagtactcgagcttgatcaatggtgcctagaagtgtttagtgcaaaaaaaaatgtaaatagaatcaaagagaaaacatgtgtgccattccattgtaggctcagaatttcaactgaaatcacgtgtgtggacgtgctacaggatcgaggtggaagggttcgaaatttcataaacccctcacaaaactagttcacctgaaaattttcactttttaagccaacaaattttattcaaattcagtcaaaatgtgtgtgtgtttttttttgttctaggtctttgtatttgcattgccaaaatttgttagttttataaataaaacatattactttcatcattgtatatacatttataattccaaaacatccactcgcagaaccacatcgaaataaaaatttggtaaggtgtcaacgatgttattggccaagcaaaaatttagctttaccaacaaggcaacatatcaggtggacgatttgagatggagtttgtgcatgtgtgcacgatttgctttgtattcacctgatgtgttgcctaccaacaaatggtaagttttattttagcaacgaattgaacatgtccagaatgttgttattttaaattgtttatacctgaacatagatggctatttatttttttttaaaaaaaaagaaggctcgattgttgcatttcaattcagcatgggcataattagatggaactgcacgagaagaagtagaacaaaaagatgaagctatggcttagcagtatactagtctgaagggaactcttgtagctagctcagaccaatgcagccagtaaacttaacaaaatggcagatcgaactcgttaaaatgtcatcctgtactttgtgcactattattgttttccctgatgtcttccactcctattttatctatgcgtcgcgcgccagcaatctccacgaggcacttcacacatacgctcaaccttaattaaataaagttctatcagcttggcatttgcaaaagaaatatttgtatcactctatatcgcaatagctacagtttttgcacatgagatcggtgtactgaacttataatcatgcacaagctagattctatttacattagtatcccaaggtacctataatcatgcacaagctagattgcccgcaccattaattaatgttgtgtgatacatgtcatctttttatttgcacaggattgtgtgagattgcatgtttttttatagtaaaagaaatactaaatgcatacgctcctaccaatactgtactgccaaaacggagtaaatacattacgaagttataaaccaattgacagtaatatttttactaagaacgaaaagtaactatattactggaaagaatgatgagtaattattttattggagcaatatttatatttgcatagaccctaacaaagtggaaacaaccaccgttagtaacttttttgttcggctaccactgatagtaattcttttactggatatagatggtgggagttagtaaaaggaagtaatttcggcagtagggagggaggcgatccagcttggttgcgctatggaaaaggtggtgaaaagaacaagaaaacacgtaaaaggtggggataggaccacagatctcttctttctataaagttaatgccactaaacacctaaagctaaacatataaacataatatttattagcactcgtaaaacctacatgtaaacatgccacatcaaaactcaacatgcaaacatatactaattatatcacaatttatttcattcaaaaactaaacatctatatgctaaatcatcattctcaaatcattttcataatatttcaatccaaatcatttcatcatttctcaactatctaacgtatatctcacagcaaattgcggggcatcatcttagtgatttaaaaaagggaaaactagaggagaaggagcttggaggcacgccattggattcctagcacgctacatgtcgtgtagcataaccgtatatataatgaaattagcgaaaagtgataaggtacaaatgaggaagtgtacaagttttttttcctgtattgagatgtcactatcaagtactaatacaattcgaatgactcgctgccctgttctaaactactctgttaactttggaaaaagaaaacatcgcttccattgcttctgaataagctacaaattttgcatgactttttgttgtttcactagtttcattctgatctcctctgcctcttgtcccatatcaccgctggttctttttagcccagccatactcattcagctcattgttcttgagggtacaagtcaccatcttctgctgtggcattctctaccctatgcacctatcaccaaagcagcttcctaaaagtgttctgtctctcttggcgatcatctccctgcagcctcggatgcatgagaaacactacagtacattgaccatcattaccaacacaaacaacacggcttggctgggtggaggagccaaaactattcgtgcactccaatatggtcaagggcaggagtagtacaagtaattatcctgacgcctcccacttccatctctacactgtctgtgcccagaaaatttaattttgaatttcatttgaaactgtgtcaaagtgcaacacattactgctggtaacaacattacaacatcatccccctttgccaggcacatatctccttacgtatgtagtgtcctcaccctcgaggccttgatgtgaacatatgttagccagacaatgaatatgcatcgtaacaaaaatatataaatatcaatgttgctgtgacgtttaattgcacatggtgtacgttgtgaagagtaccattatagtacttgattaaaatatataaatactagtaaaaaaataaaatatacttcgtttagtcatgtcagaaaatgttaagactaggcgttcaatgtttcttcggaattaagtcagtgcaatatgaaaataaaatattacttttgagtccaaattaatatatagatctaccaaagctcgttaatcaagaggagatgatgcataattaaagcctgaagtggagatgaaatatatgaagataagtgtaagaaaaaacaacgaataagacagtaggcgagattgttacgattttgcagttgtggaattggcattcgtaccgctgagttgagcttagtagcatgccaaattgcttggctgttgcattggtaagaccatcgaaccatatataaatcttaagcatatatatgttaacaaattataattgcacttcttaaggagcagaatggattagctgattgtgtaggatcgaacaggaagaactaagccaaccagagaggtgaatggttgtaataccccaaaatcaaaacttttaccagaattaaaagttatcctcgaatcgatgtcaatcagtctaaccgaagttgatccgctggtctgaccaagccgatgtcgtcggtctgacaggagtagaccacccggtctaacctccctaaagaagtcgtagtcgcctgatctgccatcggtctaactgccgctctcccgctgatctgaccggtgcgttgccgccggtctgaacgctggtatcccgttggttgaactgccgaactcgagcaaacacaaatcgaagatctctcaaagtagatgacaactttattacttctctctgggtttataaagtacaacaacaacactcctcacgaaaatctcgactaaactcgaaatcctaactattctctcaactcaatgctctctaaagcggtaccgggaggccacaccttccctctctctatatacctgaggtaggcagcctaaagccacgaactaaacttgtacaagaagtcctaataccctaggaaaccttcccgtccaagaaactaactttacaaactccaattgtaccaaatttggaattcttccaaattcaactccgcatcctatacgcacataatacctccatcatatgccatatggaatcttcaccaaccacatgcattgatctttagtgtaagtatcccgcataatatgtaaccatccggacgtcatcttatcctcaagttgactctcgatccatcactggcaacactctcccgaggcaacaagacaacctacacatgcatcaaccaataaaacatattccgagcacaagctatctccaacttgactccttcattagcaaacaacagtattacatacacaaatttcactgttaacaaagtcataaacacaaattatcaacagatatccaatgaaacaacctgataccgaaactgatatagagtcggccggtcagaccgtgggctgaccagtctgaccactcaaagcacgtcggtctgaccggcaactactgcccggtctgaccggacccgacaatcagcagtccttgttcatcacctgtaaatccaatcatctccaaaaccacttcgccaataatctccaaatatcaaaaccaataatctcatttgccaattgttcatcacagaataaaaatcaaacacactttgattttacagattggtggtaacttttcctagctaggacattcctgcatggcttaacatccaaaggctctgttcggagttcattgttaatggagctgagtaattgtattggatgttgcactacaagcaacacgattttagatgtcccaagtactattcttatgtttcaggactaactgacagttgaggaaagccccagcatttatctgcaacccacaaaataggagctaaaatataaacatatggcactgtcgtcgagattccagggaattcgcattagatcatgtcctgattagttccaatcctataaaacttatacataccaatcattaaagatacattcatggagttccttactctcaatcagtactcaactttttaattttgtcgaatgtttcatgctaaacactattggaatactatggctgcagttgcgcagtttcacacactgaatggcaaggggaaaacaatatgcaaattgtctcaactgcatcttcagagctgagtatatatgagtagctagctcctctaaaggtacatagtgaactaagatgcttattatgtgcattgtttggggagtgtctccggatcgagggaagccagcctccgaagggctgcggcactccggagaaccatcctcccaaggagatgactgtgggtcgtgtaggatcgaatagcaagaactaagccaaccagaggggggtgaatgattggtatacccaaaaacttttagcggaaataaaagttaccctcgaattcgacagatcgcggtatgaccgaagtgaatgcgccggtctgaccgcttgatgaacgtcggtctgaccaagatctaactccggtcgaaccaccgagatcgcctgccgcagactcctgtcgacgccggtctgaccgccgtattcccgccggtttgaccgccgcgatgccgcctgtctaaccgccggtatgtagccggttggaccgccgaaacccggtgaaacacaaatcgaagaactcttaaagtagatgacgactttattacttctctctgtgtttacaaagtgcaccaacagcactccttacaaaaatttcgactaaactcgaaaccctaactcaaaactcaactcaattgctctcaaaagcaataccaggaagcctcacgctccccctctatttatacccgaggtaggcagcctaaagccacgaaccaaactcatactaggagtcctaaacaccttaggaaaccctctagtacaagaaagaaactttacataaccaatcgtaccaaatttggactccttccaaattcgactccgcatcccatacgcacacaataactccatcgtataccatatggaatctccatcaaccacgtgcatcaactctagcctaagtatcctgcatgatctttgaccaccacggtcgtcgtcttaccaccaagccgactcccggtccatcaccgcaaatactctcccgaggcatcaagtcacctacacatgaaataaacaaagaaaccatattccgagaccaagcaatctccaacttgactcattagtagcaaacaacagtattacatacgtatagtatccatctagaagtcataatcatgtaataattacggatatccaaataaacaacccgaaaccgaaactgacatagcatcggccggtcagaccgcgggctgcgccggtctgaccgcgcaatacacgccggtttgaccggctaccagagcccggtctgactggtcacataaaatgatagatcctgcgattcacctgtaaatccaatcctctccaaaaccacttcgtgagtaaattcgaaataataaaaccaataatctccaatgcccaattgttcatcacagaataataatcaaaacacctttgattttacaggtcaaggccatgtcggtccctggccgaggtggccgctccgaaggcctccagggatcctagagaatcggatcccgcggacggcgagtgcgatagagcctggaagggcttcggagatcggcggaagggctccgggattgctccaggaggccatagcacccatgggccctagagccccagaaggcatctcgagctccagagcgtgaagggcttttggagcccggcaagggagctccggaggctgccagaggcttcggagcttgggaggcccccagagttcaagaggccgcccggagcgattcaagcacttgatgtgcttccactggctaaagtcaggaaccaggcgcgagtgggctggaataaatgcgcactacgcgccccaactgcctctgacaccattaatgacgaccaagcggagcacgctattacccggggcatgcctttatccgtgtaataacaggttccctcgggaaccagcgctgcctcccctatgggcgcttcctccctctcacctgtaagattaccaataggtccgagggtggcccactggccagccactcagattcctcataggactaggggcattaaagccatttccccttgtatactcctgtataaatatgtaaaaaccgctctcatttggggcagatcgaatacagaaggaatattgatacacttgttgagcttttgcaacaacatgcagtacagtatgtgacttcctcaactatgtgagttaaatgatcagttggatttctcacaatcagaagaagcaatcacattgtaacaaaatacttaaagcagaaattgagttctgctcgaattctactggaaccagagcaattttgtaattgtaaaggtaaaaacatacaaaagtttaatgtctccaaattctggaaaatgctatcccacaactgaaaattgtgaactgtactgcaaaatatatattaataataattcaagtatagctagactctcttaaattaatatttgatcataatctgactaacattagtagctcatgatatctggtattttattttacaattactgctgtctgaaagatttagcaaaaaaagggatgagatatcaatgaaagtatgttctgaattaattattttgttagcaaggtcagcaaacagagaaagtaccgggttttctttgttgctgtcgtattctcatactaatgcaattgccaagactcactaccctgttttcaactgctctgttcacttgataaaaaaatacatcgtttaatttcgacttcctttgcttttgaaaattccagcgaattatgcatgcatgacttcttttattattatttcacttgtttcatttcaatcttctatgccttgtcacacaatgagctagatcacgtgtttccgcagtgtagaaacaaagtaccatgttttgtagtagttggtaattaattcctaaacgaggagcacaataatggtttagcgagattagctaccaagaaaaagagtagggcttggatgggaggaggagccaaaaatatcataattctaagctataatgtaagattgcatcctactacaccaatgagaaaaatccgttccatcgataacatgaggcttagttgaaaacttattagaagtagccatggcaaaaactcaagattgataaagatcgaaaagagcaaacgtggctctcataccacttgtagggtcgaatcacaagaactaagccaaccagaggggggtgaatggttggtatacccaaaaaccaaaaacttttagcggaaataaaagttaccctcgaaatcgatggatcacggtctgaccgaagtagtagcgccggtctgaccgcctggatatcgtcggtctaaccgaggttgtaacaccggtcgaaccgccgagatcaatcgccagctcctgtcgccgccgccggtctgaccaccaataggtctgaccgccggtgagatgccggttagaccgccaaaacccggtgaaacacaaatcgaagaactcttaaagtagatgacaaatttattgcttctctctgtgtttaaaaagtgcaccgacagcactccttataaaaatctcgactaaactcgaaaccctagctaaactagcaactcaattgctctcaaaagcgatacaaaagcgataccgggaagactcacgctccccctctatttatacatgaggtaggcagcctaaagccacaaaccaaactcatactaagagtcctatacaccttagactccttccaatcatactaaatttggactccttccaaatttgactccgcatcccatacgcacacaatacctccatcgtatgccatatggaatctccatcaaccacatgcatcaactctagccttagtatcccacatgatatctgactaccacggacgtcgtcttaccaccaagccgacttccggtccatcaccgtaaatactctcccgaggcatcgagtcacctatggatgaaacaaacaaagaaactatattccgagaccaagctatcaccaacttgactcattagtagcaaacaacagtattacatacgtataatatccatctagaagccataaccatgaaacaatcacggatatccaaagaaacaacccgaaaccgaagccgacacagcgtcggccggtcagactgcgggccggccggtctgaccgctcgatcaccgccggtctgaccggcatacacaacccggtcggaccggtcacataaaataacagtaaatccgatcatctccaaaaccactttgacgataatctccaaatatcaaaaccaataatcacagatgctaattgtttatcacggaataagaatcaaaacacacattgatcttacagatcctacaagtaatttgtattggatgttgcactacaagcaacacgattttagatgctccaagtacagttcttatgtttcaggactaactgacaattgaggaaagcccaagcatttatctgcaacccacaaataggagctaaaatacaaacacacatggcactgtcgtcgagattccagggaattcatattagatcatgtcatagtctcaatcctgattgcttccaatcctttaaaacttatacataccaagcattaaagatacattcatggagttccttactctcaaaaagtactcaactttttaattttgtcgaaagttcatgctaaacactattggaatactatggctacagttgcgcagtttcacccactgattggcaaggggaaaacaatatgcaaattgtctcaactgcattttctgagctgagtatgtatgagtagctagctcctctaaaggatagtgaactaagatgcttatgtgcagtacagtatgtgacttcctcaactatgtgagttaaatgatcagttggatttctcacaatcagaagaagcaatcacattgtgacaaaatacttcaagcagaaattgagttctgctcgaattgtactggaaccagagcagttttgtaataaaggtaaaaacaaacaaaagtttaatttctccaaattctggaaaatgctatctcacaactgaaaattgtgaactgtactgcaaaatatatattaataataattcaagtatagctagactctcttaaattaatatttgatcataatctgactaacattagtagctcatgatatctggtattttattttacaattattgctgtgtgaaagatttagcaaaaaagggatgagatatcaatgaaagtatgttctgaattaattattttgttagcaaggtcagcaaacagagaaagtaccgggttttctttgttgctgtcgtattctcatactaatgcaattgccaagactcactaccctgttttcaactgctctgttcacttgataaaaaaaatacatcgtttaatttcgacttccattgctttcgaaaattccagcgaattatgcatgcatgacttttttttattattatttcacttgtttcatttcaatcttctatgccttgtcgcaaaatgagctataatggtttagcgagattagctaccaagaaaaagagtaggccttggatgggaggagccaaaaattcatgcactccaacatgtccaagaaacaggagtagcagtaatttccctgatgccttccacttccaattgtaagctgtctgtgcaaagtacatttaaacatgaatttcgaaactgttgagtggtatgcgttttccaaggttgggtctcctcatgtatgtgggtacagaagtagcagcaattttcaccccggaggcaatatatatgtaatatagacaaacagagcgtgcatcgcaacaagaattattcatatcacttgatatatatcactgtagttgtggtgtttaattggagaaaaacagagcgagatgcgaaggctaggcattcgatggttcttcaagagtcaatggaaggctttcaataggtagttggttctgttgattaattaagcacttgggctaccaatttaaaactacgggtgtgtttagtccacgctaaaattggaagtttggttgaaattgaaacgatgtgatggaaaagttggaagtttatgtgtgtagaaaagttttaatgtaatggaaaagttgaaagtttgaagaaaaagtttggaacaactctattgggactttgcatgtataaggatttaagaggacaactctattgggactttgcagaacctcttgcgttggaggacacaactcttaaataaggcgctagattattttctctctatgtacattgcaataacattgtcgcactactgtcttattaaatgggaaacacttcacatatgctcagtctccacatcccattagttagctaggcactgcgaaagaaaatatacaacttgatatcactgcagctgcgactttgaacacggtatatcaatacccaatttacttggtaaaacaaacaaagagagaagagctgtgccataaaaaaaaaatcaaacattacttttgagtcctatatatagatagagctgccaggaattgttttgtgaaaggttagataagtaatttgctccaaaactcaattcaaaaggataagagcaaatcattatgttttttggttaccaccattgcaatgcgcgattatcattcacttgtttaattggctaaatggcaaagcgaccaggacagggtttgtaattttggttgccaccgaaatttcggtggttgccgaaaatttaaaaaattcatgattgccgggttattttggactgaaattatttgaatttttaatatattttgactgaatttgaataaattttaaccaaatttacaaatatttgataaaaactaaaaattttggggagatttgcgcttgctggtggggccgaaatttcagaaaattccaaaccatggatcaggatgatgcattattcttcatcttcagtaatctgagttttttttttgcaagggcagtaatcggattaatcgatttgtgaggattcttatgtacacccacgacttaccaactccaacataagttaatttccggatcctaataatctgcatcacccaattacttgtatttcgtactgatgataataattctcacatcaaatgaacatatagtccatacatgaaagagaaaagaatagataaaattatataccaataaggaccaagaagataggaattaggacaaacaacaccgaatagttgcagcaaggctaacgcgacgcaatgatgcctgatgcaaattaaggcccctttgatttaaaggaaatttataggaattagctctttgaatcaaaggaatgaaccctataaaatcctatgaaatctatctatctattatataataaaagtccattaaacttcctacaaatgctcccaaactgccacgtgtaccctacaaacgctcccaagctgccacttggcactatgataaattatagaaattcttaaaattctaaaaaaaagacaatacccaaccgttgattttcatttaatctggtcgacccgatatttttaaccattagatcaatctataaagaaaaaataatcctccaatccctatcagtattgtacctacgtggagtcgtagtaggtatacgtacgtacttggacccgtatgcctcctctcttcctcctctgttccctctcttatttcttattcctattcttatgcaatattaggtagaaagcacaataggtgagcacaattgacaattaaacaaatataacatctaaactgcttatatttaatctttcaaaaagaatgtcatgttttggttacaatttctgacttttacgtgccatttaaataattccaaaatattatgaaaaaataacgatatagattttatcatcaaacataattacacaataattaaattagaaaataaattactccccggtaagtcaaaataatataattatacgtgtcttatattatattatatactataaacgcttataaattgccacatgactctttaataaattagaaaaattcctacaaattctaagaaaaaaagaaaaatatctttagcattgattttcatttaaaatgttagaccaattaattttaaccattagatctatataaaataatataatggtgtggaccatgcgtacatcgatctaatgtaaaggatatgagaatggttatagcttccttcgtacacttatggaagaagaaaacattatatagtagtctaaaaaatcgagattcatttttctttctgaaacttaaaaaaatactaaaagtccattatacttccaataaacattatcaagccaccacatgcatattctacaaatgctcctaaatcatcactttacgctataataaattaggtaaaatcctataaattctaaaaaaaagaaaaatatcttaccaacggttttcattcaaatcggtggacctattaattttaaccattagatatatataaattaatggtgtgggccatatacattgatctaacgcaaaggaaaagagatcggttatagcttcgttcgtacatatagagtacaagacattggatagtagtctaaaaaattgagattcatttttttttcttgaactgaaaaaaattaagactttgatcggtcacaattttgcccccatcgacattactcaggacactgtcagcgtgagggggcaaattagcttgggactacatgtatgtatcatgcatgaccgagctaaaagctttatctaccaattattttagaaacttaaaagttaaaaactatttagtatttaaactacaatggttgtataaatggctaattctttcaaacaacaaagataaaataggataagcattgtaggcttcatatttaggattatgcaatataaacataatccataaaggcctaatgcatgttagctaaataaaatcacaaagtgattgtttgcattatgtaaaatcctaatgtttaatcataaattttagagttaaaaatatttaaatcatgacaacaatcataccacactacataataatcacacatgcggagttatttttcgcaatgaaaattatgttcctgctaagctacatggagtctcacacactctacacgaaacaataaactatctcctacgctgcaaaatcaatttagactcgagaaggctttttatttgaaatatatattgtgtcacatggaccgaaggcatccattaataaacaatgagacaatcaagtatacagagaaaaaaaagcaagtgcatctcagcaaaggatacagtaagttgtaaaatatgtagccaatttgctacataccaaaaggaacaccaaaagtaactatcaagttcgttgattgttggcaaacaatgatatcggcacaaagatttatatataccattattttcataaccaatcaatgtgaaatgacaactttaagccacttttctaacgtttttaattgaatatacaattatgttcatcacattctaaacaaatgatttccgcgagaatattgttctcatgttcctcaaatgtgcagcctcctatgtgatgagccttttgcctcggactcatgggctacctttagaaataacttttgtaatgtgtttacatataactactttagtggagtacttaacccagaaggtagagttgaagcttttacacagtgaactattttagtggagcacttaacccgcaaaagtagtattgaatcaatctattccattggttacagaggaaaaaaaagttcattttacatcctaacgatattttattcttttaaactttttttcttctctacatacaagtcatatttcactttgacacatcaggagatgaaggtcaatgataattaaacgaatacactaaattccacgacctg

SEQ ID NO: 4102 - DNA, 3439 bp, Oryza sativa
ttgtgggtctttttactaacgttcattttatttaaaattattttataataattatttttatttttattagatgataaaatataaatagtattttatatatgacttgttttttatttttaattatgttttaaaatgaaatggacgattaaacgtttaacataaacttggaatgagacggatgagtaatatactgcgagtttaggcgcacgggcggcgggggtgggcatccgatgcggtggggttgggggtggggggcaagcaaagactggggcaagtacagtggtgtggcgccgctccggaaattcgcttcgcttcgcggcgcggcggctgaggatcagcgtcagccggatgggaatcccaggcgtggaagcgcgatttttaatttgggcggcccccgaggcggtatccgatgatctccttgtcggctacccgcgtcaaacacactggtatagtgcggctaggtacccaacttttctgctgttttacacaacggtccttcctctatttgactatgcctacccgtatggtagcaacttatttcctcctattgtagtaattcttaacattttcaataatgatactgtctctaaaatatatctttaacaaattttctattattacagtactttgtaaaataaatttatatgttgttctagtacctttcaactatatatttttcaaagttatttatagtaaagttataaaattttaacctcaactttgggtgtgtttagttcacgtaaaaattggaagtttgattgaaattgaaacgatgtgacggaaaaattaaaagtttatgtgtgtaggaaaattttgatggtcagaaaagttgaaagtttgaagaaaaagttaggaactaaaccaggcctttgtataaaacatcaagaattatagatttggagggagtactccatatccgttttatattgtgaaaaattttgggtttcatgctgtgaaacacttcaaaatgttgatgcatttcttttattgaacttggacaagaccaaaataacttatataatatactagaatagagtgaaaactgtttctacgcaaacattattaggtaccaagatgtgtacaatgtggaaagctatggtatgtattaataattcatccatttcatatgtaattatcgcttttccgtgattatctttcatgcaactttttttgttattatgtggaaagttagctttaagggcctgttcactttgatgtcattttcaaccttaccaaatttcggtaaagttaccaaaaagagtggctacatttagtttgttgttaaattttggtaactatgtaagaaatcctgcccaaattttggtaaggtattttttttattaaagtgaacaggccttaaaagaaaaaaggcttgcttatatcttggaacaaatttatactccagcaaagtcaaatacacatggatcgacctagctagccttttcatactgtgcactcaaaaccatacctttagtgtggagataacatagtatcccactacaattccactgctataaaacccctagtttattgaaataacaaaacaaagttctacaattagcaagccttaactagggaaggcaatgaaaacaaaaatcaaactacattagactaggtcaaaatgcacccacaaccacaacggttatgtgctcgagccagtatctcatactaccaatactacaccaacaccaacactacatactactactagcggcactgtacatacaaggggaataatacaagctaaaataaagctactccactcctagagaaggaggacctaaacgcaataaccaagtcaattaaacacggttggtacaaaaaggacacccgcccaatacaaaaacgccactacaaatgcaaccgcaaatgcacggccctttcccccaaaacccccactgcattcccccccaaacccacaaaccccgccgctggatcaacaccacctcaagctcgaagtgagccactgtcccaagcaaccttccttcttctccccacctcgttttctccaaatcgccattcacaacccatacacactctgtgcgcgtgtgtgtctctatgatgtcggcgtcgccggagttctacaagccggcgccggtgttctcgccgtgcagctcgccgctgcggctgctgcagcagcagcacggggaggatcatcaggaggagtacggctacggcagcagcggcggctgctgcaggacgccgacgggaggggagagcaacctgaaggcgccagggacgtgcccgccggcgccgaggaagccgcgcgcgcccgccgcgccgtgccggaagcggctgttcgaggtcgaggtgttaagcctccgcctcgaggagctcgagcgcctcttctggcgccctccgccgccgccgccgacgacgcagccgcagccgcagccgcagcagccgccgcagaagcgccggagggtggccaagctcggcagctagctagctcgccggagtagcacacgtgtgcgtggatggccataagtggtgttggttgggttagttactagagctaaagctagagtagttcggagttggtaggatttaggcgtactggcgtttttactgctgtacttgcactatatttctactgctcaaattatctccatggctagtatagctggttgtacactttgtactatacctgcctagctaaggttgctactactactactgtagcgtatcagtgcagtttatactagtatctgtgtatgtgatggcattgggggtgtgtactcctggtacgtattagcaatcaataggagcttagcttgaatttgcttccatgcatatatggcagttgcagtgcagcctgtgaagtaatgacaagttgtatgatccgtgtatacatccatcaatgtatcagtgaatcaatccttgcaacgaatacaatgagaagcagctcaatcctcatatgttctactattgcttccgtcctaaaatatagctacttcctattacatgttttctctactttgtgcaacagataggagtagttctcgaaagtatggagatactgatccatctgcgtagcaactggcaagaacgcaagatggatggattcagtttcagagtgagctgcacctcccaggcacagcacgcagctgggctgcaggaggtgcagggggagaggaatcattcaggaatgtgagacgagagcagaaggccaaagcatcgagtggtagtagcaagcagtaatgatgtgtgtcgctgctgtggctggctttgtagtagtagtagtaccgaaaatttttctgcaggcttggcacccggcaaggctgcagcaggggagcctgtgctggaggtacgagaaggaataattttggccaccggtgccagtaaatgtgaggacgtgtggtgttgggggtcttggttggggatccgagtccatctatcatcacaggagcatcgcaagcagcagctgtccatgtgttct

SEQ ID NO: 4103 - DNA, 1370 bp, Oryza sativa
ttgtacaaatggacaaacatattaaatatgtttaaaatactttcgataaaagatctagtcatacccttttccaatttacatgtggtatatggttacactttgacgtatcttaacttacgtagttttgactaagttatccatacgtttgatttattgtcacatttatgacaatattttcttttcaacgtcttaaatccgcacctcattgtctaaaaaaaagattgtagtttgctagcaaaagtgtggtatcaaatttgactatctaactttaggcaatcttaaaaagaaaagctatggcatctctaggcaatgttagtattggaacccgtacgcaactaaataaataaatattattgatcaaagttcgagaaaaaaatcaattgtgtcatatatgaaaaaaaaatagaggttatatgtgtcaaacatgtaaaatcacagcacaatataatggcatatcgcgtaataaataaataaataatcccctaaaagagatgatgaagaaaagaaggccactccaactagagctaaatttacaacctcgcaaatacttcatccgtttcatattataagactttttagcattacccacatatatatgcctagattcattaacatatatatgaatgtggataatattagaaagtcttataacctggaacggaggtagtacgtatcaaaagtatagtagatcgtgtgctgtaaaatataaacaaatccaatccaaactaaacgatcactttggtcggacacggaaacatgcatgcatttggttgcctcacgagatctcgacgtcgcacggcacgctgttgaaggaccgcgccgccgacggcgacaagccgatgttcaccggcgagcaggtcacattgacttggtagtacctggaggcgacgccgccgactatgaaccggacgcccgtggtcacctcaacgtccacgctcagctcgccggcggcgaggtcgtgctccagctcccaggcgaccaggtccgtgaccgggaccgggaacggcgccgagcgcgccacggcgcgcaccggcagcgtcgtctcgttgcggtggggctggtggaaccccggcacgacgtagccggcggcgagctccagctcggagccgccgtagagcacgcggagcgcgacgctgtcttcgtagcgcatggagacgcggcggttggggttgtcgatggcgagggcgaggtagaaggtggcgttgacggtggggccgctgcagcccgggcggcggtcgcgcggcgtgacgttgaggtagaaggtggcgttgacggtgggggcgctgcagcccgggccgcggtcgcgcggcgtgacgttgaggtggcgcacggcggcgctggtgacggtgtactcgatgggcttggggcgg

SEQ ID NO: 4104 - DNA, 549 bp, Oryza sativa
taatgaagttgatgttaggtgaacatgatagatggctacattgatttgctaatatttaacagttttgaggtaccccatgctcctttcgtgatggatgagacttagtgttggcatcaccaattatttgagatttgttcccaaaacacgaaacatggttcattgtcttttaacagttcaatttatagtatgcatctaatatttttttattagcttattcatatttatgacaaatcagcaaaaggtagctaaagaaactgaaatgttgaagcttaagccatgcataaagttgccagaagatggttagtaacagttaagcaataacttgtggaattaaataattgtaatttaagtcacagattatagtttcatgtgatcaagaatgcttacatgcttcaccttcttatctgtgagctagcattacttactctaatgcttactttggcaggcacattgcagcagagtgttcttccaaagatctctgctggaactgcaaagaacctggccacatggctaacagctgcccaaatgaagggatatgccgcaactgtg

SEQ ID NO: 4105 - DNA, 29392 bp, Oryza sativa
aatgcgcgggctaccttcctagtttataagaaatgtctcttcacatgcaagttttgaaagaaatttaacatgaggtatatcctcatggaaaaaatctttttgagtctttatctctccttaaattcctgtgtcttttctatggcccaatcaaatgatcattcttatgtttttcatgtgttttaaaattctctgttttacacttatatttctatcagaatactatgtttttcctatccgtccactttttaaaagattgtcttcggttagaatgctatttttttaatatcaaccaaataaaaactttaactctcggtgggatcttaaacttccatatctcttttgaaatctaaaaccagtgttctgtacgatcagagttcaatagaaagatttaactgtaaaaatcccattcattgtatgtttccagattaattgatctggttcatctgtcataacaatgttctgacactgcttattcaagcttccccagtttttttcattttcgtacatagcaaagccaaacggatgctgaaacgatataagctactactccctccatcccaaaatatttaacgccattaacttttttaaacatgtttgtctgttcgtcttattaaaaaaatttaaataattattaattcttttcctatcatttgattcattgttaaatatatttttatatatacatatagttttacatatttcataaaagtttttgaataaaacgaacggtcaaacatatttaaaaaagtcaacatttagggaacgagggagtagcatggaatttctcgcctcagccatgtatccaaaaccgttacctgctcatgtcctcgatgccgatttgataattgatactgtaggtcctcaagttttatgtctccacggctatgtctgtcgcagctcttgctgagcaatgaattgtgtcatatatacttgcactggaatcttggatacctggacaaatgaagcctgtaatttgtagaagatggtcaattgattcccttaatctctcgaatctgcgtgttgtatttctcctggtaccttccactcctatatttgtatagtgttagtgtatgactaaaaggggcgagaccgtgactgatgctatgtgctgccggcaaaaaatgttagacatgcctggagtgtcagttcactcatatatatgctcacctacagtgtccaaatttattagctgcccatttgtaacaagcagattttttttatgggacatcgtaggggggagaactgtctacctgaatatatattacgtcaagaggtaccatgagataccattttttctattgtaaaggtacctagatattataagatacctttttttaataaatttttgatatctctctaagaaccgtaaaattgctcttacgtcaaacgggcatacacatggagagctttgatcgtgtaaaaggaggataatcagaggattacattggagattgcagagaggtgaaaactaagcggatcacatcatctgaagtgtgcaatccgtagagagtacatgagtactacgtatctcaggtacttctgagcatgcaccaccattatatcacgatttatttcattctaaaactaaacatatacatactaaaccatcattctcaaatcattttcataatatctcaatccaaatcatctcatcatttctccattatctaacgtatatcccgcaggcattatctagtgatttaaaaagggaaaaatcagaggagaaggagctcggaggcacgccactggattcctagcacgctgtgtgccgtgtagcgtaaccgtacatgcaatgaaattagcgaagtgacaagataccaatgaggaagtgtacaagtttttttttttcctgtattgatctcaccatcaagtactaatacaattggaatgactcgctgccctgttttaacctaccgttagctagcttagaaacaaaaaaacatcgcttccattgcttctgaataagctacaaattttgcatgactttttgttatttcacttatttcattttgatctcctctgcctctttagcccagctgtacacattcagctcattgttcttgaggtacaagtcaccatcttctgctgtggcattctctaccttatgcacctatcaccaagcagcctcctaaaagtgttctatgatggctgttcattcgctccctgcagacttgggtgcatgaaaaatgtactagagtatagtgttcttcattaccaagactaacaggacggcttggctgggtggaggagccaaaaatattcgtgcactccaatatgatcaagggcaggagtagtacaactaattctcctgacgcctcccacttccatctctacattgtctgtgcccagaaaatttaattttgaatttaatttgacattgtgtaaagtgcaacatgttgctggtaacaacattacaacatcacccccctttgccaggcacttatctccttacgtatgtagtgtcctcaccctcgaggccttgatgtgaacatatgttagccagacaatgaacatgcatcgtaacaaaaatatataaatatcactgttgctgtgatgtttaattgcacatggtgtacgttgtgaagagtaccattttagtactggattaaaatgtataaatactagtaaaaacaatgaaaatatactccctccgtccccaatataacaacttttagcccttaggatttatccaaaaatataacaatttctccatcaatatttttttcccaaccaatcacgatcctccactattcatttttcccacctacctccactactcattcagtcacaactcactaacattcacttttatctactttcttaataaccatgttaaactctaaaacttcttatatatattctcggatggagggagtagcttttagtcatgccagaaaatgtttaagactaggctttcaatgtttcttcggaagtcagtgctaaaaaaaatcaaagctcggtaatcaagcggagatgaaaatcaaatattacttttgagtccaatagtactaccaaatgctcgttaatcatacgaagatgaaaatctgagacatgcatgcatgaataaagcctgaagcggagatgaaaaatattcggcaatttatttagtagactagaaaagatgcccatgtgttgtaataggtagagctaatttaatttgtacatattttgtagataaataattacaacccattatttcgtttattcatgtccttatccaaatcacttattagcaaataaaatactatttatgtgcaaatcttttatatacatgttcttagcgactcaaaagcaaatgctgtaaaataagataaagtatgacaaaaaaccaaaaagtcgaattcaaaattaatttctaaaattttaaatttggcttgtaggaataattataagcaactccaaaaacacgagatcgatttatcctccagctttatctcaagtaagacagctgaaattgatgaaagatggaatcagcaatttcgatcatcctttatttcaattgccatgttcttttcgaaactaaaaccgatttttatggataatccctggtagcacgtacgatagtacgagtatgcgtggagactgacttgaaatcatgctaatatgtcataggaatcgtacagtgtaatacgaatagaatcgtatgaactgggcaatgatgtacgtgatatccacacggactctgcgagtttcatttgcttggtatccacattgcacggactctcttttgtagttcgctcgcgagtcgtgacttctaaataaatgttacgtgtaatgggaatcggatacggatgacgtaccatagttttgacaaaaacatcttcatttttcaaatcgcgggtgaggatgacgcagtcccaatcagacatgcggcaagggcaaatcgcgcgcatatcggatagaaaggacatgattttacaagaatataaaattaaaatcaatacataaaattaaaactgattcaaacacggatgacgtatcaaaattctagcggaaacatcttcaatttttggaatagtaaagattttgagggttgtatacatccactatatattcttctattaaattcacagtttaggaggttttatagtttaacagcatacaaccctcaaaatatactaaataaattgccgaatatagaattatcttctatattctctggtttgatttcgatctcctatcacattttccaagtgggatagcaaccgcctgcccacatgtgtatgtaaaattaagaatttttgtaggcgagcatcacaaccgtgtgaaaaaaggattttcgcaagctagaaaggaatgcagctcctgtgcccggggttcgtcatcatcatgctccctatctagcaaccgctgccatcgtcatcatcgatgtcatccccggcctcccatcgttgccgctggcggatcggcccctcccatcgccgccgccggctgatcggtgcacaagggagcttgtaaaaaaggcggcaggatcccggccagccggatgcatgcacgaggagggtaggcgacaggatccgcacgggagggggagagcccacggcacctctcctatctccccaaaccttgtttcactctccggcggagagcgaggaggccaaggccatggtggaagcgaggaggtcggcgcttcagatccggtggcaccgtggtgaagctgcattcgatgacagcgtagtgaagcgtgcgacggcatggatcgggcggcgggggcaaatgagctcggtggaggggccttggtggtggagccctatggcgaggtaaggaagccagtggctgctgttgcctcatcgcttcagattgggcaatctcgctgctcgttcaaggaggcattggctcgacagtggcctcgggggatggtgtgttcttgctactagatggtggcggctcctccccgagctccacgggtatcacagattcaaaacttcttctgcctagatttttcttatttcaaagattgtagtgccggttctggtgtgggtgggcaactaggcaaaggtggcctcaaatttgtaccggttagaaaaccggcatctatataggaaggcctatagtcgtgtcacctactatgatatatacgtcgtgttctacgtgttgttgtatgcagggccggccctaggcctatgcagacgaggcaatcaccagggggccatgatggtgagtgggtccaacacctaatactagtagtctagtaactgcctatggcctacctagaagaagaaacgcgcgaaagacgagaggagttgcaacgtcgtcggcaactcggcagacggcatcgcatcacacagggtatagccgcacaggcgcacaacatcgtcgactcgtctgcaacacagcaactcggcatcgcatcgcacagcacaagtcaacacttagccgcctgcctgcatggcgtcagcccgccggctgccaatcggcagcagcctcccgcctggagccctggacgcaatcacgcaagacagcaactcggcaagagtgcaagactagccgtccaggcatccagctgaaagaattctcttaactatacctgtgatggtagcttcaactgaaagaagtttctcaaaattgaagttgttgaataactatttgagatcaactatgttgcaagaaatgttaaatgatttggctacatgctctatcgagaaggatatcttagacactattgatcttaataacgctcttgatgattttgcatcaagaaatatccaaagaagtatcttcattaaggtagtgatattagttccaaggtacaaatatattgatattttggtcgactttatttctcaataattaccagacatgtatttgttttcattttgtaaataaaattagcgtctatatatcataaaattttatatatcgtttagagggcccatcacgatgagttcatctagggtacgatgtagtgaactcaataaccaagcaagaccgtgcttccgggttgggaggaggagctgaacatttctggactccaataaatcaaagagcagcggttttatgcactttcctgatgtcttccacttctattttctaaaccatgaatgcttacaaaaggcactacatcttaaccaatgttacaacatcttccatgggcatatatatacattgcctcacacatgcttatgcccatgaggccttgagaagggtacttataagcccatattagttggaccagaggtatgtttttcgtctggtcagctagctccgtttttgttcgtgctctcactccttcagtcagcccaacacacacctggtaagacgagttgacgataatgctttgcaattgggatactatcgctgcagataggcatatttgcacacattaattattttcttattaagattgcttcaattactgggtaataatgccccctgtcaaattaaaaccgaatgcctgtgtaatatgaaatggaataaattgtttgtctgtaatttctgtatggcataatgttttgccctttttttttcttcgtgtttatgtacctcaaaatatatctgtagtctagaaaaagaaatcacatgaacttcggttttgaaccataatctcatacagactgtttgcctccacaatagcttggctatgtttagactgtgcactgtacatgtagttgatgttctcatactgggaactacctggtcttgatcaagatcttcacggactctgccaaaatgcttgtgatcaccttgaaccatctctgccacatattagttagtaggagtactattagttttcccaatacctcccacttctactactctatattgtctgtctacagaaaacacaaatcttattcaccggtgatatgtttttgcttgcaataacattacaacaccatcctcatcctcagggaatgcatctcttcacatacgctcacctttcttttccaatttatcaacaaagcattgattgttttctgcaaaacaaatatatatactgcccttctccggatataaatgaacattgcacatggtgtaagagtatattcacgtagttgtatattctgcagtgaaaaaagcgtgaaggaaagctcaaattgatggaactgctaagtaagggagacaaccaaaacaagaacggcaaacagggcaacattagaaggtgaaaataaaaatgacaaattgatgaagacatgttggcgcgatatccgtgtaagacatgttgcaggcttgcagctcggatatcggcatatcgttgtacttaagcagcatagatgcagcaatactgaattggtcggtgaccatcgaactaaatatgattgttaaacaaaggcacatgttagagtttatgcactacgatatgaaatgatttttcaggacgatatgctctttaagttgcagacgggctataactgctctcgcctgcaaaatcactcccccaatcacggttcaacaactacatgcgaaaatcaattttcgtaggcgggcctcttaagtggcttgcatccgaaaatacccctccctctgtccacatgttttttcctcccctcctctcgcttttcccactaagtccaactcgacactcccagtaagtctaacagttctctcaaactcctccaactctcccactctcgaagaagcgatggcgagcgaaggtgccgggctcgggtgagagcggttgtggcggatacggcagtgttgagcaaggcggtggcggatccagtggcgggggaggagggctcgacagcgggtgagggctctggcatggggtgcagatcagccacggccaacctcctcccctgacgaagcgacggcgagcgggggccgtggtgagaaggatgtccgctgccggcatcaattggaggggtggatgcccgacgcctccttcccctccaacgcggatcctgccgcccctccgtccccacacgtgtggatccgtcggcggcttcgagcgatgacgatgaccaggatgccagcggtagattcaagcgacaacgacgacgacagcaatgacaaggacagcggcgacggcttatggattctagggttagggtttagggattttcaaatttttattttatttttttccttttcgtcgtcgtttggctgaagcgtctgcttgcaaaaatccagatttttgcatgtggctgctctacccacttgcaaaagtctaattttcacggactattaggtgcatgcaggctgcccaaccgtctgagaaaatcgtttctgacaacatgcaaaaatcatttatgtaatagtgatggttgatggaactatggatttgagcactattagcaaaaacagcttcagattctccatggttaattgaccggaggacccaacgttgattatccatggttaattggccgctcacaactaaacatacaacacaatctgcgattatgtgtaatgtgaatcacgtcgagtcgttgaaatcatagagttccttctttactgccgtctcactcaattctcaattgtactatttttgaacttcactgatgtcccaaggggttaaaaaaagagattttttacgatccaacggtaccgtcggcaccaaatcctggtcgttagatctggcccgatccaatgattggtagtgtttggtaccacgaggtaccaaatatgtccctgttttggtacctcccgtagaagagaggtgaaagggcaaaaatgtaacttcgcgtgcaatagatgggaggaatagatgggcggaaccaattttatcgcattttacatcctcttctacgttgccgtcatgtttctctccccctccccccctcccaccgctgccgtattcctcttccacccagccaccaccattttcctcttatgctgccgtcgtgttccacctccagcgccgcaacttcgatctgggccctagcgccgaagcgagattgattgcggcgtgtagggttgtgccctctctactccgggattcgtggtcttccgccaatcgtcgcctagatcgacaccatcaatcgccactgcctagacgtcaactccgccaccgctgggatcgaccgccgcctcctcctagatcaacgccgccacctcctggacgtcaactccgccgccgccactaggaatgacgacttggacaccgctgccactgggaacaacgactcgaacgccacatccacctttgctcatcttttctctctttatcctacccttcctggattcaacggttagatgtgttttagttctgagctgtaccagtaacgaccggtacaacctgctggaccatgaagacgatcttcaaaaaaacatggcaattatttcttctgcatcctcagacttgagagaatatatcaatagctagttctttctgtgagtaggtgaaagtgaaaatttcactatattctctgaaaaggggttattatttcgctacttctacttgtcaggagaagaaacatcaatgaaacatagagatgctgactacaagacccatactttcatgatctctcgtcttgtaggaagaagttgtatggtcatttctgacggtctcaactttgtgatttatctatcgatacatcatgctccatgccgaaatgtacatattgattcccactacatttcgtgaagtgtggcttttagtttgaggtactgtaagtacttactaaatttttggagtgtgcatggatgtgtttactgaatttatcgaaatcacaatagcttatgtgtttggaaaaaaaaactaattttcatagatgattcttacaaggggaacttgaaattagctagtgcacactgcacagactgacactgtagattggcatatgcccgcagaagtcttgagtatcacagactggcactgaagactgacagtgcatgagtgtagtagcaatgcatgacagataaatgtcactcttttgctggtgtgcaatgcaacaccctgcagttgtttgttcactctgacgattgacacattttgacgattttgctcattatctatttaacaaggtcactcaaaagttgtagtcgatgttgtggtctaaacttttctcgatgaattacgcaatgaacgaactctctttcactgaagaaatgttatgccttggttcctgatgacttccattcatattatatcaggaaggaatcaacatggatcggatatgatagatggtgttgccaagattgatcgatcgatgctagcttcagcaccatatatatactcctcaagatccaccttatttaatttcatgatctatgggtgaagacttacttttgagtgacatagctaacatatttcctactccctccgtcttaaaaaactcaatctaaataaggatgtgatccttcctattacaacgaatctgtatatctagagattgttcagatttgttaaccaggaagagtcacatctctgtctaggcagaggttttttttaggatggagagagttcgattgacagagagcaccaacatcgatcaaactttatgcagaactaaaatcggcgtagctcagatgtagccctggttgaaatattgctgggtacgatttttgctgtttgtgccgtactgttccataacatctagcctgttttgattgagctagaatgaaaattaattgatggccttgtttagattcttttggattggccaaaatcctgagacatccacccatacgcgctaggattatattcctaggaggcagtacataaattagtgcatatcgcatataattaaacactgattgcaaaacttggagcaacaagttctaagtaattttgtagttcttgataggtaaaattttaatgtaaattttagcaccttctagtaccctatactactagagaatatggtatctcgtgataccttgtcaaggtttgtaaaatgactgtcactccaacgatactcgtgtccattgcttaattttcagtccttttgacagtcgccgatttgccatcgccttatttcagtaataatctgcagtgttcagtagttgattcttaatcttagagcatgcccaacagcttccttttccaattccctattctatgatttagggaattttgatcaagaaacagatccaacagattctctaactgatatcccaatatctctggttcctcagtccggatatatcgttcctcacaaacagggagcgattttgttcccaatatttcctcgtcggtctctctcgcgcgcaaagggaaaatgttcccgcgcacttctccgcgccctcgctcctcggcggctgcaccttcttcctcggtcgcggcaccctcttcctcggcggcggcgtcctcttcatcggcggcagctcccttttcccttttgcaaggcacggggtgtggtgtcccgatgacggccggaggtatgccgtttccgcagtacggcgagttctggcccggcggccatgcgcgccccccaccgccgcccgccggccatgcgcgccctccacaacgctactccggtttttaggcatccgaggccatggagaagctgacatctagcgagccactggatcccctctcacacgaagcttctatcggcagttcctccagagtatggactgtaggtgacgaagaattcctccacatgagcaatttcggtaagtccaatcctgatttgttcagtgtttagtttacatgctctgaattccttcacatctgaagctttcttaattgtgctttcttttttttcttcaatctggatagtattgtcttatttatactatctgatagaggttgcattttcagaaattttcatcatgttcttttgtgtatgcttgcaattgtagcaaaattgcctgacttgaacaagggtatgtctgctgtatgtgctgatgtacttcactgtggtgtatatcctgcatttatgtccagaagtatatagggtatgtacagcatgcaggaaagaatactcagtggtgttgtgctggaatttcagtttgacactatgtagtgagtataatatgctatcaaatttatgctctgagtttgacacagtggaaattcagtatgtactgagtttcatatacgatgctctgaaatttgacctgttgaacagttatctgaaccttgtcgctgtcaggatcgatataggaacatttctatgaaccttgtcattttcagtatccaaattagcaacatttgtgtgctctctccatgcgaatgcacagcttttgattaatattatgtgtacacaaagttgtcaccatccaatacatgtgaaatttcaaataacagaatgcattttttgtccagaaattatcacttgtttgtgttttgttagtctttttttttctcaagtacaaggttatgattttttatctatggacagatgatatggagcgagagcgatattacacaaacttgatcaatgatgagagcaaccattttggctcgagtgagatgggaagccagtatgatgatgaacaagaaccagttgtgaatgaaaatgttgctgtgagaccgaaccaaaaaagatcaaaaaatttcagtttggaggaggacaaccttttggtgtcggcgtggataaatgtttctttcgatccggttcaagggatggatcaatctcacggtacatattggggacgtattcatgactactttcatcagaacaaggaattcgaatcagatcgctcccaaagttcacttgtacattgttggtccactatacaagaacatgtcaataagtattgtggtttcttaagtcagattcagaatcgaaatcagagtggtgtcaatcatgaggacatgataatatattgcttgtgttgcttattttccaatcgtctcctttatgtttctgacttcagttcatttatttgcagcatgtgcaagcaagcctgatgtacaagaagaaagaggaaaagaagtttcagttcatgcattgctacaacgttttaaagaatctgccaaagtggaatgataagcggaatcagctggcagctagtaaaacttcaagcaagaagcagaagaagaccgccaatgattctcctgcgatatctactcctgcatgtaatgttgatgagaattgggctgctgatcctgagaatacagtaggtgagggaagacccatggggaggaagaaggcgaaacaacagatgtgcgaacgctcggatctatcacggaaagagtccttagactatctatgggataagaagaaagaggccgatgcggaggagcgaaagtttgaggagaggtaccaaatcgcttttgcacttgagcaaaagcggattgatttggagagagacaagttcgagttcaagagaatgataaaagaagataagcttttgaggactgatactagtgcaatgagcatcgaggagcaggagtactataaaaatgtgaagaatcaaattctaagtcatcgttcagctcaagcataaattagtcttattactcatcaattagcattcaaaatttgttagatctttagctatagagcctacttaatggactagtaaattgtactatcttgttttggtactgttttatgtagccggagcatttgctactactacaaaattgctggaaattgtttttttgttgaaaattgctggaaattgttgttgatggaattgcttcttcatctcaaatggccctgttactgatagtgtgcattttcagttcatgttgtccactagtgctgaaataacccggttgttacagagccattcaggcatcaattttacaagggttgaaataagtttcagtccattaaagtaactgtcagaactagtagcaatgttcgatgatgattggcatgtaaaaccttcagttcatggacttgcatatgtagcaaaaatgccagaatttatcatcggcttgcatatgtagcagtgcatattctgatgtacacccttgtggtgtatatcctgtatatatatccagtcctgaaaaaggatatgcactgctgtccttttcagtctattgtactgtatcgaattcaacaataaatcacattgtcaataaataattactataagctcaatatgtactaatttaaaaacaagctgtgaatctccaattattacaatctatgacattatctataagaatatataatgtaaaattaatatcggtctgcatgatgattccacaaatgttcgatgaggtcttcccttagttggttgtgaacttccttgtcttgaattttttcgtactgactaataaaatcattaaagttggtcgtacgttcatgggaaccacccacctgttctcccatctcatcataaactaaatcaaaatcaccatcgcgctcgtcctccacaatcatgttattcatgattatacaagctctcattatctgattcagagtaagtgctttccaaaaacgagctggtccacggactatagaaaagcgagcttgaagcactccaaatgcttgttcaacatccttcctagcagcttcttgtgctttgctaaaatattttctcttatttccttgtggcagcttaatgctcttcacaagtgttgcccatgaaggataaataccatctgcaagatagtaccccatagtgtagtcgtgcccgttaatactataattaactttaggagccttcccttcagctagctttgcaaacagcggtgagcgttgaaggacattaatatcattgtgagatccaggtgaaccgaagaacgcatgccaaaaccgtcggtcacgtgaggcaacagcttctaaaactatagtaggaactccctctttccctttatactggccttgccatgcagtcgggcagttcttccactgccaatgaatacaatctaaagaacccaacattcctgggaaccctctttcttccccctgagcaagtaatctagctatgtcgttctcgtttggtgttctcaaatactcctctcccaaaaacttcatcaatagccaccacaaacctgttaaaactctcaataacggtactacctccaatacgaacatactcatcaactgcatctgccgctattccataacttaacatacgtgacactgctattaccttttgcaaacatgacagtccaagcacaaaatattcatcatgtgcttctatagcattcattatgcgtaaaaacagaggtcgtctcattctaaacctgcatagtaattaacgatattaattatctttaatatcaattttgcaaacaaatattgtcaaaacaaagcactgctaaaaacctgcgtctaaactgaacatcgaggtacgtaggttcttcagaaaaataatcattatataatctccgatgtccagccaatctttcccgattaattactgcatgacctataacagatccaccacgctttggaacttcatcatcgtcgaactcatcgtacactatatcaaccgccgaagaaataaattcttcgtagccatccaataaagactcctcatccaatagcatttggaggagggtacttcgacgactcatcttctcttttttattgccacagggttggagcgtttaccacagggatgaagtgcaatggagagaaccgatggcaggaatacaacaataatcaatctataaaattaattattagatcaaacttaatattttccaacaatagatatccacataaccaaatagagacagatattgactagggcacaagagatcaataggatttgctagggattacctccttgatgacacgaatagctatggcatatccttggtattccgtttttgtagaaaccgcagcactcaggacactggttggctggtgatgatgcgatttactcagatggcggcgctggtgtgggagggagaaggtgctgggagggagaagtctcggcgctggtgcgaggagggagacgattgatcggtaccgaactaggcccaccttgcttatgtggcaaactaacaaatgatagggaattaatttttgggcctctcttggaggagggggtgattgttgggcctaattcttattttggaattcctaattcagattttttgggaatcaaatattgagtgactgttgggcatgctcttaggaaagcatatttatatctatagtgcttatgcataattgaatgctagcaaaaactacactacttaaagatgctgtatatgtcaaaatctcggcacagtagctagctgctgaagcaattcaaggacatttgtattgccgtacttatccgtattttttttttttggaaacctacttatccgtaattgaatactagcaaaaacaacactactcaaaagctttaattgcatatgtcaaaatctcagaacaaaatgacatataaggaaattcagtaactgtttttttccgtcaaaatacattgaaatttgatcaaatgtgcagatttgaagttttagtttgttgggtgccacagtgagagtcttgaggtcgtcgatcgtgccaaaacatatctgaaataggcgccttgtctttctatctgtcttaactcaagttaatgagtaatttgtagtctataaagagttatttgtaaaacatctcgatggggccatggcccagtttgattagtctccacagtctggactgaacgaacgaggatcctattagttaaacaatttcagatgcaactctcatgacggttttactcattttcccgatgccttccatttcttcagtagagattaggagaacaccatcgatcattcggtcatctcatcatcctatcctatattgcacccaaaagaactttaggtaaattttccttagtctaagaatttcgaacttggctaccagttaagcggtgagctatgtatgctttgcaaggtaaaggtccatcagttcacatatatatatatctatgctcacccatcgtctatttgtctctaattaatatgttgaatgtgcttggaatgttcattgagtacaaaatgggtataactctgaggccctaggccctgtttagatcccaccataacatttttcaccatgtcacatggaacgtttgaataactgcatgaagtattaaatataggctaaaaataactaatttcatagattgcaactaatttgcgtaacgaatcttttaagcctaattgctccatgatttgacaatgtggtgctacagtaaacttttactaatgatggattaattaggcttaataaatttgtctcgctatttattgacggattctgtaattaatttggtaccaatgttccaaagtaatctaaccataggacaatcaaagaacaggtgttgaattgtttcctctctatcacaaaattgacaattcgtaccccctttcctccaacaaacagccaaataaaaactttgatcttcaatgtttttttttctgtggaaagtttacttgttccattttcatagcactataaaaggacttcacagtgaatctgccttcttttgtcaagttccaccaaatcttatccctatcattttcattcagctgcagatcacccatctatttttaattttgttccagtctctgagtttctcacaatacaaacatctcctgaactttacggaatcaatccccttctgtttcaaagttgcaatagttaccttctttgtcactgccacattatataactcaggaaatcggtcattcaggggtctacccccaaccatcttcccagaataaagtgttcctaccatcacctacaattttattacaaaatttgtaaaagctctctttcacctccaagatttcttgccagaagtgtgagttgccaaatttatcctcatatctgaattaggcgccttgtctttctatctgtcttatataaagttaatgagtaatttgtagtcgacaggaagttattcgtaaaacatctccatggggtcgtgcatggcccagtttaattagtctccacagtcaggacgcggcgatcgaggatcctcttagtcgaacaatttcagatgcaactctgatgattgttttactagtcttcccgatgcctttcacttctattgtagagattaggagaataccatagatcattcggtcatctcaacaagctatcctatattgcacccaaaagaactttaggtaaattttgctagtctaataattgtgaacttgcatttggccattggctaccggttaattacgcggtgaactatgctttgcaagggaaaggtctatcagttcacatatatatatctatgctcacccttcattgctaatatgttgaatgtgcgtcgaatgttcattgaatacaaaatcacttgatatcaggattcagaaatgcgtgtacttcttttgtacatggtgtacaagtggcggacctaggatttgaacccagggtaggcctagcgaaaaaaatctaaatgcaatacatcatgattcgatataaaacctagtaaatgatacaagtatataactctaaatggttcaatacaagtggataataacaaaaaagtttaaaacttacctaaatgacaatgtaaattgccccttcatcaacaagatctgtaggtggaggtggttcttgttcttcacatgccccttcatcaactagaattggagcatcatctacagcaggaacagatgacccttcatccacaggtgggattggtagatcacaagatgcaactttttttcttcatgcttctgaaaaagaaatacaatgcttgacttcttcattcctcaatctcctgacaaccatcacaccatgcaaaaatgtcatatgaggttcattgtggcgcacaattttgtggtaatctatacaaattactatatctccaattggggaatcatggatataaagaacttattgacggaggtagtactacctgctgactattggaagggggagagcagagggactgagggagaggagagccggacagccggagaagcagtggcgcaatgctcaccggagggggagggccgccagatgcgggatgccggccgggcggcggccgccggccgccggggcgggacgcgcgcgccgacgcgcgtcggggaggccggaggcggtgcaaccgcaacggcgtgagtcgggactcgggaaggcgggcaggccggccgctggtgtgaggggaagagagccgtggcggcgctgtcgggactcgggaagggggcaggcctgccaccggcacgaggggcagagcgccgtcgcgccgtcgcggcctcacgggatgcgggagcggtggcggctgcatcgggcgtcggagcgacggcgcgtgcacgtgcgactaggagtagggatggcaatttctccgacgggggcgggtacccgccggggacccgtccctatggggccggggtcggggctatatttggccccgcgcgtgcagcagggcggggccccgaaaatatgcggggacgggggcgggtctagatttccacccgcgggtgacccatggggagctgaaaatattgtacatacgtagatggcccattaaaaatgtggcacaagcaagcccatgttgtgaaataacttttcctatccaatcttatctaccccagccatacagtcacggagccacccatccagatcgagtcaatgacctttcaaaaaaaaaaaaaaagaaacatagagtcaatgggtagcgactgcatcggcgctaccgcagttgttgcaagcgatagtgactccgcatggctgctgcgcctcgtcagctccttgcgaggctgcgcctctgaccaggacggctgctgcgcttccgtctaggccgcgggtcgccggccgctgcactttcgctgcgtctccggctgctgcaactttgccgcgtgtcgccggctgttgtgccttcgtcgcacgtcgccggctgcttcgcctttgttttcatcgcgcgtcgccggcttctgcacctccgccaaatctccgcgacgctggcctcctcgatgagccaccgcgtcttggctgctacagtcctggtttgccctctttctctacagctttgcagggccccggtctgggtcggggaccagtaggggccggggccgggggataaagtcaggggtcgaggacggggccgttcctgtccaacccggccccgccgcgccccgttgccatccctaactgggaggccgggaggaggctagtaggaaagttagagtttttttttgttgggccaggatttgtttatgggccatgaaaaaaaaatacatgctcctttctgggccaaatcctagggcaattctgggcctacctggactaccctctgggtacgtccctgtggtgtactgctagaaaaataatttgtcatcacgaaaaaaatcatggcatcaatactaaaattgtgacgatagatacatattgccacaattttaaaatcattgctagccgtgataataaatagcgtggtaataggttatttcaacattttttattcggtggtaataaattttgatgttgccatagaatggatgtggcaaaaaatcatattgcaacacttcacatcattgcaataaataattattgccaccactccatatgtgacattagttttacataccaaattaaaagtttaaatattaataactaattttgttctacatcctaactatttattatttgataccttgtcttcgctagattcgaacacaagacctatcctttaggtgtgctctcatttaccaactcacctactcatcaattctgttagaaaagtgtatcgtttcatttgagcatatctaactgagatttaaatcacggatttaaatatctaaaagatttcaaatgaaaaagttatcacctataaaattgttgatcttatcgagagctataactttcatataaattttgtcccaatccatgtccatatgaaaaaattaagttaaattataagatgacatttttttcattgcaacgaatttgttgatcgtggtaacagaaaatagtgaaaagtaacataccacagccatgtactatgcaaaatgccaaaaaaaaattaaaattgtgatgatagaacatgtttttttgcaagcgtaatggtttttggcaatatcttattttctattgcaacaaaaatactaaataaaacaacgattgaattggatgaataattaagtagcttcttgatcaaacggttgttatctttgtactaatatgatctaatggcttaaaattattgctgatgtggcttcttgcatgtcttactttataggagtaaataccatactcgtctagtgcacgcacctcccaacgcggcgggcattgttttggtggattgaccagatcaaggtaacatgtgattcaatagggaagttaagatagatcagagcccagttgccattgatacagccaaacatgccattgatgccatccaacagggaagttaagatagatccagcagaatattacaatgttgtgtacctggtgccattgatgtgttgctatatactacagcggcagtacaagcaggatagacccatcacccatgtgctattcttgcccaaaagtgtgaacagaaacaatcaaataatagttccagggtaaaaagagagagaataaacaacatactacccgaggagcaaactttacctcttttatttttcaccagcagatcgacaaccccgagatagagcaactatctatctcatatttttcattagattaaaatttcatgaacgacacatttggatgtttagcccaaccctgtgaaaggcagataagaagtatcataaaaattgtagctagttgaaaaggaaattcattttgacaaattgacttgagacgtcagatcagctcaatttttgtatccagtgactaaggccgtgtttagttcgtgtgtcaattttttttaagtatacgggcacacatttaaagtattaaacgtagactaataaagcaaattacagattctgcctgtaaactgtgaggcaaatttattaaccctaattaatccatcgtcatcacattgttaaatcatggcgtaattaggctcaaaagaatcatctcgcaatttacatgcaaactgtgcaattggttttttgtctatatttaatgctccatgtatgtgtccaaacatttgatgtgacaggattttttgaagtttgaagggaactaaacactgcctaaattattagtgcctaccacatattgttggaacatagaaatttgacttgcagaaatgctaaggtcctctttgtttaggcttataagccaacttataatctgaaaagtctaagtctaaacaaacgaacaacttattcgtttggcttttttgaagccataagccactctaatactattaatccaaaagctaggttggagaaacttttatgtatgactccagcactaaccttaggacattaaatccaccagcttataagtcaataagtcaataagctgacttaaaagtctaaaccaataaacctaaacctaaactataatacttgattagctgtatactcctgttcttgaacttgtaaagagcattcatagggtacataaggccaaaaaagctaacacttctcatcttcagattattcttgctcttcaaatttatctctacctccaaagaaaaactgaagcaacaaagcaggtattgatttatggggcctagaagcttaagtatccatttcctataagctagctcatatccaacttgttggcataatttcaataacacattaacacaatagcttataatatgatacctcaataggccaaacatgccatttagtcctgttggatccttaggtgtttattccctgattgactagccgaccccatgcttctgtggtagtttctgtctccgccaactatttaggtaactataatgtttccatgtaattctgattctactatcttttgttcatgaaggtcataaaatcgttataaactttaagtgtctgtttaatacagttatagctctagccaaacagtttcagctacacttaaaatagaagcgaagttatagactttaagtgcttgtttgacacagctccagccaaacagtttcagctccacctaaaacaggagtgaaactgggtggagtgttcttacaaaataaatcacagaggcagagctgggtttatgtttaattatctacaactccactccagacaaaacttctaaagctaaatttaggagttggagttctacccgcagaccctaagatcatatagggtacttctataacataattgatgacgtgtaagatatcatgttctttagatggttctttcatatctctatttggagatctgaccaacaatgctagcgaggtcccacacttttgagttttgtgaatggtgcggtctggattagcgtaataagcatgtctaagtgaaccggtacttataaggttgtacggatgtggagttttgtggtactgtatattcctgacataactggataaccagtgatattcctgacaatgaccaacacactagtttctttcaattaacatgcacatctaacatgaagatgatgactctggaataggaatagcgcagcaaaaatcgtaatgagaatcattccaatctaccgaagtccaagattccgaagcaaacatataattctgaagcgcacacatatactccctccgtttcgaaatgtttgacgccgttgacttttttaaatatgtttgatcgttcgtcttattcaaaaaatttaagtaattattaattcttttcctatcatttgattcattgttaaatatatttttatgtaggtatataattttatatattttacaaaagtttttgaataaaacgaacggtaaaacatgtgctaaaaagtcaatggtgtcaaacatttcgaaacggagggagataagttcagaaatgcaatgtttgacatattacagtactagcaaacatctcacaatcgcacaccgacatcaccttacagatctagctcttacaggtggccatgcctacgcgaggactcaaattttcaccttattttcagcacgatttccctccgggttaccctcgaaacgtccaatcctgaaatacccaagctccactccggcctccgccgccgtcttggcctcgccgtccatggccatctcggcgaggatcctcccgactgcaggtcccatcttgaagccatggccggagaacccggcgccgacaaccacatcctttccaaactccccaccaacgaagtcgatgatgaaatcctcatcaggggtcatggagtacatgcacgactgccggatgaccggcccaccggcggtgtcgacgtggccgggcatgagctcgtcgatccaccgcgccaccgggtccgccagggcgtcgccgccagcgcaccagtcccgcctatccgggtcgcacggcgcaccgccgtgcgcgcacaccttgatcaggcctgggaactccatggacggcgtggagtagatgcaggtgtcaccgtagctggcgaacgtcgggaagccggactccggcgtgagctcatgctcgcggccggggcgggccttccagtagcagatgagcgtgtgcagcggctgcactggcaggtcgacgccggcgaccgacttgacaagcttgctcgcccacgcgcccactgtgatgatgcacttggcgccgtggaactcctccccgctcgacgtcttcaccaagatcgatccatctcctaaagataaaacgttagatttttattaaataattactcgctcggcctcaaaatatgttcattttgacccatctaacctatacaaatgcaaagctataaagactataatatgctcgttttatctgaactcaattcaattatttctcattttatctactctatttacaattactttctaatttcacaaactacaatatagtcataacacaaaagtaaacttattttgggataaacggaaggagaaaacaaatgaatttattctaaaatgaagggagcagtagttaattaatttcatggattttactatgcaggcaaatacgattccagattatagtgaacaggtaaagatgtaaatatgatttcgttgattgatctgttaccttgcttggcgatgtcgatcacctccgtcctgtccctgagcacggcgccgttcttggcggcgagcgactggaacatggcaaccgccttggtggccttgatgacgccgccgagctcgctgctcgccgccgtccacccctcgggcaggcggaacaccgcggaccacagccacgacgccgccgaatcgtccgaggcgccgacgacctcggcggcgccgccgttctggatggcggcgcggagggccgggtcggcgcgcgggcccatgtcgaggtgcggcgtcggggtgagcacgcggtagcccgcctcggcctcggcgttgccccagagccgcgcggcgaggcgcaccatgggcgggtaccgcgcctgcgggtacgtggcgcggatgccgcgggactcgccgtgcgacgagccgcggtggtggagcaggtcgaacctctccaggagcagcacgcgcgcgccgccgcagcgggacgccgacgacgacgccgcggcgtacgccgcgcagctgcccatgatgccgccgcccaccacgatcacgtcgaagccgccgttggtcgccgccgccgccgccgccatgatcgcgcttctgggattttggtgtgggagatgaaggggggagtttgatcgaaagggtagccgatcggaggggataattaaaggcggctggatacggacacgtggcggatgcctattcgttctacatttactggttggaggcccacaaattactggccccaaaaacggcaaccaaggttaatcagactaattagcaccatcccggatacgattttgctatatatttgtcgacaaattttcttccaaaaatttgacagatgtaattacagtataatcgtagtgtaattacactgtaacttgcatgtaattacactgtaactatagtgtaacttgtatgtaactttcaaaaatctctatgtaatatgttatttcggtaaaatggaggttgtgggacaaatccttacacatgtgtgtgctgtgatttttttcttcctcaccaaaacaaatcttgtaatagatttaacgattcaaaattacgtgaaacttatatacaacttacactgtagttatatgcaagttacagtgtaatgacactacggttgtactataattatatctgtcaaatttttaggagaaaatttgtcgataaatgtataggtgatcccgtagcccctccgtattttcttcttcgggcgtgtttagttcacaccaaaattggaagtttaattgaaattggaacgatgtgatgaaaaagttggaagtttgtgtgtagaaaaattttaatgtaatggaaaagttagaagtttgaagaaaaagttgggaactaaactagccttcgtatcaatgcagaggatcacaatacgtgtgcgtgggtgtcagtaaaattatgttctagaaacccatcagcatctgtgtcaatgagatattttccgtagaatgtttttcgggtgtactacgcttcctcgcatagcaaaactaaaaagtcaaacaaagaaacaatttcagcatcttcagtacgccttcatgtgtaaacatcagtagcagtagtccatcaaaagatcacgaaattgttcttctttttgaaacatcgtcacatcccaatgatcctttcgttcctgatgtcttccattcatatcatcatatgggagagaaatcaaaacgagtcgcatatgatggattattgatggttgccattgttaacctatggaagcatcaccatcatcgatcctctccctcacctccaccacagaacattttggcctctatttatcgataagtgatgatatgtgtgcctttacatcattgttcaaaaaatacacagctaccataataagtactatctcctaaatataagatattttggttggatgtgacatattctgatactacgaattgagagtatgtccacatttatagtactagaatacatcccatccacccataatcccttaaggagtatgtcttaccattgccagagagcaccaacatcagacttaattattatctgtagaaaattgaactttcatagtcatatatattccatttgttgttccaatctaaaatattttttttctaaaaaatgcaataaacaaaatcatttttatgagttcttgacaaatattaatgattaacctatattttacccagattaattttaccatgatttctccagtaatatactatagtatctaatctatgctttctataaagttatagccactaagtcgtaagctcaacatttaaccgtgccacatcgtcagtagtaataattacgtatttaatctcatgcaaacatacaacattatatacaatttatttaattctacaaatcaacatgcaagcatatccaatcatcacccctcaaatcatttgcacaatattttaattaatctatctatcatttttatattttttaacatatacttatcaatatgttttacaataaagcgagtgtatcatttgtttgttatatgataagtattgattaacccgatgttttatttttattttttgctcctagcttggttgtcaaaagaaatatattgagaatcgctttgtaattcctataacaaaacgcggggaatcacgtacttaacatttacagttgaagcctcagtgcacagtgtagtgcatggtcatgctgaacctgattgtactcaaatgagagtttggcaatggtgacaatattcttcaagtaaaaaggcatgaagacaattaattggacttgcgatatattttggcaaagattgaaacagttgacggtgtaattttataacagcagaattttttaaggcagcccctaactgatgtactaatgaaaccttagagcttggaataagcgcttctaaaccacagatagctagcttggatccatctgcagctgtactaatgttcacaataaaatgtactgctagctcactctgccggcgacgatatatgccgttgccgtctttcagcttttcatagacatagttgtaccataataccactagattgttttttcttttcagaatgacaactaaacactgttgtgctttcgttcctgatgacttccattcatatcgtatcatagagagcttaagaaaacggcatcagttgaatggttcccgtgcttgatagatggaagctagaaagcctcaatatcaaccttcccttcattaattatatttctcagctcaagtaatgacgatgatatgatggattgattgtaggatcgaatcacacgaactaagccaacagggagggtgaatggttggtatacccaaaaaccgaaaacttttagcggaaataaaagttaccctcgaaatcgacggagatcggtctgaccgaagttgccttgccggtctgaccgctcggatgccgtcggtctgaccggtatagatcaaccggtctgaccgccgtgctcccgccggtctgactgccggtagatcgttggttagaccgccgaaacccagtaaacacaaatcgaagaactcttaaagtggatgacgactttattgattctctctgtgtttacaaagtgcaccaacagcactccatacaaaaatttcgactaaactctaaaccctaactcaaaactcaactcaattgctctctaaagcgataccgggaagcctcacgctccccctctatttatacatgagataggcagcctaaagccataaaccaaactcatactaggagtcctaaacaccttaggaaacccactagtacaagaaagaaactttacataaccaatcgtaccaaatttggactccttccaaattcgactccgcatcccatacgcacataataactccatcgtatgccatatagactctccatcaaccacgtgcatcaactctagtcttagtatcccgcatgatctctgaccacaacggacgtcgtcttatccccaagccgactcccggtccatcaccgcaaatactctcccgagacatcgagtcacctacacatggaacaaataaagaaaccatattctgagatcaagctatctccaacttgactcattagcagcaaacaatagtattacatacgtatagtatccatttagaagtcataatcatgaaataaactcggatatccaaataaacaacccgaaaccaaaactgacacagtgtcggccgattagaccgcgggctgcgccggtctgaccgcgcaatacacgccggtctgaccggctaccagagcccggtctgtccagtcacatagaatgacaatcctgcgattcacctgtaaatgcaatcatctccaaaaaccacttcgtgaataaattccaaataacaaaaccaataatctccaatgcccaattgttcatcacagaataataatcgaaaacacctttgattttacaatctcccccttgatgaacacattggcaaatccataaaaatgttttggtgtttggaaaaataaaaacaaaagtggtaaagagcacacttcgtacaaatgtacacatcgtgctcaaaaatcgaaaagaaaacttctccccctttttaaaagaaagaaattcccaattgaacaaaaaacatgctcttctcaacaactctccataaattcaccttgcttctccaaaaatctaaaaattttcacattacttctcccccttttgacaatgatttcatcaagcatag

SEQ ID NO: 4106 - DNA, 2405 bp, Oryza sativa
cgatcgggagagcaggtctccggaacctctgtctttgacgtcctgcaccgggagaaggcggcaataaggtttttgggaagcgcttcgcgcgactgctccctgttcgttcgcgacggctcgccttcctcttcgctcgcgtgtttcgtgccttcgtagacacctgcgaaaagttcgaccagcagccggtcttttcgtcaccttggtacgtgttcaatatgttgcgcatatttgatctgttcatgttatactgtgtagtttacatgtgtagatctaatgatgcgttcatgctagttttcatctgtaatgtcatgatttatttatggaatagattaaatcattatatgtctataatctcaacaatccaaaaaccttattataggcactgtgattttactttggctggttttgccgatgcactgaggccggataaattcaccggtgtgcattttaagagatggcagatcagggtcactctgtggctgacagttatgaaatgcttctgggtgagtactggcaaacctgaaggagttcttactgctgaacagcagaagcaattcgaggaagccactactctctttgtgggatgcattcttagcgttcttggcgatcgtctggtcaggtgtatatgcatatgaccgacgctaaggagttgtgggatgcactgaatactaaattcggtgctactgatgctagcaatgatctgtatatcatggagcagtttcatgactacaaaatggctgacaaccgttctgtagtcgaacaggctcatgagatacaaaccatggctaaggaactcgaactccttaagtgtgttttacccgacaaatttgtggccgggtgcattattgcaaaactacctccatcttggaggagtttcggtactgcactcaaacacaagagacaggaatactccgttgaggggttgattgcgtctcttgatgttgaggagaaagctcgggaaaaagatgccgcgtctaagggcgatggtgggcagtccagtgccaatgttgtgcacaaggcccagaacaagagcaaggggaaatacaaagctcagcagaccaccaacttcaagaagcagaagaagaacaacaacaatcctaatcaggatgagaggacttgctttgtgtgtggccaagttggtcatctggctaggaagtgtccacagcgcaaggggatgaaggcacctgcagggcagacttctaagtctgctaatgtgaccattggcaacactggagatggaagcgggtatggtaatttacctgctgttttttcagttaatcaatctactaattggtgggttgatactggggccaatgtacatgtttgtgctgacatctcattgttttcttcttatcaggtcgcacggggttccaccgtcctaatggggaatgggtcacatgcttctgttcatggtgttggcacggtagatctgaagtttacttcgggaaagatcgtgcagctgaagaacgtgcagcatgtcccttctatcgacaggaatcttgttagtggctcccgtctgactagagacggatttaagttggtttttgagtctaataaagtagtcgtgtctaaacatggatattttattggtaaaggttatgagtgcggaggcctgttccgcttttccctttctgatttctgcaataagtctgtgaaccatatttgtggcagtgtggatgatgaggctaatgtttggcattcacgtttatgtcatattaattttggcttgatgtctcggctttccagcatgtgtttaattcctaagttttccattgtcaaaggttctaagtgccatagttgtgtgcaatcaaagcaacctcgcaagcctcacaaggctgccgaggagagaaacttggcaccactggaactcctacattcagatctttgtgaaatgaatggggtgttgacgaagggtggaaaacgatatttcatgacattcattgatgatgctactagattttgctatgtgtacttgttgaaaacgaaagacgaggctctagactattttaaaatttataaggcagaagttgaaaatcaacttgacagaaagataaaaaggcttaggtctgatcgtggtggagagtttttctcgaacgagtttgacttattctgtgaggaacatggcatcatacatgagatgacgcctccctattctcccgagtctaatgggattgctgaaaggaagaatcgcacactgactgacttggtgaatgccatgttggacaccgcgggactgcctaaggcatggtggggggaggcattgttgacctcaaatcatgtgttaaacagagttcctaacagaaataaggacaaaacaccatatgagatatggattggtagaaaaccatcactttcttatttgcgcacatgggggtgcttggcgaaagtcaatgtaccaataacga

SEQ ID NO: 4107 - DNA, 12190 bp, Oryza sativa
cacatgtgggtgcttggcgaaagtcaatgtaccaataacgaagaagcgcaaacttggacctaagactgtggactgtgtttttctgggatatgctcatcatagcattgcctatagatttttaatagttaaatccgaggtaccggacatgcatgttggtacaattatggagtctcgtgatgctatcttctttgagagctttttcccaatgaaggatacacatagtggttcgaaccaaccatctgaaataattcccagttcaatcacaccaccagaacaaactgaacatacacatgaacttgtctctgaggaggatgtcagtgaagctcctcgaaggagtaagagacaaaggacggctaagtcttttggtgatgatttcactgtgtacctcgtggatgacactcctaagtcaatttcagaagcatatgcatctcctgatgcagactactggaaggaggctgtccgtagtgaaatggattccattatcgctaacgggacttgggaggtgacagagcgaccctatgggtgtaaacctgtggggtgcaagtgggtgttcaagaagaagcttaggcctgacggtactattgaaaagtacaaggctcggcttgttgctaagggctatactcagaaagaaggcgaagatttctttgacacttactcacctgttgctagattgaccacaattcgtgtgctactttccctagcaacctcacatggtcttctcgttcatcaaatggacgttaagacagcttttcttaatggagagctggatgaggagatctatatggatcaacctgatgggtttgtaggtgaaggtcaagaaggcaaagtgtgcaaattgttgaagtctttgtatggtctaaaacaagctcctaagcaatggcatgagaaatttgacaaaacattgacatctgcaggctttgcagtcaatgaggcagataaatgtgtgtactatcgccatggtgggggtgagggagttattttgtgcttgtatgttgacgacatactgatatttgggacaaaccttgaggtgataaatgaggttaaatcattcttgtctcaaaattttgatatgaaggatttgggagtagctgatgttatcttaaacattaagctaattagaggtgagaatgggattacactcttgcagtcccattatgtggagaagattttgaatcgctttggctacattgatagtaagccttctccaacaccttataaacctagcttgttgcttcgcaagaacaagagaattgctaggaatcaactggaatactcccaaatcattggctcgttgatgtacctggctagtgcaactaggactgatatctcctttgctgtgagcaagttgagccgatttacctttaatccgggagatgatcactggcgtgcgcttgagcgagtaatgcgctatctgaaaggtactgtggaattggggcttcactatactgggtatcctgcggtactggagggttatagtgattctaactggatctctgatgtggatgagatcaaagccactagtggatatgttttcacactgggtggtggtgctgtttcatggaggtcttgcaaacagaccattttgacgaggtcaaccatggaagcagagctaacggcactggatactgctactgttgaggcagaatggctgcgtgatctattaatggatctgcctgttgttgaaaaaccggtgccggctatccttatgaactgtgacaatcaaacggtaattgtcaaagtgaatagttctaaggataatatgaaatcgtctagacatgtgaaaagacgattgaagtctgtcaggaaattaagaaactccggagttataacgttggattacatccaaacagcgagaaacctggcagatcccttcacgaagggactatcacgaaatgtgatagacaatgcatcgaaggagatgggtttgagacccatatgagttatactatggtggtaacccagtctatgtgatcggagatcccgtgaattagatcctgggaagaacaaaccattagtaaactagaggagagtatcaatatatataccctctccaagtgaagatgcatgtactctcctgagctgcaaggcaggttggctatgccttaatgagttctgttgactttaattagcaaagatgttgtcctgcagagcattcttgaaagaactcacctttgtgagcttgactgttggtcgcagtctatgaagattttgggtgaatcttctaggaagcttactaaagacctaggagtatgacttatacgctccacccgaggggtagtctacagacggtctagtaccagataagactttgagtgaaacttgcttgcacaagacttgcaattcaaggcgtagtccattgttcaagttgtgagtaagtgtagcttggaattctaggtggatgttcaaccttaattggtctccatcgaaccgctggtatataaacagtacattggaaaaggcaaatctcagtgggattttgagatttggtggaggattgttggaattaatgaatgggccttagcccactcgaagattaattctttggaaaatcacaaaagcccacctcataggatggcatgcatgtggagtttagtaccaccttgcttattctaggagagggggaccttatgaaaagggaggatgccctcctagtcacttgaagcatgtgtggtggagagaagaggggaaacacacgcgcgcgctcgctcgcctcgcctcgcctggcctggcagggcaggcggcgcgcgtgcacgacgtacgcgtcgaaaggtccgaaaaattggctcctcacccttgcgcagatgcagcctccttttgcagttttgttttgctgcaaattcggattcgtttttgttttggaaacgttccgaaaaatccggtgcgtgcaaacggcgtggagtccggataagttacgcgcgacttatccggttcggttacgtgcagtagagatcgtgcgggcgccctgatcaagcgacccttctctatataaaccgacctgccgtcttcacgcagcacacgcaaaatcaatctagggtttgcctcctactctgtactgcgccgtcgctcgtagactactccatcccgctcgccggcgtgcaccagcgatcgagagagcaggtctccgaaacctctgtctttgacgtcctgcaccgggagaaggcggcaataaggtttttgggaagcgcttcgcgcgactgctccctgttcgttcgcgacggctcgccttcctcttcgctcgcgtgtttcgtgccttcgtagacacctgcgaaaagtttcgaccaagcagctggtcttttcgtcaccttggtacgtgttcaatatgttgcgcatatttgatctgttcatgttatactgtgtagtttacatgtgtagatctaatgatgcgttcatgctagtttttatttataatgtcatgatttatttatggaatagattaaattattatatgtctataatctcaacaccaagtacgtaggtcttggggcatttaattttgatcgctatgaacaaccagctgcaaggctgcaaccaccctttttattattctgtttttaactatttcctgaaaaaaaaatgaattcttggaccaaccattatgaaatgacattataacagctgctataaatggaggctaaaacagatcaccagtggtgctgaggtacggttcggttgattgatgagagagcgatgcatcatgcatgttgcagcttccatcgagatcttgtatcaaccgtggcaaaccaatcatatatgtgtaatctgactcgacttgatctctttctgatgccatctacgaatggaaatggaagccatcaggaaccaaagcacaataggattccaatcaaccagatcgtcgcccacagatggcggtagagaacgcagtttgctatggtacttatgcatcagtgggaggatgttcggtttagcagcaatgctctcactgagatgctcttccccactctgcacttcatctgctctattcaagctcgttcgatttctagtatttttagttatgcatggccagcttggcagtttaggagatgtgataaaattatgccggtaacttataaattctctcgttacaaaacatgtttaaaccctgtattgagttgagtcaaatttaccacgagaactgcattatgctctgctgcttgaaatttgaaactataatattcgagaaattgacataaatatctagttaaagtcataaatattgtctggaactcgtcagaatgagttttgtgttattcatcaaaaagcttagaccggaacatccaatacaaattaaccaattgaccatcgatatccaggcctatttaaacactcctggcctctctcttatccaggcctatttaatgaatgtgaattgagggagttgagaactccgtaactttactcttattgcgcgtatatgggattagaagctgttgggattcaaatgacgagcaaatcaacaaaagaccatagcaagtgagagataaacaggtgaccaaacttcccttgacagcaaaagcaaggcacaaaagattgaaacaaaaccagacaaagaatcaacgcccactcgaaagttgccaaatttttagaagcaatgggagctgaaatatttttttatttgtaataaacacagcaccacatcatatgatgcatgaccctctgttctcatgtcctttcttagagttaacgaacacaccttgcacatgatttatgcactaacctttttttcttctttcactacgttggcccagggtatttgttatgggccaagactctcagctgtgacgggaggccctcgtcatagataagtggtaactaatgagtttgagttatctgtgtcagttgaagacctgtcacagaggaaagagtttgcttggatgggccgtaaccaaaacccgtcacagttaatataacattcatctgtgacgggtagtcattttaacctatcattgatgacctttatctatgatggacacactttttaactaacttgtatttgtgatgtgacataattttgggacctatcacagacatgaaaattgtaaaagaattaaaaaaatgctgcctgcaaaccttcatctgggcattcacaaatcacggaaatgtttacaatatcacaattactttcacattcatctgggcacagaacaacatcacaaccacattcacattcatctttgcacaaaacagaatcacaaaaataatctggacactagaatcgaaaactcttgccattgatggacttcgttgctgtactggtgcatcgatctcttttgccatgctcgacactagtggaggagtgggccgaaaaggggcaaacaaaaatgcatagccacattactaaaagacgtacccaagtttaacttttgattaattctgccttttccgagcagttcacagtgtatattgaaagcagaactcatcccaaatcagctacttaattccagctatatataacactgtagctcttaatgcattgcccatgtgtgttgtcgaacgaaaactgcgtcacgtcgaagaacgtggaacttggatggaggctttgagcagtaaagtagtattgacttcatagaatttttgtggatccccccatttcatggtcctagggggctatttataaccctagtacatactaatatcctctagggttgagttattacgaggaaaattacatggttacccttatgatagggacattacagtgggtatacaaggtcttgttttacattcgtgggctctgagatggtcttcctgggccggcctattaggtggcgaagggccccccatggaccaccgagctcctcgagccctatgaccgaaggccttcttcattcggggcttcggcttcatggaatgcttgacgtccttcgcccttggtgagcctttgtccggttgttgggctttgtggcgaacctcttgatcaggcttcgcctggtgctcgatggtgaatcccttggtcttcgtccttcggcttcgcacataggacttggccgatgttccgatagcctagatggcttgggtgggttggctggatgccctcatgacatacctccaacaatgtgcaatgcagaagtgatcatcaatcagctcagctaatgtatctcactgatcatgtgcattgactagaggagagatcaccggtgctgaggtgaagttgaaggagatatgtagtgcatatacaccatgtcaccatatattccatcaagcatggctaccatccgactaactttgatttctttccaataggaatggaagtcattaggaaccaaagctgaacagccttaggttcacatgtcacacagtttagtcatgatggattgcagcagctggagcatctctggaagtgggaactagtacacattatggttgaggagacaagatgctacactggtatagcagcatggacagcttgggtctacagcacctgatcacgacttttcgaccgtcgtctgcatttcgttctctctttcaagttcttccatatattcctacagtccgagaaaggtcttggtaaatcactaattagagcttgcattaacattaactcgtttaccatgatagcagtgcaagcagaatatgcaatgtggaagttcagactatgattatttcagctaatcttaatttagcatgactactgcactatgagctgaagcttgaaggtcgatttcaaattcaaaacgattagtaaattgtgttcatggtacatgaacttgcatggtgggtgcaaatatatatacaactaacttattactcttttcgatacaatacttacctagtccaagcgaacctgagctaaaacaatctctacaagcaaaattgatctaatgtgacacatatcgacgagtaattttattatacatcaaaatttagaccgataaaatgtgcaattattatttgctagatattttaaagatttagattgacaaaaagtgagacaataaaatatgcacaaccatgaaaataaacttttaaaatatgttttcggtgaaacagagtatctgacaatgaaaattaaaataactgtacatataagcgtatctgagcatggccagaattttcttggtcctgacgtataagtgtacattataaaagttatatagtgttgaggaatgcagttccaatcctacgataagtattgataactctggatttggtagaatcttgacacattcaattgggtttccgatcaacacgatccaaaccctacattcatagcatcatgtcttctctggttatcaatcgttagctactcggttaacctcgccgagaaggctgctctctacaagcgaatcaaagaacacaaataagaagaaggtagattgtaatttgcatgtaaatgattaagcacttgaagttgggattccacgaaccatactaacgggaaaacatatataaataatctaagcaaagaccaactcttaatgattacgactacaaaaataatatgatttcgaatgtcctaggcactactacacaaaagattttccaggactagaacttcccattttcccgtgcggagctttttcgcatgcgtatgtaaaaatcggtctcctattttcatgtgtgggccttctattttcacgtgcggatccttaagaggcccacacacaaaaatcgattttcacatgcggccctctaaacagacccgcaaagaaaaatacacaattttcgcatacaggcctcctaatccactctcacaggaaaatatccattccctctcaacctattcgaaaaaattcaaatttccttctgtctctccccccggccccatatgtcctctctctccccttttaattatcttatcctcactttccctctctgtgtctcccctggcccccttctctcctctctctctcgcaccttctccttcttctgtggcgccgcatccttctccttctgctccggtgcgatgggagccgcgggctaggctgcgggctagttcggggcggtgggtgcgaccgggagcagtgggctgggtggctgcgaccgggctcgtggcggtgggtgcgtccgggagtggtggggtgggcagcgggtgaacaggagtggcaggctcagcgatgggtttgcagcggcgggcgactgcccccccacccggatccggtggcggcggccgtcccactcccggatccgtgcgcggtggcggcggcacgacggtggtggcggtgggtgggctcgacggctttggttgcggcggccgagagcggcgagctctggtggcggcggtcggctacggcgacgggcgtttctagggttagggttagggtttatttatttattcattattttttatgtttggatttttttgttgcgtgtgggcggtataatttgaccgcacgggataatcgtttatcccgtgcggtccacttaactcgaccgcacgagaagattattatcctgtgcggttgggccgtccgcacgtgaaaatatttattttcacaaacacttggctacagacggacaaaacctccacacggaaaaaatatttttttgaccgcatgaaaaaatccttcttgtagtagcgagggttgcaattacaatgctcaaggctcaaatcagactcggatcggactagatagggtatgtggcttgttttgttgatttctaccagcattgtagaaattttgacgtgggatcagaaccatttgaaagtagacttcataagttttccaacaagtattcatggccccgaattccttctagatcagcagctaggtttatttgaagttgatgctgttaggagacccgaatccaaatccaaaatgtgtagaacttcatctcatatcttctatggaccgaaagtgatgtggtgatgtaggaataggcttggggaagatcttggtttggttcccaatcaatttctttgatcatccaagcacttcgtgagcccgcactccttttgttcatccacgcaaatatttttgccaacgaaaagatagaaaactcatagcgcaataacgattgttcaaatatataataagtaaatgcaatatagaatatatgcacctttaccttgttgatgtgtaacataagcatgattatatccacatcctaaagagcataaaatttttccaagacatgaaataaattatgtcctatatatggaaaatgaacttttgcacatctggtagctcttttttggattccaaataagatctccaaaacatggtcatacatgtaagctaccttgccatcagtttgcgatgctacaacgattttatttgtattgataatttcggcatgattcgcatggactagcaagttactgcaccagaatgagcaatttgcaacttgttgtatgttttttcacccaccagcaagttcttgtactgtgaacgcaatttactcaagaactattaataatatcaacttagtgatgagaatatttttattaataattaagcaacacccagtaaacactttgcaacagaaacattaaaatcaaggctttactgattttgttaggtacggtcagaactcagaagtaaaggttccattttgcgatctgcaatgctcataattgctctgctaaaatgttatgccaatattcataccgatcgatagaaactataaattgaagaccagaccctagaaccacacatagccacaattgcccccatctagcaaagcacgccatctcccagtcattcaagtggtggtgtttacgtatataccattggaatagaagtcatctggaatgacagtgatactacgcagctttctctcggcaatcctgttgcagaggtgtttggtttaagaatttacattacatagcgcctttttagtactataaaattgtcatcttaattctgtgaatagtaacacttcagttctagctcttacatgtgagctatgtagctatatatccatagttataacgatcagtcatttctacctctacctcattcagaaattgtatttttttacaggtgtagacgcacagtaaagaagggcgcctaaatcatgcttcaccactgtctggatcacgagttaaaggagtgcaggtatatatgggccttgctgaacatgccccatgttacagtgcattaaagcccaactgaaacgtccgggctgaattttgggccgaagtatcagtcatgtgattgcgaaatcatcttcactaatgatcaactagaagatgcacattatgttgtaaacgtctgtgtttgtaatgtgttttaaaagaaaaaatagaaatgcgcatatgatgcacacaccacccttttagcacacgctcaacatattatggtatcactaaatttctttcaaatgtgcacctatatttgttaaaaggggcaaacaaatttgtagcccttacacgaagaacaagcaccatttctctggacaattgtttaacaataacaatttgtttggagagatgccgcatgaatgttataataaaatagtttagtggggttatggattaatcaatggcctctctggagcctgacttgaaggaggaactactctgttcaaaaaagacaaatctttgctacgaatctggacacatatttgttcatgcttgtagcgaggattgaattttttttggacggaggggtacactcgtaggtatttacgtgtttgattttgtggtgtgctcacgtgtccaacattatataactgcaaagaaaataattgttccctcttagagcaccaatcaacaataaggtggacatatttttttaaaaaatggattgaacatgcatgtttattagaggataatatttgatccaccctctatttctctgtgtttttggtgatgttaataatgtcattaatcaagtaattaattccagtgatatactcgctccattccaaaatatcaagcacaacccttaacccaaaggtcacgaaacaattattatcatcttctcatctggatcacctaataaatgaaatgtatgcatctaatagaattaatgatctcaggaatgaatgattttaaaaattaataatttagtgaggaggaggtgttagttaattcatgcatgcatgcatgccttgtataatgaaacatctagaaaggtagttgtgtcttatattttagaatgaagtacttcttccgtttcaaaatgtttgacactgttgactttttagcacatgtttgaccgttcatcttattcaaaaaattttatgaaatatataaaattatatgtgtacatgaaagtatatttaacaatgaatcaaatgatatgaaaagaataaataattacttaaattttttgaataagacgaatggtcaaacacgtactaaaaagtcaacggtgtcaaacattttgaaacggagggagtatataacatggtagctagctctgcaggcatgcattggccatgtagaaactagacatgatcattgagatggagttcgaggagaagataacattggaataaagagtgactgaaagagatcacttgtgctagggcttcaatcaaacatggtgttaaatatgtgatcgaattttaggcccacgatatattcggattagtttcctagtaggagtcctattaggtgtctttctattatcccctatatatactcttgtaagccgtacgggaaggggtgacgttcccattgtgattcccctacgtttgtaatcatctcctctatagtgatcattgccggtcggcgcccgtggttttttcccgcaagtgttttccacgtaaaaattcgtgtctccgttgtgcatctattttcataacaagtggtatcagagcattggagatcgatctactgcagtcccggctaccggcgatttttcccgatcgaagaaatcgatctaatcggtggcacgcgtcgtcgtgttcgtcgttccgtcgaatcaatttgttcggccccctacctgtcgactccgagtcggcctcgtcccacgcctgcgcgagaagaaaaggcagcaccgcagcagcagccgttcaggcgtcgtgagaggagtactacaagcagcgcacgcgtcacgaggattaaaataatcagccgagagcttggctgttctgttcaggctttttgccaaggaggaaattgctaagcgcaccaaagcttgtgtaccaggaaatctacatacttcgctttgtgcacacaggaagtgcaccgaggtttcgcgtttttgctagtttaccctaatttcttaccagcaaattcaggattaattcccatggcgagtttgaagtatgatctaccgcttttggaccgagacacaag

SEQ ID NO: 4108 - DNA, 2003 bp, Oryza sativa
catatgcaaacttcagggatactatactttatagccgtgatactctaactttgaaagaagtttatgatactttgcatgccaaagaaaagatgaagaagatggtaccctctgaaggttcaaattcacaagcagaaggcttggttgttcggggcaggcaacaggagaagaacacaaatagcaaatcaagagataaaagttcaagtagttaccgtgggagatcaaagtccagaggcaagtataagtcatacaaatactacaagagagatagacatgatatctctgagtgttggaagctacaggataaagacaagagaaccggaaaatatgtaccaaaaggtaagaaagaaaaggaaggtaaagccgtagttgttactgatgggaagtctgatgcagaattgcttgttgcttatgctggttgtgcacaaactagtgaccagtggattcttgatactgcatgcaccaatcacatgtgcccgaatagggattggtttgccacctatgaagctttgcaaggtggtactgtttttatgggtgatgatacaccatgcgaggttgcagacattggaacagttcagatcaagatgtttgatggctgtatcagaacattgtcagatgtgtggcatattccaaatttgaagagaagtctcatctctttatgtactcttgatcgcaaagggtacaaatattccggtggagacggaattttgaaggtaactaaaggctctcttgttgtgatgaaagctgatattaaatctgccaacctgtaccatctgtgaggtacaactatattaggtaatgttgctgcagtttttgattcattatctaattccgatgctactaatctttggcatatgcgtcttgggcatatgagtgaaattggtttggcagaattgagcaagcgaggattgctagatggacaaagcatcgggaagctcaaattttgtgagcattgcatatttggcaagcataagagggtgaagttcaacacatctacacatactactgaaggtattcttgattatgtgcattctgatttatgggggcctgctcgtaagacatcttttggaggtgctcgttacataatgactatcgttgatgattattcgcgaaaagtttggccttatttcttgaagcacaaatatcaagcttttgatgtgtttaaagagtggaaaactatggttgaaagacaaactgaaagaaaggtgaaaatccttcgtactgacaatgggatggagttctgttctaagatatttaaatcatattgcaagtctgaaggcattgtgcgtcactacaccgttcctcacacacctcaacaaaacggcgtactgagcgtatgaacaagaccattatatcaaaggcccgttgtatgttgtctaatgcaagtttgcctaaacagttttgggcggaagctgtttccactgcttgttatcttgtcaatcgatcacccagttatgccattgataagaagactccaattgaggtatggtctggttccccagcaaattattcagacttaagagtatttggttgtactgcttatgctcatgttgataatggtaaattgtagcctagagctattaagtgcatttttcttggttatccgtctggtgtgaaaggctataagttatggtgtcctgaaaccaaaaaggttgtgattagtagaaatgttgtcttccatgaatcagttatattacatgacaaaccttctactaatgttcctgttgagagtcaggagaaaacaagtgtgcaggtggagcacttgatcagttcagggcatgcaccagaaaaagaagatgttgctattaaccaagatgcacctgttattcaagattcagattcttctattgttcatcagtctcccaaacgttctattgcaaaagataagcccaaaagaaatattaaaccacctcgaagatatattgaagaagcgaacatagttgcttatgctttgagtgtggcagaagaaattgaaggtaatgccgaaccttctatggggcgcagga

SEQ ID NO: 4109 - DNA, 645 bp, Oryza sativa
gtggcgtacataagtgaaccaactgcacttgaataaggaactctagacatgtactcaatatcataatctgactgtggacataaatctgaagatgatctgaaatgtgcagctaaaggagtactcactggttttgcatcatgcatattgaaacgacgaagaactttttcaatataacctttctgactaagatataacttgccagaatgtctttctctagtaatttccataccgagaattttcttcgctgcacccaaatccttcatctcaaattcactactcaattgtgccttcaacttttctatctctgatttatcttttgcagcaatcaacatatcatcgacataaagaagcaaatatatagctgaaccatcaacaactttaagataaacacagttatcataattggatcttctaaacttctgagaaagcatgaaagagtcaaatctcttataccactgtctaggtgactgcttcaacccataaagagatttcttcaacctacagactaggttctcttttccaggaacaacaaaaccttcaggttgctccatataaatgtcctcttctaactccccatgtaaaaatgcagtcttaacatccatttgctctagttcataatcatgcattgcaacaatactgagtaaa

SEQ ID NO: 4110 - DNA, 4516 bp, Oryza sativa
cagtggtttttggatgttcactaataagcctgcactactaggatgggagaggctccctagtgtcgaaaacactcggtaacaatgccaggacgctaggtaactacttcaaacacccagtaataatgttgcagagtggtacagcacgcccgggagtgatacgaggttcccgtgctgtctttcggtgtgttttctgaaaaaacactccgtaacagttgggaggttacggagtgtctacaatacactctgcaaagttccactaacggcatgatgactatccaaacggagacactgagcttcccgagttttatatattgacacgtggacataacgggtatagccacgtcaacagcacgttacggtgtgttcttagctgccactctgtaatatcaaaaatcattaccgcgtgtccttttgcttgcaccactcgggaagcactaatagaaccattttttaaaaaatatatgcatttgctagttgagggacactaacagtgtgtagatgaaatcttaatcaacttgcaataaacctgttagagcataaatacattcaacaaggtaaagtattccatcagtatgttatattgattgacatgcaaatgtaataaaaagaagaaatattcaacatacatctcgatctaagcatgaaacaatgtactagtcctacagaatcctaagaaaaccgcaaaaaacagcttaagctcttcatagttgaagcaccatcctgaactctatcaagaatgcaacacacaagaatcatgatcaagttggcttgttggagtcttggagaccataacccactgagatccaagggcaatcacctaaaataatatataatggtaaagttgcatcaagtatcatatataaccaaccagcagtaactgcttataacctaatctaagaacaaaatggtatgtttcaaaatagacaataataagtaaccattattcatagtacaaggattaaagaacacgattgagaaatagggtggagtatcctaaatagttgtcactgtgtcaacaacaaacttcactatttattcatctaacgagaattgacaaacatgctgatgttatgatttggaacaatcttaaccagttaacggttgaacggttgagccagccaaccttgatttgtgctacttatagggtagatagcacaaaaagtgcaacacaacaaatattgaagttcagactttgagagatgtactaactaaaactttaagagatgttgtaaaactactaagttctctatacgttcttacctaaatttatccattggggaagctcccataagcctcacgttgatcatatctgaaatcatgagaagacacttaaaaatttgtgaccaggagaatggctagagtaaataaaactagtggaccataatgtttgttattgagagtagaggatttttttaacctcgcagcagtaaacatcatagaggatacacaatgacggagaatgcatcattacctttgaatttgtgaacaagttcagccctactaagtatagatatgcttgaacctacagaagtatgcttccaggagcaaactgctgcatcaacaatgaaatgcatatatttagcatgtacattagcatcagattattgtctaaagtttagagtttaaaccacataaaatacaacattcttaacaaattttaaattcccttgcataaggccttgttcactttggagggtactaaagatgattggagggaaataattccacaccccagtaggtgtggaataaatcccctcaaatccctccttgggattaactgaacaaggcctaaaatgagccaggattcttgctataaggccatgaaatactattattaatagcttttcaaccaaaatgagacataattcttgcttttgaataatttgcatataataattaaaatagctactcttcagggttacgataagttcatcctaaatgaacaatatcccttggtaccacgtttaagaatgatgtacaacaaccacttgaatgattttagattagcattgtaagtagggatagcattgtaagtagcgcactaggcatcagtcatatccactgcaagcacatgataatcacaggatgcagagtccgaaattatgtactcaccttgtttttcccaaatcactgcatcatcccagagctcaggctttggcaccaccctctgctgcacggctaagaatgctcggctactaccgtggatccacctgtctatgcaagcgcattaaagcttgtgcccaagccactaattgagtcaactaataatctccaataacctgtcaggtaaaaaaaaacatcacagaagtacatcataagaagtattttcttaattttattaggcagtcaacttataatacagggactatttgaagaccattatgaagcaatttcactacactacaagccatccagctcattgttgataccaatgtaagtagttagacaaattattttaatgtggcttgagatgccaaagaggactggtcgctaattgacttgctaagcaggtcttgctactgctggtggctaatgatgccgcagctataatgcaaatggcgggggaggaaaaggtcttaccttgcatggccaggaggcgaccatggcggatctcggttgggttgcttgatgagggggccggtcgcggtagatccatggcatccggcttgaggaggagccacggcggaggttcaggccatccgacttgacgaggggacggccgcgcaacagatctaggatcccaggttgagggaaaaggacgcggaccggtgctacaccggcgttggttggggaaaagaggaggaggcaccggcgtcgatgccggccacagctatagctcgagaaggtggcgtaggcgttggtcctcgttgcagcttgaggagcggcgagcgggaggaggctgcggtggttcgggagagcaggcgaatgggggtggcggctgagagtgggaggagaaaggggttggtgagggtgctagggttcggaatttatatatgaaagggcaagcaaatttagatcgttggatctccatccgatgtacacaattaactggcaggtgggccccggtttcttcacatgttcatatcgaatggttcccgagttcctttatatgatgagactcggtaagttttccctcaccgctagtcccactggtcaacgtgctgcatcggatggatggcgtctgacgttccctggtgtaactcaccaacacacggtaattctccttgttacggggtgcctacatggaacacccggtaagactgtagtgttacctagtgccgtccatttacacccggcaacttacctagtgtcatagaaagcactatgtaaccttggaagagactagggagagtctcccgatctagtagtgctacctgggagttgaagagatgtaataataaaattaggccggtaactaattaattcttgttataaaacatatggtcgagggcgaaacccagtgttcttaagtgtagaagtgcttccacatgttcaaactctggttggagttcaatcaaaatttgagtgagcactgcattttgaaccgatgcttgaaatttggaactgtaataccggagaattgacaggaaaattcagttaaaaatcataaatactggtctagatcgacctcatcaaaatgaatttgtttatagcacttctcatgaaagagttttagactggaatgaacaatacaaaatggccatggatgtcctggtgcaccgaaacatatgtgacacaacaagaattcgtcaaaacaatcctataccgaatctcttccgaataccacatccattttatacttttttgtaggataacatctccattcaatgctaatcaccatataaactcaaggctacaggcaacagatcttaacatatgaattgtgagagctaagaggcacttgatagtgcagtggtaatgggtatgtggtttcaactttgaggtcccgtgttcaatcccaacacgctcacaattcctcgaaatctctcttttttctttaatcgtgagagttgatcaagaatgtgcagaatcttgctaccagcaaagagcagcagctatctatgatgcatggaaacaaacacaaacagtgtgggcatggagggcatcaaaactactatacggtcaagctgtttacttcatcctgtgtgatatctgcccatctcccggatgtgtagagcttcccctatttgaatcatgaccaaagattagttgttgaattttatggaaattgatgtgattgacatctcagtacatctagtagttttatctttgcatatcctcaatttataggacatatatataagtatgtgcaattgccatcgctatcaaatgtaacttgaaaaaggacagatattttaagtaacttttatttgtgatggtcataattaggatccgtcacagacagtaaaatgagtaaaataaagatgtcgtctgcttagctagtcacggacctttatatgggcattcacaattaaaaaaatatatctaagcacagtcacattcatttgggcatgaa

SEQ ID NO: 4111 - DNA, 3490 bp, Oryza sativa
atatacctattgcatttatcactctttctcaaataaactttagcacaaaattaccaagagaattcttttttaattttttcttttcttgagcctttttgctcatattttctcttttattccgggtacgtccctgtcgtcaagactgtttccatgaattcggtacccattattttgctcacatcgaatacgtccttgtcgtcaagactgtttccaaggattcggtattcatttttttatattttttttctcttgtcacaatgagcaattaaagctactagaggaataacaagtcaataaagcatatatatagagcatttatagatcaaaccatatgctagcatcaacattgcttatttgcttaattcaagtagaatttaagtgtcatgcatcatctcccttaaaagcaaaatctaaatctcatgaaaagactagaatacatacaagctatgctagagataaataaaccttcaaagtattgctagcatgcacaagaaaataccataagcataaacaaagctctcttttctcaatttttctcattgtcatattattgcttgataaaaccatgagttacaaactccccctcaaaccatgccaaaaggatgaattattcccaattcaccacgaagaaaagcaaagcgattagaatccaaaggctcagtgaaaatatcagcaatttgcaacttggtgtccaaaaactgcaattcaacatctcctttctcaacatgatccctcaaaaagtgaaaacgaatatcaatgtgctttgtgcgtgagtattgaacaggattcttagcaatattaatagcactagtattatcacaaaagagaggtactttctcaaaagtaagaccataatctttcaaagtagataaaagccaaagaatttgtgaacaacaactagcagcagcaacatattcagattcagcagttgattgaccaacactagattgtttcctagaagaccatccaatcaatgatgtacaagaaaatgacatgttccactagtacttttcctatcaattctacaacctccaaaatcagcatcggaatatccacttaagcatatagaagatgaagtagaataccaaattctaaactcaagtgtatgattcaaatacctcattattcgcttgaccgcttgacgatgtgaagtacgaggagaagcttgaaagcgtgcacacaaacacacagcaaattgtatgtctggcctagaagcagttagatacaacaaagatccaatcatacttccatactctttttgatcaacaacttcaccatcttcatcaggatccaacacagctgtagaaccaattggtgttgaaattggcttgcaattctccatcttcaaccgtctcaaaagatccttcgtatacttcgtttgatgcacaaaagtaccttcaggtgtttgcttaatttgcaatctcaaaaagtacgataactcacccatcatgctcatctcaaattccctgcgcatagtctcagcaaaatctacaaccaaagcatgagtcgaacaaccaaagatgatatcatccacataaatctgaacgaaaagttgattatcaccatgcttaagaacaaaaagcgttttgtcaacctttcccattgtaaaaccttttgcaagcaaaaagttcttaagcctatcataccatgccctaggagcttgtttcaaaccatacaaagctttagacaatttaaaaacatggttgggaaaatcaggattttcaaacctggtggttgtttgacataaacttcctcctgtataaaaccatttagaaaagcacttttaacatccatttgatacaatttaaaaccttttgaagcagcaaaagccaacaaaagtctaattgcctcaattctagcaacaggagcaaaagtttcatcaaaatccaaactctcaacttgagtaaaaccttgagcaacaagtctagttttatttctcacaatcaaaccatcctcatttagtctatttttgaaaacccacttggttccaataatattatgtctagaaggtggttcaactaaagtccaaactttgtttctctcaaaattttcaagttcttcatgcatggcgttaatccacgattcatcagttaatgcatgtaacatatctttgggttcaaaagaagcaacaaatgcggaatttgcacagacaacatgagtcgttaccttagaccttatagtccgctcacctatattaccaataatttgttccagcggatgtcgtcgttgaatgtgctaaggagcagtgacttctgaagttgatccacgttctgtatcagtactggtcgaagtcgtagtctccggaggaccatctcaatcaggatcaacagtacccgaacccgacgaacctggccggtctgaccgctcctcattggccggtctgaccggaggtgtgccggcggtctaaccggcctggcgcccggtctgaccggccgagccaacctcggcgtcgtcattgtagtcgctctcgtcttcaaaaaatacgaccatcctctccctgaacctgtgacagtgtacctgcaatttcgggtctagtaccaggactagcctcatcaaaagaaacttcgcaagtctccacgattttgatagtccccaaaataagtacacgatagtcacgagtgtgtgcagggtaaccaagaaacaatccatcggtagaacgtgcctcaaacttatctaaatttccagatttcaagacaaagcacttgcaaccaaaaacacacaaatgtgaaactttgggttgatgtccaaatcgaagttcatatgaagtttttccaagtttagatctcatgaaaactcgatttgaaatataacaagcagtattaattgcctcagccccaaattttctaggagttttatattcgtccaacatcgttctagccatctcaaccaaaacacgatttttcctttcaacaacaccgttttgttgaggaacatgaggagaagaaaattcatgttcaagacctcttccgttgcaaaattgttcaaataaagcatttttaaactctccaccattatcacttcgaattcttttcaaagaaccaggaaattcaagatccaatcgaagaaacgaaccacgaaagtgttgaaaagcttcgtccttagttgccataaagaaaacccaagaatatcgagaaaaatcgtcaacaataaccagcacataccactttcctccaacagattgcactctagctggaccaaccgtgtccatatgtaatagctgtcccggtgcatccgtcatcacaaaaacaataggagcatgtgaagtagaatccatcttagcatgacgacacggtgtacaaaccaaatcaagatctttcttaagtttacgcaaaccacgaacaagatccaaaccacttagcctagtgagatgatcaaaaccaacatgtccaagtctacgatgccaaaacatcatatctttatcaaacttagcaaccaaacatgttatcacaggtgaaacaggattttcaaaatcagcttgggctgcaggaat

SEQ ID NO: 4112 - DNA, 12678 bp, Oryza sativa
ggcccgggtttagaaaaggaattttttttcttgaaaattaatctaatagttgtaaataatgggtccaccaaatttaatgaaaatatgattattttagaattttaagaatatttcactaatttattagagcatcacatggtaacttagaagcgtttgtaggatgtcgtaggacgaattaggagtatttttggaagtttaatggacttttagacatctaatataatgttctaaaacatcaattgggtcccaatttaaatgaaaatcgacggtgatatttatgtaaagttatagagtacgatgttttaactttttctatatgtacgtgtaagtatatatatatatatatatatatatatatatatatatatatatatatatatatgtgtgtgtgtgtgtgtgtgtgttctttcggtgtttctctgatcatgtattaagtacgtataggagtatgttctttcgggtttatctgatcgtgctatactcacgtatgtactcgcatgtctttttttttcggttaaagagtagcttaataataggattagaaaaaggagggaaaccggggatcgatggaaggggaggttcaacgaaaaatttaatctaatggtgtaaagtatcgggtccaccaatttaagtgaaaatcaacggttagatttgacagagccacgtggcggcataggagcgtttgtaggagccccacgtggcggcttgagagcgtttataggaagttttatggacttttagtatataatagaagatagataaactttaattactgtccaggtgcttaaaattctaccgaagctccattatcttagattgacaaacttttttatagaggaaaaaaaagccaggagctcctatttactgaaaacaaaatcgcggtacacatgttagtgttacaatttgaacgtgttgggtggtaaaatattctgctatctttgaattaattgttatgtacaaagagaccccatgactacacaccattcctgctataaaaaggagccacatatgttagttctttgctttatcgtcattgcaagcaatgcatccaacaattctggaacttactttatgcagctggaggttaattataggaatggaagtcactaggaaatcctgcttgtaacgccacataccgtagttctctttatgggtctctgtaggttgtgtcatcaatcttattagtgtccgaaatccccttcttccgcagattggggagcatgcaaaatgctcctctctgcgatcgtgatctggtcctagagaaatgcccaagtcctcttttgctaatgagcgatatccgagcatggtagctagcggaaatttacatggacggtgcaaaatgaagagtacgaggaacatattttgttcaaacagttcctatatattttttaagtacgaattatccccctaaaccataaaaccagatattttacaccctcaagttttcataccgaacaaataaccctcctgagcactgttttgaacggttttggcttgagcttgtacacgtggtaccaatgtgacaatctagttagcaaagaaaataaaaaaattcccggggcccacatgtcatacatatcccaccgcaccatcttgcatgttctttctgtcgctcaggtagctggcagcaaaggtggacctcgctcgacgggcggtggcagcagcagagcaagctcgagtggccggagttggagacagaagtgaaggcggagctagctcgggtagtcgcagtggaggcgacgggctcaggcgaccccttgtgcacgcgcgcgctctctctctcactcaggtggcctgcggcagaggtggacctcgctcgggcgggcgatggtagcggcagagcgaacgccgccggcgacacgcagaggccgatgaggaagtagatgcttgggagctccaactcgaacgtcggcagcgtctcggtggtggaggtgaggaggaaggttagcgtgaaggcgaacagccccagccgcttgtgcgcgctggcctcgccgtagccggcgttgatgtagatggtctcgagcagtgtcctcacgagaacatactccaggaagttggtcagcagcagctgcttgcttcggtacaccaccttccacgcccgcttgtacaggaccaccacctcgtatatcctcgagcacggcgaggttgacgacgacgacttcgaggacgtgacggtggcgagctcctccgtcgtcttggtgttaggaaacgataagccaacaaacgataaaaaacaatagatcaattacaaaagacacgagatttaacgtggaaaaccctcctaaaacaggagagaaaaaccacgggtgtcagccagcaaaatatctccactctatctggggtgaggttacataacagtacccccagctaaaagatgtatataatggagaaaccatagaaaagatgatgatccgtttatatgaaagtttcagcccccgcacccgcgggcgtccccaggtgcacggcccaatgggccagcttcagcctccgctccactacggtagaagttggccttcattaagtgcaaatgaatttggatcacaactcaacaaactctaccttgagacaaattccttcttgtagcataaaacaatccttcaccctgaacacaacaaagaccaaaacactttcggcgccaaatagcctcttgggctaaaccattataccaactaagcttgagcaaggctcaaacttagcaacaggaacaggctttgtcatcatatcagcaggattatcttaagtacttatcttgcataccttcagcttaccttgcgcgactacatcgtgaacataatggtacttgatatcaatgtgctttgtcctctcatgaaacatctgatctttagtgaggcatatagcactttgactgtcacaaaacaagttaatgcaagaatcaactccacaaagctcagcaaacaatgctttcaaccaaactgattctttacatgcttcagcaatagccatgtaatctgcttcagtggtagactgggcaacaacaggatacaatgttgccttccaactcacaacacaactaccaatagtaaacacataacctgtgagtgaccttcttttatccaaatctgcagcaaaatcagaatccacatatccaacaagccccttatcagtcctgccaaacttcaagcaagcattagctgtgcctctgaggtacctaaaaatccactgaacagctttccagtgttctttactaggattagccatgtatctactaaccaaactcatagcatgagataaatctggacaggagcaaaccatggcatacatcaaagaaccaacaacactagaatatggaactctagacatgtattctacatcctcatcagtactagcacattgtaaagcttataatttaaaatgaggtgcaataggagtactaacaggctttgcatcatgcatgttaaaacgctgaagaaccttcttaatgtagctttgctgactaagaaataacaaaccagaatttctgtctctagtgatttccatacctagaattttcttagcagcaccaagatcctccatatcaaactcactactcaactgtttcttcaatgtagtgatttgttccttgctcttggcagcaatcagcatgtcatcaacatataacagcaagtatataggtgatccattaacaaatttaatatacacacagctatcaaattcagacctcttaaagccatgtgacaacataaatgaatcaaaccttttataccattgacgaggagactgttttaaaccatacaatgatcttttcaacttgcaaacataatcctccttaccaggtactatgaacccttctagctggtcaatgtatatctcctcctcaagctctccatgtaaaaatgttgtcttcacacctaactgctcaagctcaagatcatgcatagcaacaatactgaagaatgtgcgaattaaactatgctttacaactggagagaacacatcattataatcaataccagcaatttgactgaaaccttttgctactaaccttgccttaaacctcggaggctcgctaggacataaaccctcctttctcttgaagatccatttacaacgaacatgctttttctgttttggcaagtgcacaagctcccatgtgccattcttctcaagagactgcatctcctcctgcatagctgagatcgacttctcacggtctccagaaacaatagcttcagtgtatgtggctggctcaagagtattctccacctgttcagcacaactaaaagcataataaaccatatcacatttctcaataaggcggactggagctccacaactcctctttgttctgcgatgtgcaataggttcatcttgtggtgcaaacaggaggtgagtgctgaacaatatcattaatatcgttaccaacaatttcagtttcctgatcatccacgtgctccacctgcacgctaacatattgctgttcctcatcagaaccacctggtatgacatctgtgggcaagctgtcattaaacataatagattcaatgtaaacaacactcctgctcatgaatgtcttattagtttgaggattccataacttatatccttttactcctgaaccataattaagaaacagacacttaatagctctaggctctaattttccattatcaacatgagcataagcagtgcatccaaaaactctccactgtgtataatcagcaggcataccagaccatacctcaatgggagttttcttattaagtgggatagaaggcgacctgttgatcaagtagcaggcggtgttagcagcctctgcccaaaaacgcttgttcatgcgagcattggacagcaaacaacgagcctcggagatgaggttctgttcatgcgcttagccacaccattctgctgtggagtgtacgggatggtgtgatgcctaaggatgccttccttcctgcagtaatcatcaaaagcatctgaacaaaattcaccaccattgtcagtgcgaagtacttttacctccttttaagtttgcctttctatcatgactttccactctttaaaagcagcaaatgtatcatctttatgtttcaggaaataaggccacacttttctagagtaatcatcaataatggtaagcatataacgagcaccaccaagagagggcttacgagaaggcccccacaaatcaacatgtatataatcaagtatacctttggtgcaatgaattgaggtattgaattttacccttttgtgcttaccaaaaacacagtgctcacagaacttcatgttaccctgagtgcagccatccagcaggttcctcttcatcaattctgctataccaagttcactcatatgtccaagacgcatatgccataggttagtcctactagcttcatctttagaaacagcagcagcggtaacagaaccatgtaatgtacttcctctcaggacatataagtttgtagaattcatatcaccaatcatataaacgagagaacctttcgatacctttacaactccactgaaccggagtatttgtatccttctgcatcaagtgtgctgagagagatgagatttctcgccatccctggtatgtgtctcacatatttcagcgtgcgtgtcatgccatcatgtgtcttgatctgaacggagccaatgcccatgatcacacgtgggttatcatctcccatgcgcacaacatctccattctgcacagacttgtaagaactaaaccaatctctgttaatgcagatatgaaacgaacatgcagtatcaagtatccattcatcatgattagcaacacaaccagcaaaaacgacaagacaatctcctgaatcagagttatcagcactggtaacaacagaggccttaccatcagatttccttttctccttattctgcagattccaacattcttcaatgaagtgatttttctttttgcaatacttacataattttttacctctactctggctcttgtcatgatcattgctgtcgttgtaggttctccgctcaaatctgcctctgacctgcaatgcttcgcccttagaggacgatgcatcagattgaaccatacctttcatcttctccctgttttggagcgcctcatagacttccgctagggttagttcatcatggcttaaaagtatggtgtcgcgaaaatttgcatatgaactaggcagtgagcataacagtaaaagacctaaatcttcatcatcaaactgtacctccatcgacactaggtcggcaacgatctccttgaagaccgatatgtggttcaatacagaaccactctcctacaacttgtgtgagaacaacttcatcttgatatgcatcttactggttagatctttagacatgcagatcgattccagtttgagccaaagttctgcagcagtcttttcctgcaacacttcttgcaaaatatcattagatagatgaagttggatcagcgacagagccttacgatctttccgcttctcctcagcggttcattaagtcgatttcttcttcccgaagctttccagcacctcatcaagatccaaagtttgcgccagaacagcccgcatcttgacttgccatagcgagaatctcgtcttgtagtctagcagcggtagatcatacttcatcgacaccatcgcgaaaccctaatgtgggaacaagctctgataccacttgttaggaaacgataagcgaacaaacgataaagaacaatagatcaatcatagaagacacgagatttaacgtggaaaaccctcctaaaacaggagagaaaaaaccacgggcgccagccagcaaaatatcttcactatatctggggtgaggttacatcgccgcacggcggcttacaagaggtatatatatggtggaaccctaaaagggatgacgacccgctacggtagaagctggccttcattaagtgcaaatgaatttggatcacaactcaacacttgggctcaggggaggaggccgaaaggtagggcagctggtcaagcacctagcggatttaactaggagaggagcacggcgtcgagggagtcaatggagcagtggtgcatgacggcccagcaggagaggaggaggaggagggagtccacggcggagaggaggcgcgagctcggctggtggatggagagcactaccgtcatgccacgcgcggctgcgatggcgcgcaggcagccgacgacgacgtgcggggggaggaggagacaaggagtcgaggccagaggtgggctcgacgaggactccgacgtgcaccacatccgcctcccaaacttccctgcgcggcgtggaggcgttcgagcagctggcggccaagttctgcaacggcgtcaagcttgacctcacgccgatcaccgctgcgccgctccgctgcgccgccgagcgcctcggcatgtccgatgaccactccgacaacaacctcatctccattctcccgcgccgacaggttcatgtcccacaccgtcctgaggaaccccagggacgccatccgtgccctttggtcatgtgagggcctccttcccctcgccgacgacctcggcctcgtgtcacgctgcgtcgacgccattgccgccaaggccgccgcgtccactcccaccgccctgttcggctggcccatcaccgatgccgctgccggcgaccgtcccgcgctgccgccgcctccgcatcctgcggcgccgcccaccgtcattcacagtgagagagagagaggtagagagaaaagagagagagagtggaaaaggagtacgataggtgggtcctacattttttttaaataaaatgctgactggattgccatgtgtacactacgtacgacagaaccgctttggattggatcgaggggggtaattttgtcaagtattgaaagtttagggtgaacgatgtctggttttcgggttcaggggtgtatttcggtcgaccgggatagttccgggggggggggggtaattcgtacttttctttttttttattacatcgaaggggacagcattttaattaccaacaaagatgttgaatatgctttgttttacacaagtcttatatatatgctgagtaatcggagagttaatttttcagcctaatcttacctgcagtgcagccgatctgtggatagagtgagataagcaccgaaacatcaaggcatgagtacagacaagtttgataatattgacacttatgtggtattattacattgatattattgtacaaaggatcctttcataatcttccatgtacgtaaggctgaggagctcttttttttttgtttcacaatattggagcaatatatatatgaattcaaacattcactttgaaattataaattggacagtcgaataacaaacttcggctagaagtatgagggacgagcgctctgtgttcatggcaattacctatcctagcgataggaatgatcttcacaaatttgtcatggaaatggaaggcatgaggaattcaatttcatcgtacaaacggagaagattgtccgcgtttgctacaggaaggggagtcacttaaaatcatggaatgattctagccaggtgggttcagatgtcttgcaagaggatgctcatccatggccaaatcatctcagatctgaaatgttttagttcgctcgcgcgccttcttgctcctagtttgctctttttctttcacaagatatcgtattaattagtgtactgtattctaattagcatcgcagattgtatgctatacggaacatctcgacacatttgtatttttcgatggattaactttatttctttggggttaaattcgatgctgaatttgccttaagaggaaaagtagctacaggaatttgactacatatataatgctgtcatgtttggagtgattaacacaggccaagttaaatccataggaagagataatgatcgtcagcaatattgttgccacaagcattgggaaaaaaaacgtgcataaatcatatgagcaactgagaagaaatattttgtctctctgaattgcttggaggaagcgctctcacatgcactcactattttatcttcactaagatgtttcttgattgtattcagagtcttaatgctctgtttttgactgacaaaatatgaacacatgcctcggacaatcttattatatcacgtctttgcttcaaaattttgttttcaattcaacaaaaaacactccaattctattttgtgtctgctcgacaagcccaagcggccaaacagggttgctgggcggtggatccatccctgactatatgggtacccaatagtctgttataattcaactaaattagttcaaactcatatttttttttgttggaatacaaagtgaattgttcgcttttttcctcatcagcttaatcttttgggttgaactggtcggtgcacgcaactcaatatggtatcggagccgaaactctcgagttcgaatcctggctggcgtgcaattaaataaaaagtgcagccccttgaggtggcctcacgtgagggggagtgttggaatataaagtgaattgtccgactttccttatcagtttaaacatgttataaaaccagccccgaaatcacatcagaaaccaaaccgtggaagaaaacaccataggagatccaaacgcgatgacagcaccgaggcacgatatttgataaaggagttcagctgaggcctacatctccggggcactgattacggatgctcctccccgatccagcatattacagcgtctcagagttacaacgactgacgaccggacgctgccggcagtcgctccctctcgctatgctaagttgccatgcggttacaacaggcacatctctctatttatgagagatcataggacagagtccgaatcttactctagtcctaatacctattataactccaagttctaaactgtaaccgactacgtacacatattcgacacaaactcacacatatttgacacaaactctaacacgatcgttgtatctagcaatgcacatcctatccagctagatttaacaatcgaaaatgatttgttagcgtgttgtactggtatctcgaggttccttttagtgtaccggagcaaaatctcttataaattggacatcagaactcagaatttcacatagccacaattttgtctttgcaagcatagcacatcaggaacaatcattcaggtggtgatttaccataggaatagaagtcatcggaaatgctagcgatgctacacaaccacatccgagcaacccgattgtccaggtgctttgattaaattcaccatggcatagctaacgtttttattacaaatagtaagcttctgccgtgaataattttaataataacttaacttctctagatcttacagatgaactatctatccacaattaaacaatctgtcatttctaccattatctcacggagaagctctgtcttttttttttctataggatggcgcctcccagcagaattatgcctcatctgttttcaggttgggtcaggctacaactcagcaaatcgcccacccatcaaattggcctccaatcactcgatcatcgtctctaatatgcattgtgctcctatgtcgggatattgaccttcagcaaagaagtcaaattaatctcttataccgattcctaatctgatatctgaaacggatggttgggtctacaacattacaaagaaatacaagttctaatgccgagtttagttccaaaatttttcttcaaacttccaacatttccatcacatcaaaactttcctacacacacaaactttcagcttttccatcacatccttccaattttaaccaaactttcaattttgacgtgaactaaacacaccctaagttaaagattatgctctattttataacatgtagtagtagatttgttgtatcaatgcatgaaaaagtaccattttcaaacgaaaaatatacagatgaatagcaaaaataaagcaaaagaagatttaagcaccttatatagattcaagaggcctcctcactgtgctagattatcagtcacaaatcccaacgtaaaagtttggcatcaaacaaaacatcacatgacttttgtttctctcaaaattgtagcattacaatatggtagttaattgaaccaacggaaaatatttattagtaaaaaaaagggctaatcaacaaagaaaaaacaaatcaaatgaccatacaaaagaaattaaatcacaaatcaatatagaaaatatattttattataaattagatacacgatgttctgctctagctatgagctttggcattattaaatattggtgtggtagaaaccaaccaaaaagatttgtcgttacaaaaatgctcctagaataaataataataaaaaaaatcaaataacaatacaaacggaatttaatcagaaatcaatatagaaatcaaaatagaatgacggacttttacaatttacacagatggttgtgtgctctataagctgatccatgcctttgcgtgttctcaaatttctgtcatgccctaaacaatgttgacaaaaacaatggatttataattatctactaggggttaaaaaatatttaattttcttcagttacacaaacgggctaactaaaataaggcgcatcaaatgacacgccaattttctagttaaatctgaaattaaggtgagtaagtccaattatgtcttcaggaatagaaatgaaattaatatgttccaacatattcctaatgtggtacaacactgaaaagttgatagagatctactctggtccaacagtatgtatatcgagatactggtacctcacggtactaaatcgtttccgatcgttggatctagctgggtaggatatacattgttagatcaaaccttctgagcacaatgcgcaaatcttctttgtctcttcttgtctaatgatacggatagtccttatctatataaattaaaacaaagatttacgcaatttcaattcagcactagaattaatatgatggatgtgaatgaagcatattctcaaaatccaattagctcaacttgtgtagttaagggactcagaatgagagtgtgcttaagtgcagatcatcagaagccgtatttatgtgatcactgctctaacaatcacaatatttattgcatagctatttcaaggtctaactgtggtttcatagttatcaattgaggatttaactacattaattttgaagatagagtaggtatccgactgacccattttatctgcacccagtaccaggggaaggaacatttatctctgcacccagaatgggactgtccacatctacagactgtgcagtgtgcacccaaaatgctccctaggaataccaatgtcgtccatctttttgctaatgatcattgatatctaagcaacagatgatggattgatgtggtttcatgcatattccaggacttcaacctggtccccggctcctatttccattcatgtttatctccccgttaacattgtcacggccagataaactttacttggatgatgtaaaaatgaacatagagttgaaaatgcttctatggtgaacgaaacatagatgataaataaatgtcaatttcgatcagacacaactgttacatttgttcgatagcatccaaggaggtaacagtgtaccaacaaagatgtcgagatgttggatattaatgtcaataggtactaattgtaagctatagctactcttttccttgtggagttgaagacaagctacaggttctctgaatacactctgtatgtttgtaggtgttc

SEQ ID NO: 4113 - DNA, 8943 bp, Oryza sativa
aagaattcagttttcttttgtttcttttgagtcttctcatgttttttactttgccttctgtaattcaccttcttttcagctctttctctctttttaccttttatccttcttcttcccctgtactgtttccttcctctttctggtttgccaggtttatctggtattgaccaccattaatggttataaggtagagtctctctaccttttgcgtaaaaaaaaaatcatcatacgcttgaccagaacgagtgacctaaagaaccataggttacagggtgtcttgcaacaggattctgaaatctgaaatgcttggttcacttatgctccctgattctctgtatgaaaaatcatgaatatagggaaaatcatgggaagagataacaaccatcaagaatattgttattgtctcggttctatttgcaacaagcatttgtaaataaaattgcataatcgatatcagaaattggaaaatctttttttttaatcgattacatggaagaagagctctcacacaccacacacatacactgatacacacctccgagtatgtcatttaattaagacacgtacaaataggatgatgactgccctggatccatatacagcgtaaagtcctgcgagtatgcaagtttcagagctttgttattcttccatttggctgttttgcatggaattgtaattctccgctatgccttgcgcagaatttttgcgagttcttgccagtaattagtataggtaatagatcatctcgactgaattactatgaaattcagggcttgcagctcaaattcaagtggttcagtctcacttttatgatccgttggcatgataggcttcggaaatactagcagtacatgtagctttaatcgatccaccgaacttgagaaatcatggtaggttggaatggaacagagtgaatttctggatcctgctttgatggccatggatgatcatgaaccttctgagcactaatgtatgcccgaataatctgtctctcttcttgtggaatgatatggacagtccttatctatatcaaagtaaaacgaggacttacgcaattttagttttgcactactattataatatgatggatgtgaatgcagcatattcttgaaatccaacttgctcaacttatgtagttaagggactttgaatgatgagtgtggttaagtccagattatcagaagctgtatatatgtcatcactgctctaataatcacaacagggcagtagtacccagggcttaatatttcagtttcaggtttcctatcggtggtggccgaaataccgaaattatatgaatttttgaataaaacttgatcaaatctgaacaaaatattaccaaattcacgaaaaaaatgaaaattttttaataatttcggctgaaatttccaaattcactgtttcagccgaagtttataggaatattgcctataaatttcaaggcctctgcatgtggtttgattgttcttagctgagaatttaactacatttattttgaagatagagtgagcatgattttgtcacatgtgatcactcaatacaagcgaaggaatgtttacataggacagaactgagaggtaggggctcacttttggtaatctgcgaggttcataaagccgtctgcccgtatatctctaacaactgctctgtatcatattttaaccaacataattcagacagaaactataaattggaggtcatccaaactgagaacttcagatatcccattgtccctagctaacagaacaaattggctcacagtcatgcaagtggagttgtttactgtaggaataggagtcatctggattagtgatcaaggccggttaatctattcttgtagtgatgctgtaacgctttgcttttcgtgaggcgttaaaaactaattcggcgaaaccctaattgcgaaaatttcgttctttgtgtgcgagtctaagtcgtgccgtggatctcaattcaaatcctgttgttctctctcatcgaaatcaaaatcatcctcctcaaaatcatcatccttctcaattcaagtctccaaatcaaatttcgaaaattcaatccctctcttttgaatcctcgccaaataattgtccccgtcctaaaaatatcaaattccctttttgaatcctgttgtcgactcctccctctgatccaaatcccaattccgaaagtcaacctcttccttgaactcgttgccaactctttctctcgagttcgagagaattaatcctcatccgaatcatttccttgactccaccctatgttcccgagaacaaatacccaagttttccttttgaatcttttccttgacttctccttgagcctcccttgatacatccctaaacactcgagttcgaatatcaaatttgaattcgaatcgaaaccctaaatcctctccaaatcaatcccttcaccagaagtctattttacctccttcttggtcgattgggccgtttttcccttccctcggcccacttccccatcggtccacgccctggcacgtgagccgcgcgtgaccatcaaggaggagagcgccgttccttctctttctcccctgcgcgcgcgctctctctctcatcaccatcgtcaccacgagctctgccgttccatgccgcatgcatccaaacccgggagaccgagctcgcgtttccctctctctctctctctctctctctctctgtgtctctctctctctctcccgacgaactccccccggcgccgattcccgtcgccgccttttcgattttcgccgcgccctcgctcgtgcgtggccgaccgcccggttgccaccgcgtcagccctggccgcctgcaccgcgcagcagcccatgccgccctgccactcgctccaccagtgcgcgcgtgcgtccaagacgtggaggcagagcctcggctcccctctctcacgtgctctccctcctccctctgctcatccaaatcggcaaggagccgagctcctttcccctcccctttttgctttttccctctcagcccggccgcccgtgaccacctccactgctgccgcttggccgctagctctgagcacgaccgccagccgagctcccttgaccacctaagtcggtttcctcccccaaaactgacttcccgtgcctataaaacccaagccgagctcctcctcctctctatccctctcgtcatcgcctgccgtgccttgtcgccctgctcggctcgcaccgtcgccattcgtcgccaagcaccagggaggccagtgcatgagtggacgtgtgacgaggagctccgggcacctcttcttccccttccctggccgctcccggagagcttgctcccgcgccgccgccgctcgtcacggcgccctgtcccgacgcggtagccctccgttcctcttcctcactcgccctcctcctcctttaactcgcgtggtagctcggttagccttccggtggttcgtaggcgccgccccaagccccgccgccgctcgccatggccttgccaccgtcggcgcccgctcccggaggccgcctctcgtcgccggacctccacggcgcctccccaccacatccgatcctagaaacgaaacccttgagccccggagatgctcccatccctttgaatggaaccctcgtcgtctcgtcgtcgtttccccctttgctcgccaccggttgccgccgccgcgattcgccgtcaccggctaccctccggcgaatctgagccgttggctcactctctcttgtcctccttgtcgttccaatgtgctccccgtcgccctcgccgttgcatggtgtccaggtgaaagtgccgtcgtccgccgtccatctcgccctccccttcttcctcctcccgccggcccgcgtggctgccacgtaggcgccacgtcagcgccacctcaactttgaccgagccgagccggtcagccgcctcctccctccaccaccctcgcgcgcgcggtccacggtgcgccaaccggctgcgtgtgggcccgccgcatccctggtccatccggtgcacgcacgtgaaccgcgctcacccgaaaccctagcaccaccctcatgcgccgctcccacggtgagccgcgccaccgacaagcgggccccactcgggaccctggaaggtggactcggcccaccagccctctctctccctcactctccccgcgcccccttgggccgcctctccgggccggccggcccattagttcggccaagccgtgcctctcctctcgggccgtacccaagccgcccgaggaagtctaaatcatatccctccttcaatttctttccaaaaagggtttaataaattattaaatcctttttcctttagacagaaattccttattccttagaaaatccatatcttctcaaccgctcatccgattgaccccgttccacttctagtaattccgtaaaattgagatctatttaatggcactattatttagtctaaatagggtatttttctttgtcttttgtctaggttttcgattgtttgcgtatagttgcggttaccagatttccgtcaaccgcgggttttctcgaagattcgtgaagcttcgtgaagactttgagcaaggcaagtcaccctttgatcaattgctcctataattggaaaatcattattattttgtttgcaactcgcattattagaatcacatacttaacttgcttggcctcggtttgtgtgccaaaccgacggacctacccagtagtcacactaattcctgtaggctgtactaccctgattccttgtcgctccacccttgtggtacttcggtatccgtgctctctgagcgcgtatacctaatatcccacatacaccgttgattgtcgaaaacttgggaaatgggtttgtgaagccttcaaaacccgacatgtggtgtcggtgtgttcgaaaataaaataaattgtgaaaactcgcgatgcgggggttgtgcctatgtggcactgtcccgtatttgtatataaggaccgattcctgtgggaaactcatcgaacataatcaaagtgcaaccacaaggtggaatgggacaccctggctaattaactagtcggttcagggaaacctcgcatgccaatagttgggaacgccggggcggggtcggacaaaccgggttcctggtaaggcaaggacaataagcttgctcacttaccgatcaaggtggctggaattaatttgtgaatgcctaaaatggcctatagttacgtgaggatttgatccttctatgtggcatgaggtaaccctgggtcggcttgggaaaggctttgtcacgaacctctgacaccagccagtgtctagagtaagttcgtgtcttgtgggtaaagtgtacccctctgcagaggttaactaactattcgaacagccgtgcccacggtcatgggcggatgtgaggtggttcccgttgtgtagatttgtttgcctgtgctttgtgaaaagttattgtggattgggaatcgtaaccagaatcagcctatgtggcagatggatgacctgagtggtcagaaacgaacctgtgtgattcgggatgtctgcgggcatcatagactaggcttctcgagtggaagcagattgctttgctgctgggcagctggactatgggagtccgcaaaaatgaaaaaggctctgggagctgcctaatcaaatgaaaaaagctctgggagctacttaatcaagtgaaatggctctggaagccgataagtaatgatctgacccggggggtcggtacattaccatttgagttgttgaaaagcatctcttaagtcgaatcgagacgcaagtctccttttcgacccaaacttaaaaagaaataaatcacttagtgatttcaaaaatgatttcaaacaaaggatttgcaaaacaaccttgcctctcttccaagcttgcattaaacacctaagttcctgtgacttgctgagtacgaaagtactcacccttgctctatataaatatatgtagttcctccgtcctgaagctgaagatgaagtgaattgaagaatagggtttcgtcctggttcccagccgtcgcctgtggtgttgggtgttagaccgttggttccgctactgttgctgttgctggtgttttctcgtctgtgtcttcggttgtattctcaggttgtcctgagctgcaacctaagttaaggtaaataagtcatctatttattttaaggatttgcaatgattcatatttgtcaccgtgggtaccagcactatgtcctgggactggtactgagatcgcggtttcgtaggaagcggttcgcgccgttattcctacgacacgctcctgtcaggtgccgttgtacggcggtgccggattggggtgtgatagatgctcattccttaatactatgatttagggaatatcatccacaggtgatagacctgtagaacatatgggacaccagcagtcacgaagcggttttccggagtaggttgtaggagtgagtatgtatgcattgtgagcgcctgcctttatacctttcttctcaaagaaaaatgaaacagctttctggcgacggagaatgtagatggtagtcaagaatgaaaactagatttacatgtagtcaaatgttccatgtgaaatggacgattgaattgaaaattgaccaggttttagagaagcaacagaagattaattaagattttgtgacagctgaacaatcacgcttaaaacaagcagtcagtacagggatcaaaatgtaataacacggtgacaaagagtaataagagtagatttctgtaatttgagtatgtacggacttgtttgctatttattgttcatgaattatctctttcttcatgacatattctacttaatatcatcttttcagtaatcttacatgattttcagcgacattcatggtttcctggagcaacgagtgggtaacagaaatttacactagatgccatgtgcaaagggcccaggtcattgtgatccctcattcttatatattgcaggcatgaacaacatgatgtcgatacttttgcaacaaaaagttatgaaccatatttccagtcaagttagctatctcttagagtatactacatgaatgggagtcaccgggaatgctatgaatacaaaattaatttgtgttcctggcctggtcaaggacaaacttgtgtcttaattggacaaggagacatatgggacgatcaactaggtttttaggtgcccaatcgtcaatttggatgggtattttacaccttctgctcaagcattaatataggcatttgaccctaaaaaaatactagtatttgacttccgttctcaaataatcattcatggaccatatctctcgccaatcagagtcaataagtcagtagtgccgctggttggcttgccgccactggggaaccaatgctttacatgcaacatgaaggaatgagcacgccttgttcctgtatcatctgtggtgttggggagaaggattgcgaccttgcaccattcacccccgttggctccagggggcctccgccgggaggcctgccaccaacgcccggtggagtccatctccgtaggaaaggcccttatcggaggcctaggaagccgacggaagttcggagccaagcaaagtgccccggggacctcagagcccagtctagggccctgaaggccacggagctggctcaagggccccggaggattcggagctggctcaaggggctccaaagctcttaccaggagtttggggccggagcctagggaggacaccgggaatgagcatgggccgccattaaagcgcattacttatcctccaaccaccaccgatgtcacgacacgactggcgatgtgaaggccaatgctagctattgcctgggtaaaagctactactatgatggcaccataccggcccccttaatgggcgcagccgtctcccggtcaggcgaatggacccccgagccgttggccagcccacctatcagccacctcgaggtaactacagtgataggggtagatttgtaacttcctttgtatgtaacctagtataaatatgtaaatactaccctcagaaggggtacgagagaaatagacagaaacttgaacactcgtaagttctgttccaacatgttgattaatttcaattacgcatgcatgcagatcaaatttgattgtattaacaagaaacaacctttctcagggaagccaaaaaaagcaggagacatggttgccaaaatccaatcagggacggtcaatgaaacttgcaaatttatttaactctttagataatggaagctttattgaaactcagtcaactacatcgagataatacaaccaagctgagctcacttctggcctctgcataaagatacataaagccggaaggacaccaacagcaaacccataaagaggatagccattcttgtgctatcatccacaaacgagaacttcggaacactattgcagtggtctctcaatagttggaccatgtggtactggaattttttatcaggagcaattaaactatatgtttacggatgctctagttgatgctgctacttgttgagtataaatatgatgcctatgaatattgttgcctcccaagtttcattgttgtcctcatgttcactcaaatcgtcaatgacatatcatgtaggcttggtaagcattaggaacaccaaatctaaggtaactccacttgctcgcctttatttagttaagaatgttgcgagccctacacctacatagtatgtgctcgtttgcaggggacagggttagatccaaagaaccactgtcttcattttgcatcctgcctgagccatgtgttgtcatttccttatgaacaaatgcaaataaaacaaggatagaaatccaaattgtgcttgtaatttccggatgttttgcctgaacggcttgatgttttaggagttggacagtactgtaatttcagatccatgcaactctcatttgaacaaagtactgctagtcccatctcaattatacacgcttgtctagaccaccaaatgcttcccaaactggtgt

SEQ ID NO: 4114 - DNA, 722 bp, Oryza sativa
ctggtactgcgcgcataagctgttgcgtgggcttaacgaactaaactaaagaccaggcctttaagcaacccatttaaatgatcttgtcatgggctcatggccggtatcaggtgagcccacgtatagcccataaagaacggcccactcaagcaaaatcagcaccatccacagtccgttttacaatcatcaggcccgttatggccctgtatattcgaactacaagcccatcatgggcccaactttgcccttatatttgaagaagaagcccattatggaaatcagagacccacatttggcccatttatgatccgttcaaacccatatattcaccgaagtaggcccatgttgataacccatttccggcccatattggagcgtttaggcccacttacggcccattggcggtgtgttggaatatgtaggcccattaacagagttttgtacgactgttttgcggttggaataagatcactttgactccctcaactgaccaccgaatctaaatcgtatccctcaaccgcaataccagaaatcttgaccccccgaacttgtaaaaccggtgcaatctgactcccttggtggttttggatggcggtttcgctgacgtggcgcacacgtggcagtgttgacctggtctttgttctacgtggcattgacgtggcgtttatgtggcattaaaataaaaaaatatatgcggggcccatttatcattcacacaaaaa

SEQ ID NO: 4115 - DNA, 2176 bp, Oryza sativa
aaatctatgcatactattccaagaacaaaagacatactttaagaactatcactccatagtcagcatttgcaaaactagcatgcagaattacacggtcaggcaccaaaaatagagacatgttggaatctgatttgcagatctaaaggttctgtaagataatctaagatacaaataaagatcagacacaaaacatatgtactttaaagacccatcaacattacattcgcatagaacgaatatcccaacttagacgcaaacatcaaatcatgacattcattaagaacatgtccaattaacaagttaacatcaataaaatagaacagcaagctgattcccggtactattggataaaaaagaatgtgtaattgagctgattcccgatactattggataaaaagaatgcgcaattgtgttaaaccatgtcctgtcattatgaccctaacaaagtttcccttacccctggctcaaaattacaactaagattacaacagcctcaattgaatcactatgcggaatgttacaagttacaacaagaagcaagctcataactaaattcaattagctaaacatctgcaggagctgacaccctatttggcagatatgtgataccactagatgacgagatcatagctgatataaaaattcaagtgttaataagggaaaatacaggcaagctcacattgaagagatgatggtggattagctggaatatctgacacaaattgctcaaaatttatagcattagaacaatccacattactcagtggaaggagtataccaaatactattgcttaaaaagaataagtataatcgtgttcaaccgtcactcagtcgttattccctagcaaaatttcgtttgccccctggctcatggtactactagaattacaacagatccaattgaatcactcatctgaaatcccaaaaatccatttgggcaatcaaatctatctgtgcctcagcgaatacgcacttaagatctagatcttaaaagcagaatgcaaacaaaaccttatgagctcgacttggctccatccaaagcaaccgcggccgtcgccgactcttgagaggcagcggcggcggcggcggcctcctcctcgagcttcttcttgttgcgctcgagcgcctcgccgacctccttgggcatgtacttctcgtcgtgcttggcgagcacctcggtggcgctgaagaagcactcgcagtcccgggccttgtccgagaccttcctccccgcggtgtctcggcggaggtcgtcggtgaacggcttgaggaagccctcgacgacgacggagtggccctcgcggaagaggtcgggtagcgcgccctcgtagcggacgaggacgtcggtgatgaggtcggtgacgacgaactcgatctcggaggaggaggcggaggggtgggcgacggagccctctaggacgagccccccgaggcggacgcgggacttggaccggtcggtggcgtagcgcgcgagcgcgtcggtcggggtgaggtagaagacgagctggtcctgaaacgtggcgagcacggtgaccacgaacccggccgcgcacccgaaggtgagcgcgtacgtccacagtcgcctgctctgcagctggcgcgcccgcgccccgatgtccgtcgcccgcggccgcgccggcccgcgccgcgccgcggaggagaagaaccgcgcgggccgccggaggaaggaagccaccggcgttcccccaacctctccggcggcggcggcggcggcgcgtgggattgggacggggctgggcgtgtggaggagggcggggaggaggcggcgggaggagaggaggcgcgaggacgccatgggtgggggatctggaaggtgcgggaagcggagcggaattggggaaagaggcgaggcgagggcgaggcgtgcgcctggtttggcggcggatcggcttgctgcccacgccacggccgcacgccggagcaagtggggggaggtcaaaccgtcaaagtgggctggctcttccgggctgcggcgtctctcagggtgggcccaacccaataagcgttgaccagggtctggtttgaactgcagtaatctgaacgaaattcgattgaaatgtttcagttccggtatagtttgactaagaccttgtttagttgggaaaaaatttaggtttggttgtcacattggatatacggacacacatttaaagta

SEQ ID NO: 4116 - DNA, 1284 bp, Oryza sativa
tgcatctgggatgttgacgggagcagaaacaggtatgaaacagttttaaaacttacaacaaagttcatagttctttgtggtttccaatgttcatttttgctagtgtttctgatcaggccagatttgctaaatggaatggaaaaccacggagtctgcatctctcttgcgtgcaatcctccatcaagtgatctcctagtggcttccttccggccaaaagttgagctgtccgacgacggcacatctcaagccggcaaatcacagtcaccgacaccctctgcatcagggaagctaggctgccatgcactcataaggaggacgagcaacacgtccttcgccagagaccaaatctgcagaggcaatgtgagtggattgcgaatgtccaaatccgcaatcatacccttcaccggaagaagcaatcagcaacatctcttcgcctatggcgacgagtcgctgcgcggagtccggacatggcggctgccttcactccagacgtttgctgatctcaggccacaccggcaaccgatccttgatctgaggtttgcagagagctcgtcgacaggggaaaggtaccttggatgcttgagcgaggacaggctgcaggttttcagagtaaggtagcccgtagcaacaacatcagagacagtcatttgacttcagttcattgtctctgtctgttagcagctgttccctttgctgctgtgttatactatagtataacacatcagcactttggttaggtttgttgtacaagcacaagcaagtcttgcaatctttctctgtacagtactgatctctagagcagatgtctagtgcataacatcatgtgtgatttgttttgggtgataaaaccatgtattaattttgtactagtatcatgagtggttgaatctgccacaaaaatcaaaggtacagttgggtagtgatatgtcataccattgatgctcagggcactgatattttgtccagttcttatcaaatcataatcacctcatctgtcactgtattgtaccatcacaaattcatgtttgctctttgtgtaccttggcaagttcggtggactcagcattctcaagtctatactcattcctctaccaacacaacaaactagtcaaagagggttgatagcatagtacaactagaacttcaattctgcaaaatagacaaataataatctgtgatactgcatcgcttcaaagttgataaaacacttacggggctcaattaagctcatgatataactaatgaagaataaagaatttgatcaacttatgagacagtaaaaca

SEQ ID NO: 4117 - DNA, 508 bp, Oryza sativa
cggcattggatcaaagggtgaagattttcagcagcagtagtcagtagaggcctcacccctcagatggttgaagagatggtcattgatgtagcgcgccgtctccgggcctccatgcccatcatagacgcccacaagagtgccctgcaggttgggatccgtggtgctcagtggcccggattccacctggctgtggtcctcgagcaggttgttggcctggaccacggccatcgagaactcgccggcgacgagctggccggcgtccttgtaccacagcagcccatcctgccgccccgccgcatccgatcctttgcgggggcgcccggccggcgacgacgccgggccccagcaagatctcaagtattccatcgcagcagatagcatccttcatctccgacacctccccatcgcccacttcctcacaaagcccattcctttaccttccctctcctcctctcgtttcttcgcgaaacctgcaattgcatccaaacaaacacgcatcccaggatca

SEQ ID NO: 4118 - DNA, 751 bp, Oryza sativa
ccaggagataaatgagcacaaggtacttacccaatttcttttgttatggtatcactttttttagaaggtgaatgatattttgactgcaaaccttgcatctaatttacataggaaaagaaatgcgacaagcatttttgtgtatagataatgtttgccaagcgtattcaacatttctttttttagcaaaggtctcccttgtatgtttccttaatccttatttaaatcaaagttgttagattaaatatcttttttttttttcattggcctttccagtgtcaggaaataaagttttctttccatggagcctcatgttttttcctttatgtttccttgtatgcagaggcagattatactgcagcaaaatttcataaatgaatcaagcttaaagagaaaggtagcttttcttaaatttttagtgattaaccatgattacacaagccttgatgttaacattctttacaacaaattgtgaagaaaatggcagatcaatcatcacatggaacaacagatgcagattcagtagcatctcttacagcagatgatggtcatagcagtccttgcagttttgttctccaggtttctctctagtctctatattttatgtttatctgggttccagcttctattattatattatacttgatcaatcaaactctagatctatttgctactccatttccatttggttgtgcctaatttagctatggtcatgtagtatgagcaggaatacttacgatgcatataacttgct

SEQ ID NO: 4119 - DNA, 677 bp, Oryza sativa
ggattcgttttttttcttgtcacagctgattactcctttttttccattttaaagagtggcattcgatgtccaatatctcgatcgaagtatggaggtcagaataaatagaataatgatgaatggaaaaaagagaaaatcctttagctggataaggggcagatgtagccaagtggatcaaggcagtggattgtgaatccaccatgcgcgggttcaattcccgtcgttcgcccatcctattattgcaaattccaaagatgcaattttccatattcctagttacgtatttacttacggcgacgaagaataaaactatcactatattttttccttttcctagttcttcttccaagcgcaggataacccaaggggttgtggatttttttctaccaatgggggcttccccttcaccgcccccatgggggtggtccacagggttcataactacccctcttactacggggtgtttacctagccaacacttagacccagctctacccaaacttttttggttcaccccaacattacccacttgtccgactgttgctaagcagttttgggataccaaacggacctccccagatggtaatcttaaagtggccgatttaccttattttgcaatcagtttcgctacagcacttgctgctctagctaattgcccaccctttccacatgtgatt

SEQ ID NO: 4120 - DNA, 746 bp, Oryza sativa
atcccattttataagaaagacaactcgtccacgtatatataatccattaagtgataaaataaacctgacctctgcatcaactaaacatatattcaaaggaaaaagaaagggaagaaacataagataatatgaatgtatcacgccctgaaacaacgccttcaataaggatccaaagtttgttcgctgatattgttcgaacctaccagaacaattggtattgaatttttatctagtgacatatctagaataacggcttcaacaaataattgacaaacgcttacattgtcaaagctagatatataaaccagataagggattgatcacctcgaagattcttgccaatggatcacgatgcaacctaccgcaaaatactccctccatcctaaatatttaacgccgttgatttttttaaacatgtttgaccattcgtcttattcaaaaaatttaagtaattattaatttttttctatcatttgattaattgttatatatacttttatgtatacatatagttttacatatttcacaaaagtttttgaataagacgaatggtcaaacatatttaaaaaagttaatgacgtcaaacatttagagagaaggaagtatatagcaattggtcacaacatatgcccatcgtcttctgcccaccaaaatataaccagagaaggaccacacttgtgatcagtcacaattgccaagccaccttgaaccatcctcgaccgatcttctcgatcgcaacgaatgtc

SEQ ID NO: 4121 - DNA, 691 bp, Oryza sativa
tcatatcaccctaggattgctaaacattgacataggagtgtgatttactttcctagagatataattgagccactatcaccctaggtttgcaaaacataacttagttgcttagttagagttgaccctcaccaagcctagcaacttaggttagttttgattaggtgtcatttagttttaaatcgcctattcaccccccccccctctagttgacatctcgatcctacaaaaggccgctaacgctatttattagcttgcttgtaaatcttggcatagctatcaccagggtttacattatcggttgaccactaaatttcgagctccatcggtatcacggttttcgataaatttcgactgaattttgaccaatgccgtgtttagttgtttaggtgtaaaaattttgaagtatacggacacacatttgaagtattaaatgtagactaataacaaaacaaattacagattccgcccgtaaactgcaagacgaatctattaagcctaattaattcgtcattagcaaatgtttactatagcaccacattgtcaaatcatggcgtaattaggctcaaaagattcatctcgcaatttacatgtaaattgtgcaattggttttttgtccacatttaatgctacatgtatgtgtccaaacatttgatgtgacagaatttttggaagtttgaaggaaactaaacac

SEQ ID NO: 4122 - DNA, 939 bp, Oryza sativa
aagatgtaaagagtttttagtaatcagtaataattcagtaccccgtggtgtgcctgacactacagtggggtagttaacttatgctatatctgatgaaattgtccacaaagtggcatttcagtccaatacactgtgacgaatgatctcatgaggcaaaatagaccaaattcagcattggagatcgactgccaacattgctgatcattcaggaagcgagtagagttacaactcaggttcttcaggtgagcatgtgcctttgcaaggggcatcagtgcaccggcaaacgggttgtcccgaaagctcccatccattgaacccacgttccagcaccatgatgttctttgttcctgattcttccttggtctcagatagatagtcggagaacatcttggcacacgatggacctcgcacctgcagcgtgatttgatctcactgtgtaagaaatatgcacttttgcatgttatctcaaataagaatatcaggcgggagagcacaacgatatgcttgattattatataataatgagctaaaaagagattagaaaacttgccctttccatctgctattaataaatgtgctgttacaatataataaaaaacatgagctaacgcaatcagcaatgacgacagcgttctagatgcaaaaatcgaacatggtaccaactcagtggatgtggacaagtataagttaacaaagaacactctctattattgataatattagaagataatgcaatgcttcaaaagtattaactggggatttccaaaatctttactatagaaagcatcaaaatcagagtttgaaagactatctgcttgaaccagaaataggtagcctttcatttattttagataatggatatcaatccggcctctacatccctaaaggacgtgaagcacatcaaacagaaattgaccccagaaaggtaagtctaagtca

SEQ ID NO: 4123 - DNA, 617 bp, Oryza sativa
tttttgccatgtccataatgtgtggggctgatgcacgcaaaactgttgcaaaatcccatggtaattcatcaaagaacaggtagctcccaacaaccaaaacaacaacatcatcttctttgctcccatactgattccttgcactttcttgagtatgtgatgagctgtatctttttgttgccaagatatcaactggtgaaccagaaataaccaagaagttcccagtatcaagggccgaatgtaacaactgaaataagatatttaagagtcagagaagcaaatgtttcttcttgatttaattattccagaatctaaaactgacagtcacacgtacaggaaggtagctatctggaaacacgacataagtgcatgcattaaaatgagttctccaatcttcaatatgattaggaatggactggtgcagttcgggatttctaaggaactgcccaagagcatcttcatgaataagccagaccacaggtagaaattggaaaggttcctgcataagactgaacacgatatgaatgtgcagcactgcagaccgaacaaatgatgtgataaagggaaaagaaacacttgggatggaaaactaggaacaatataataacacctgtcctttc

SEQ ID NO: 4124 - DNA, 704 bp, Oryza sativa
attcctgcaccccctatataaggagggtccgtatgcctcttggggcacgattcttttttctcccaatcatacaatcaataacacactcggcggaatcatccccggacaggagtagggtattacttctttaataagaaggcttgaacctgtataaaattcattgtctccaaacccatccactttcctagcttgatagccacccccttttattattgccgaaatcttgtttcgatagttggctcgccaggtaggggaggcgtcaagttctcgccgactaagtacgatgggtttcgtttctggcatcgacgacttcgccttccctcccgggcaggcgttccgattcggcagcttcgacttcatcaccaacgacttcggcaagatctctctccttgactcggattcaaaccagtcggggagaaaccaggtccccgtgccgtttggtattccgaactcggccgaggcctactccaagatcatctctcctgagttggtttcaagccactcggatgagatccaatctgttcctccacgatccgatcaagacgatgggtcctatccctcaatcttgatgaaacttcctgacgacttggccgccgtcttcacagccaaaacatctcccactcggagatctaggcgagctctggcatcggccccgatccagtctagatccagggaggttggcgttatactccaacctcttggga

SEQ ID NO: 4125 - DNA, 581 bp, Oryza sativa
agtgtaaggagattattactgaggggaaattcagtgctgaggttgaggaaaaattgagtaagctagaggagttggaaaatgaggcaagagagcttagggttgtcaattcaaggctgcagcaggagaatgcacatcttgccaggcgattggagctcacacgcctgccccctgtacccaagcccatcaataacatggaggtgaatatttactgttcttgaactgtattgtagctggcacttactaatcaatcttaatcttcagatagaggttgttactcgtcagaaggaaacgctgttcttgatatttggtttgaaagagcaatcaattgtttctcataagcgctactgatttttcaaactcatttttcagtgtttacttcagcttgtgttgctctgtcaggaactgaacaagtaaaattggttgcaggtaaaagcattgcaggaagctgatcatttgaggcaagaaaatgacaagctggcaaaagaggttgaacagctcaagactgacaggttttcagatgttgaggaattggtatatctgaaatggatcaacgcttgcctgcgttacgagctcaggaacca

SEQ ID NO: 4126 - DNA, 1133 bp, Oryza sativa
gtacccatgaattcagaaccccagagtccgcacatcctcaaatacaaagcacttccctagttagatgtaggttagacttcccgttcgagaaactctaccttctacctgccctcaatttatgcacgattaatgaatgccacctgggtggaagcgagaggtggaaatggaaggtcttagttcggaggtgggatctctacctgatagttgcattgccattcatgatgatcccctggcattcgtccattcagccattcaccattcacccattcaactggaattttggttgaatgccggaattgtgtccacaaattgtggatggatagttggttggctggctggatggctggctggatggctggctggatggatggtgaatggctggcggcggttcggttgctttgaagcatttgttgctatctaaattccatttaaggtcgtaccttatcgcccagcatcatcttattctctatttgtattccctccatctttcagatacggatgtagccttggatgtgcccgtgcccaatgaagaggaagagcgcaacatgaaacgtaagtacaaaagtaccggacacccacccagatcccaatagaatccgccaaatcctgcgggaaattgtaatcccattcaccagctcctacatttaattaacaagagaactattgtatttatctaacacctggattatctccacctttcatttgatccctatttatagattacgctgcgttgctaacgggccgcacctcctatttcctcaagggtgaggaaatgaagtccatgtacaccacctacaatccgcagaatgtggtggccaccgcccgtttcctgttccacaagaagaatctatactactccttctacacctcatcgcgaatcggtcgtccgcgtgccattcaattcgttgatgatgcgggtgtaatcctggaggagcatcaactggagaccaccttggcgggcactctcagtgtctatcagaatgccacgggcaagatctgcggtgtctggcgacgagttccacgtgattacaagcgcatcctgcgcgacgatcgtctccatgttgtcctcctctggggcaacaaacagcaggccgagttggctctggccggaaaggtgggccaaatacacggcc

SEQ ID NO: 4127 - DNA, 691 bp, Oryza sativa
ttccagtggggacccgaagcacagaaagccttcgaagactttaaggaactcctcaccactccaccagttttggcctcgccacatccacaagagccactactgttatatgtgtcggcaacctcccaggttgtgagtacggtcctggttgtcgagcgtgaagaggaaggccatattcaaaaagtccaacgagcaatctattttgtcagcgaggttttagccgactccaagacaaggtatcctcaggttcaaaagttattatatggtgtcttaattaccgtcaggtaattatctcactattttcaaagtcactcggtcacagtggtcacatcgtttttactcggggatatacttcataatcgcgaagcaaacggacagattgcaaagtgggccttagaattgatgtctttggacatatctttcaaaccacgaacttcgatcaagtcacaagctttagctgatttccttgccaagtgaaccgagtgccaagaagatatgccagaggaaaaaaatggaatattggactatgcattttgatgggtcgaagaggcttgcaggcactggaggtggggtcgtcttaatttccccgactggagaaagattgagctacgtattgtggatacatttttctgcgtcccataacgtggcagaatacgaggcgctactccatggattaaggattgcaatctctttg

SEQ ID NO: 4128 - DNA, 714 bp, Oryza sativa
cttggtgagtcgatttacgactacccacattgaatcatgtcccgatgatgtccggggcagtcctgttataaagtccattccaatctcctcccatttccattccgggatttggagaggttggagtaaacctgctggtctttggtgctctgctttcactcgttggcaaacatcgcagagtgcgacgaattcagctatttctctcctcatgctgacccaccaaaatttctctttgaggtcttgatacattttagtgctgcctggatgaatggagtactgggtctgatgagcttcggtgagtatcagatccttcaattccttgtcgtccggtacacacaatctttctcccatccagattgtgccatgctcatcctcaaggaaatcccgagcctttccgactctcatgttctttttcagttctgctatttccggatcatttacttgagcggctctaacttgatccacgagcgtaggccgtgcctccagagcggctacgaacccgtgttcaacaattcccatgttgagatgttcaagctcctgtcgcaattcctcacacatgccctcgatgcatagagcagtgcagtaacttttccggcttaatgcgtctgccaccacattggctttacccgggtggtagtgaatactcatgtcatagtctttgattagttccaaccatcttcgttgtcgaaggtttaggtctggttgggtgaagatgta

SEQ ID NO: 4129 - DNA, 1209 bp, Oryza sativa
agtatgttcgtaaccgtgctcgtccagaggcaagcatcgccaagggttatggaacagaggaggtcatcgaattttgcgtagaatttatcgaagaccttcgcccaatcggggtacctgaatcacgccatgaagggagactacggggaaagggaactctcggaaggaaagcaataatgacggtagacaacaatttattccgtaaagcccatttcactgttctgcaacactcttcattggtagctccttacatcgaggagcacttggctctagttcgcgccaggaacatcggtaagtccgatacatggattacacggcatcacattgatactttccccgcgtggctacgacaacatctcatgggtaacgagtcgatcaaccaacaacttgccttcctggcgaggggaccgtctgggtcgatcgcgacattccagggatatgagatcaatgggtacacattctacacgagagcccaagacatgaagacacgaaccaaaacagcgctgttcgtgtcgatgccatgggacacgatggaacaactgccacatattacggtgccatcgaggacatatgggaacttgactatggtcctttcaaggttcctctgttccggtgccaatgggttaggttgactggtggaggcgtaatgattgatgacagtgggatgacaactgttgaccttaacaaggttggatactcggacgaaccttttgtccttgccaatgatgtaacgcaagtctttttcgtgaaggacatgtctagcaaaggaaagaagggcagagggcctgatgagcctaagcgtcaagtggttctcccaggcaaaagaaaaatcgtcagagttgaggacaagactgacgaggattacgatcagttggatgggcaaccccctttcacggtgacgattgaccctagcatcctcctatcaaatgaagacaccccttactcacgcagcgatcacaaggagggaacaatagtgaggagaaagtacgtgcggtcaaccgtcaccgccgatgtaatgccgtaattattgtgtacacgatgtaaactattttggatgtattgattatccatataaatcaattgatgtatggcatatgttaattacgcacgattattagaggtttcaacaagtttaaatcatgtatatgctagttatatgtgatacttacaatttttaaaagttttaaatcacacaggtgtcaatttcatatg

SEQ ID NO: 4130 - DNA, 557 bp, Oryza sativa
caacacacaaaaaggagcctagctgaccattttccaccacacacaaaagcccagtcaccatgacatatatatccgaccggggcccttgtctagctttcttctgcgttaggttgttcctctttggcctcttccataggagatgttgcggaattcatcttggccctcttcatgatcagtgtttccactaaactttccaagcgttcatcagcatgtctcttccggttgtagcgcagcatgatgctatcacgatcgactggttcctcgtcgatctcgtcgagcagtggaccgatttcaccgttcctcggcatgagtttatcggccacgtctgccggagtggtgttggtctcgctcagcagtccctcaatttcactgaatagtgagtgctcggtgatgtttaggtagttcttggcgagcatcttgaaggcctcgaaccggcagtaggacatctcgatgtccatatccatccttccacgccgggtcagcgccgggtcgaggtggtcaacgtggttcgttgtaaacacgaagattcgttcactgccgcacgccgaccacagccc

SEQ ID NO: 4131 - DNA, 611 bp, Oryza sativa
gtcctcctggatatcgatgtgttccgaatcagcctgctcttcaggtacccttaagcacttctttaactgggaaacgtggaacacgtcatggatgccgatcatattggatggaagttctagctgataagcaacttctccccttcgttccaaaattttgtatggtcccacgaagcgtggtgccaacttgcctttcgtctggaaacggtgtactccccggagcggagtgacacgaagatacacgtagtctccgacctcaaaagttagctcccttcgacggttatccgcgtagctcttctgtcgagactgagcaaccctcaatctctccctgatgattctgactttctcttctgcttccgctaatacttctgttccgaacagttgacgttcgcctgtctgatcccagaaaagaggtgtgcggcacttccggccgtatagagcttcaaacggtgccatctgtagactggcctggtagctgttgttgtacgagaattccgcatatggtaagcttttgtcccaggctccaccaaaatcaagagcgcaagctctcaacatatcctccaagatttgattgacacgctcggtctgaccatcagtttgcgggtgataggccg

SEQ ID NO: 4132 - DNA, 759 bp, Oryza sativa
cccctctctccgtgggcaaggtcctccttttatatcttaaggggataccacatgcaccatcccccccttttttatggggacttaccctaccttttcataaatggacggagatctgcatggttgccgttcgagtcaccttctgatgggacggcctgcacctacctccactttcgccgggagcaggcgcgacgtagaatcatggctgtctgctggcgacatgaccggtgtcagaatggtcacaaatcggtcattcttgtccacctcgtgtcagcttagcaatctgcatgttggccctccttcacactacattttgcctgtaatggttaggatgaagcctggcatatatctgatcaggactaacgtgccatctctgggaggtaacacgctagctccagctggggacgagcgcctagaagccctcgtcctgacgggatggggcgaggcgtgcgtcagaccgcctgtcgccacctaatcccgcgatctgaccggtctgtgactggtcacagaccggataaatgagtgcaatgcactacattacatgcgtcgtgacacgctcagccaagccgcaataaatgtggttaggtgagccccactgtgctcacctaccccatacacgcggagcgaaatcccacgaggggtcggggcgcctcggccctcggggccggagggggtgcagcccgacccccctcgggggactaaagagagggcgaacacaccacccttcggcctgacgtccccgaaggtgccagccacgtgggc

SEQ ID NO: 4133 - DNA, 743 bp, Oryza sativa
tgaccccaagaaaatgcagaggaaatcaggataaaaccctaagaaaacaatgcaaacaataatcgggtttgacatgtggaatttttcttgaattctacatgtcgaaattcattaacaggatttttagtggaattttcagagctctagaaataattttaaccaattaaaaatcactaaagtgcaatttttaattccagggaaaatccttttcctttttctttttcttttccctccctttttcctcctttctcttttcggatgggccgccggcccattcccctccttcctccccctcctccttgctgggccggccgcaggccgagggcccagcctggcagccgccgcccgcctcctctctcggggtcgccgacaggtggggcccacctgtcgggtccttcccccacctcccgccgatcccggcgcgccgccgcgccgaaaccgccgccgcgcccacgcctccgtctctcccgggccacgtcggccacgcccgcgcgtgcgccgcgtctcccgcgccctttcccctctccctcccgttcgcgcccgcgcccgagatggccgggattcgaaaaccgaatcccgcctctctctcctccccactcccccacgtcggccgtcgaatcccgccgctcccggccacgtccggctccctctccccctttttaagcatcgccgtccccctctctcgctttttccccatttcgccgatctctcccgagctccccatcgcctccgcgccgtgcaac

SEQ ID NO: 4134 - DNA, 744 bp, Oryza sativa
ccaaatggcaataagtccaaagcataagagcaaataggagcaaatatccaatatgcaaaagaagcacccatggtgcactatctcaagccacattagagaagtctatgacatttaactcattactcaacttgcaaaagcgggttttatcaagaggcttggtaaaaatgtcggctagttgatccttggttcttatgtggctaatgactatgtcacacttggtaacatggtctcttaggaagtgatggcgaatgtcaatatgcttggttctagaatgttgaaccgggttattggctatttttataacactatcattatcacataggagtggggttttggtgaagaatatgccatagtccaacaaggtttgtttcatccaaagcaattgggcacaacaactacccgccgaaacatattccgccttggcggtagagagggctacggagttttgtttcttggatgaccatgacacaagggatctaccaagcatttggcaactaccggatgtgctctttctatccactttgcaaccggcataatccgaatcggaatagccaacaagcttaatttagcaccttttgggtatcacaagccaatagtagaggaatgctttaaatatcttagaatccttttcacggccactaagtgacactccttaggagcggcttgaaaccgtgcacacatgcaaacactaaacatgatatccggcctagatgcggtaaggtaaagcaagctgggctgcaggaa

SEQ ID NO: 4135 - DNA, 658 bp, Oryza sativa
ttgtatctgcctgttttttccttttgaagaatcttgacttgaaatagatcacttgcgctcaatcctgccctcgggggctcgggtcggctaaaaatcgccaaacggggcccagaaccgagccgtgcctcggggcgtggtgaactccgggggggaatcggcaaaaacccacaatcgggtcacccataaccctcggtcaccacgttcccggcctggccagtctcgacatgtggatctccctaggcactgtcacgtcctgataaattcatcccgaaataaaattcattttctaaaaggaataatagaattaattaaaattcgaaaagaaattggcaaacactaaaaatacgtacaagaaaaattcaaatgtggcccggagaatttttgttaaattccccttggtctaaaaggagccctcaaaatttacttgaattttcagagcaccggaaataattattaagcaacaaaaacaattaacaaagtttattaaaaagaaaaacctaaaaataatctctcttccttctttgggccaagcccagcccaaaagtctccctttcctccctctttttctctccctctccttctctccctccttctcttgggcctcctcccctcccggcccactccctcctccctctctctcccgggctgcctttttccc

SEQ ID NO: 4136 - DNA, 568 bp, Oryza sativa
tgtcagggattatggacttaccgatggaaatgtgcttcatcttgtcgtgcggttggctgacctccgtgcgataagcattgagactgccaatgggaagaaatttcagttccaggtggagagttgctgcaatgttgggtatctcaaggacaagctctcagctgagagtggacagcaacttgggagtctcaaggaccaaaggcttgtgtttgacggtgaagagcttgaggataaccaattgattgcagatattagcaagaagggtgctgcagttatccacttgttcatccgcaggccagcaaaggttcagacacagcagggtgataaggaaactgttgttacagttgttactcccaaagacaatgataacctccaaacagatgctttgaaccttgcgaaaccagctaagggtaaacctgctccagttgagccaatcattgctaatggaaaggtgaaattgtctcctgctgtgatggaaatgatctactcaacaatttctggtatagaaaacgggtaccttcccgtgatgtcacagagggttcagggggagtctatttcatgaaggactctt

SEQ ID NO: 4137 - DNA, 564 bp, Oryza sativa
acctccaatagctgagcagtggaaagctatcaacactgtggtctgcaaagtggaattcgaacccaaccaaatacagcctttgaagcgaagaatcccatctgtcagagtataatctagaaactgctctggagataatactatctgagaaatgagttgagaagtagccaggtcagcagcatacccattctctacttcttccaaccaagtcggaatgcaagatgacaaagcactcaactgtaacacttctccatgagagcaacgagataaagcatcagcagctcggttttctaatcccttttaatagaccaagcgatactgaagacccaaaaatttagtgagagcacgttgttgccagggagtaaccaacattgatcatccagatgtgtcaaactgcgctggtcagtacgaatgacaaattcaccaaattgcaaatatgatctccaatgatcaacagcgagtaaaatagcaaggcactctttttcataggtcgacaaacctctgttctggggaaccaaagaacgactgaggaaagccaaaggatatcctgactgcattaatactgct

SEQ ID NO: 4138 - DNA, 661 bp, Oryza sativa
caagtaactgagcaatttctgtaggcagagaagaagatgacgattcttccaccaacgaacaaaattccacagcatgcaacaccgcattacgatggactagtcccttaacttgattaccagtgatactagggaaaagagcaatattagctgaaacacctttaagacaaactgcacgctgcttatactgaaactgcaaggttttcgctcgccaattgatttgcattgggctatgttgctctaaccaatccatgcccaaaattacatcatagctgccgagtggtaaaaccttgaagttagattgaaaggatatcccttgtacacaccaaagacaatcctccaactcagtaacacactccaaaatacccccatcagcaactttgaccttgataggtgacaaaacatgtcgctgctgagtccatttatcggccaatccctctgaaataaagctgtgtgaactgccagagttgactaacattagaatttcattgtgttgaatcaacccttgaagtctgagagtaccacttgtctcagtgccttgcatagcttctttggaaatctgacacacttcaccttcatattcagagttaggaataacagcagaatccttctcctcatcaccccactctttagaagaagaatcccggaattccaatagctcttc

SEQ ID NO: 4139 - DNA, 539 bp, Oryza sativa
ggaatgaggcgagagctcactgctccctattccccacagcagaatggagtcgtggaacgacggaaccagacggtcatggcggtggcgcgctgcatgctcaaatcagccggatgccggcgcgtttttgggggggaggctgttacggcggcggtatatgtcttgaaccggtcaccaacaaaggcgctagacggagtgaccccctatgaagcctggcatggacggtgtccatcggtcgaacacctgagggtgtttggttgtgttggtcatgtcaaatcagtgaggccaaacttgaggaagctcgacgaccgaggtacgagaatggtttttattggttatgaacagggttcaaaagcataccggatgtatgatccggtggcgcgacgtgtttgtgtgtcgcgtgatgttgtgttcgatgaggcggccacctgggcatggcatgatcctgaggcggagggaattggagaggaggaattcacgggggatttctttgtgttccatggaacccgttgttgctaatcaaggtggacaagctggaacga

SEQ ID NO: 4140 - DNA, 689 bp, Oryza sativa
ataagacgaatggtcaaacatgtgagaaaaagtcggaggtagtattttaagttgctggattgtttccaataaaaaatgactcttaaggctctaacatcaataaacttcaaatacgactctctttagaatttgggatttcatcatgtacaacaacataactcgatttatagttacctatatatcaacataactaaccttaaaagctgcctgcacctgctataaattaatgaacaagctaatattattttatagcttggaaaaaatacagcggtaagatttgtgtgtttgcatagatggaagttgcagtgcacagttcaaagtgttaccaggctatgcctcataatttaaggattctttttacaaagtaccatctctgaagcatggaccttgtataatgcatttcacaaatttcaagattctataattttgactgccaatagctaaatgttgattctccctttttaaattatatatttatattaatattaaattatgaaagactggtatggtatgcttcagccgcttagtactacacagaagatcacaggcaaaattcatagattttccttttcctcgacacatatcaaagttcaattccttttcatattactattcttagctcatctaaaataaacttaggtagagaagtttgaatcaacttgataaaaaactacagaagtttgatgtgt

SEQ ID NO: 4141 - DNA, 1811 bp, Oryza sativa
tgcgcatagtctcagcaaaatctacaaccaaagcgtgagtcgaacagccaaagatgatatcatccacataaatctgaacgaaaagttgattatcaccatgcttaacaacaaaaagcgttttgtcaacctttcccattgtaaaacctttcgcaagcaaaaagtttttatgcctatcataccatgccctaggagcttgtttcaaaccatacaaagctttagacaatttaaaaacatggttgggaaaattaggattttcaaaacctggtggttgtttgacataaacttcctcctgtataaaaccatttagaaaagcactttttatatccatttgatacaatttaaaaccttttgaagcagcaaaaaccaacaaaagtctaattgcctcaattctagcaacaggagcaaaagtttcatcaaaatccaaaccctcaacttgagtaaaaccttgagcaacaagtctagctttatttctcacaatcaaaccatcctcattttgtttatttttgaaaacccacttggttccaataatattatgtccagaaggtggttcaactaaagtccaaactttgtttctctcaaaattttcaagttcttcatgcatggcgttaatccacgattcatcagttaatacatgtgacacatttttgggttcaaaacaagcaacaaatgcagaatttgcacaaacatcatgagttgttaccttagaccttgtagtccgctcacctatattaccaatgatttgttccggcggatgtcgtcgttgaatgtgcaaaggagcagcgacttctgaagttgatccacgttttgtatcagtactggtcgaagttgtaatctccagaggaccatctcgaacagcatcaacagaaccctcagccgacgatcctggccggtctgaccggaggtgtgtcggcggtctgaccggcctggcgcccggtctgaccggccgagccgacctcatcgtcgtcgttgtcgttgtcgctctcgtcttcaaaaatacgaccatcctccccctgaacctgtgacagtgtacctgcaatatcgggtctagtacctggactagcctcatcaaaagaaacttcgcaagtctccacgactttgttagtctccaaaataaatacacgatagccacgagtatgtgcggggtaaccaagaaacaatccatcggtagaacgagcctcaaacttatctaaatttccagatttcaagacaagcatttgcaaccaaaaacacgcaaatgtgaaactttgggttgatgtccaaatcgaaattcataagaagtttttcctagtttagatctcaagaaaacccgatttgaaatataacaagcagtgttaattgcgtcagcccaaaattttctaggagttttatattcatccaacatcgttctagccatctcaaccaaaacacgattttacctttcaacaacaccgttttgttgaggaacacgaggagaagaaaattcatgatcaagacctctttcgttgaaaaattgttcaaatgaagtatttttaaattcaacaccattatcacttcgaattcttttcgaagaaccaggaaattcaagctccaatcgaagaaacaaaccacgaaagtgttgaaaagcttcgtccttagttgccataaagaaaacccaagaatatcgagaaaaatcgtcaactataaccaacacataccactttctacactctagctggaccaacagtgtccatatgtaatagctgtcccggtgcatccgtcatcacaaaaacaataggagcatgtgaagaagcaaccatcttagcatgacgacacggtgtacaaaccaaatccag

SEQ ID NO: 4142 - DNA, 888 bp, Oryza sativa
ttcgccgctgcgaactggtgtttccgcctcacgggttgcctttatccgccaattttgggcgtttaagttttaacagaccggtttgccttcgccgctgccgaaatggtgtttccgcctgcacggctggcctttatgccgccattgttgggcgtctacgtcttcaccgaccggcttgctttcgccgccgccgactggtgtttccgcctgcacggctggcctttatgccgccgttgttgggcgtctacgtcttcaccgaccggccgcctcgtccgccgccgactggtgcttccgcctgcacggctggcctttataccgccgttgttgggcgtctacgtcttcaccgaccggcttgccttcgccgctgccgactggtgtttccgcctgcacggctggcctttatgccgtcgttgttgggcgtctacgtcttcaccgaccggcttgccttcgccgccgccgactggtgtttccgcctgcacggctggcctttatgccgccgttgttgggcgtctacgtcttcaccgaccggccgcctcgtccgccgccgactggtgcttccgcctgcacggctggcctattatgccgccgttgttgggcgtctacgtcttcaccgaccggcttgccttcgccgctgccgactggtgtttccgcctgcacggctggcctttatgccgccattgttgggcgtctacgtcttcaccgaccggcttgccttcgccgccgccgactggtgtttccgcctgcacggctggcctttatgccgccgttgttgggcgtctacgtcttcaccgaccggccgcctcgtccgccgccgactggtgcttccgcctgcacggctggcctattatgccgccgttgttgggcgtctacgtcttcaccgaccggccgcct

SEQ ID NO: 4143 - DNA, 2634 bp, Oryza sativa
atagggagtggcttctgatgcactggaacattaggtcaacctgggattgactttccaaccacatatcgagttcatcatagaatagtcatgactcatgtattgagaccacctactaggaagaataactgtgcaggctgaagtcctaatcctccaatctgcaccttcatacaactgcatggtggttcagaaccacatactgtccaaggatatcctactgtttgagaacctgctgaagcaaatagcaatgttgcaaagaggtgcaacatgggtgctgaaagcctgaaacaactgccagaaattttagccgtagctgattcttcttgtaggtgaacatgtcaaataatttgactggagggaatatctttttagaaccgttgggtttggcttactgattatttttctacaaaagaagagaatttcaaacaagaacatgttggttgattggttgtaaatacaggaaagcaaacattgttcacttgaaggcatttcttgaggatttatgtacctgactcgaatgattggtgccatgttcctcttaatgaactggcccgattgcaactgttcgttctatcccagcttgcagtgttgtatatgtattgaagcatgacctggtaatacaaatctagcgcaaagtttgattatgcttagtttttcttcgctttgggacagcaaggagtgaagtcattacttgggttagatctttgagcaaattctgcctgactaatgccagcattttaatttagcgtctaaaattttgtcttgattgcccctgcaggagcttattgttcactcgatcattttcttgagttaatcccttgctagataggctccatgtctctgtattttaaggctttctaaagcaatgctctaccttaaccttaagtaccgtattttgtaaaaatggattgtgtacacggggggagacaagggtggatcaattatagtcctaagcctaactatctaaattttcacattaaaactctattgatatatcatgaactatataaagatagtactaaaagcatagcctaactgcgaaccaaagaagcaacccttgctaccaacttgaacccaaccaagtgaaatggaaaaaaatgttcactttcgtctctcaactatacgtcgaattacattcttgttagagtatcctcggaaaatgcttgcggtttgacgtccgacgcagcaaagaaaatcggacgtgatctactcatggcctacatgcatgtctagctgttgtcttatctttactctctggggctactgcatggctgcacatctctcttcttgctttttttccttagtacttcactctaatatataagtatgcatgtctgtatataaaagctatgcatgtattagtaacttcaaactattttttatcctaaaatatttattaaatctacaatccgattacaatattatatccgttgaatttaatttttacaacaagatcttagttgattatattttgatcaaaaaataaataagaagaataaaacactgttaaatcctaattgaaacatttttattccatatatgaaacaacgagttacaagtgttgcaacaccgcacctatttattgaaacactcaaagaacaccgttgcaacatttacgttaaactagtgaaacattagaaaatacttattgaatcatctaaataatatcacgtgcaatatttataaagatctaccacatcataaaatttaaaatgtgcaattaatatatagtcaaactccaattgaaacatttatttctcgcacgtgaaacacccaagttttactgttgaaacatttgtattttttcattagaatataatgatgttatgtattgttatagagatttaattacaacaaatacaacagtgaactcggattgtaaatcagataaatggtttttgagaaaaaaaaacatttgaagcttgtcactatccctgtacctctttcatttggtactatgcatgcacggtaaacttttgtcgttgttgctcttctctgcatgcataggtaatagttttttaatcgaatggatgtggatccaacagtagaataggcgtccgacgaaacaatcacatcggatgtccgatccgtagtcgtctttgtatccctcaacatttaaaatcagcacaaattgagtcccttaacaatattgaggatggtttcggctaaagtggtgccttagtctttgtcccatgtggtgcctacgtggcactagaagaaaaaaaaagaagaaataataacaccaatgagacctgcatgatagcaaggacctagatagaaaaaataaaacaaatatgttaggtccacatactttggatggcgtgagggcaggtgtcggtgccttggtgggctagcagcggatactgtctttggtgtcctgatctggaaggcggcttggcagaggatctcatgcaggcaaccgtcagcatcctggtggcggatggcgtgccagcaatgatcggtgtcgtggagttggccatcgagcggcatcgacgtcgagcatgagtggcggtgtgccgactaccatagtgccacatgtgtggaggtggagtggtggataacaagatgggtggttgattaggtcttggggttaggacagggattagttggaaaatgctttgtgtcctgcgttcgaca

SEQ ID NO: 4144 - DNA, 17508 bp, Oryza sativa
cacatgaatataatctcttagtgttctttctgtgtgatatacatgaatagcaaatatggcacaataaattatcgagagctacaattttgcggtgtgcgtcaaaaatagtagttccaatttaaaagatatgaaaaatccccgtgcagtgcacaatattttttttttcataagaaagagtttaccagaattgttctttatttggggcgttcgtccataaccaatagtatgtcttcccaatcctcttgatagatcaaacatcgtagggcgattttcaagacacaagtttctttgagcaaattcctgttcctgttcaatttgttagctctgatgtgactcttctctttaaaagatcaagccagataagttctccaaatagtatgtgctgtttagagaacatagctctttagttagttgtaaaaggtgacagcactggcatggtctgccgccgcatgttcaaggagttttgaccaaacgtgcaacactgattgctcttgcatagttgacccacatcactaataattttctgcaaactggaagtccctgatgcagtgattattgctttctatcacttgcataatcgacatactttactttcgcgaggggtaaaagattgaatatcatgctcagcgggtaatccgtttgaaatgcctgagaaatttactacacataactcaatgtgcaagctatgatgagccatttttctgataaataacagtttattgagtgtacctttataattaacttggaattttccagtgtttatgtattcagcaggatgaccagctgctgtgagcctatgattctttccttagtttagaacaaaattgtttaccaggttacaataaaacccgatgacatcagtttatggaccttgtgagaggcactaaataaaacaaaacaattaaacaacctctgataaaacatacaaattattgtctatttctcacaatgttccacatatgttttgatcgcttaatagggcacttataatttacagttgctccatggtggattatttatttagtaccatgacatggagatttcgtgatccaaaattttggtagctttagggctcctacataagggttgctttgcatgtacatttttcacaccttttcttacaatggagagacattttgccacgcaataatatcatattattgtaacaatcactgtacatccttttccccttgcttcattttctaccaagtcctgtttaattatctacttgttcccgtcagccaatattgttatcaaacttattggtttttctatgagaagttccttggatggtatgattagcttagtactccctccgtttcaggttataagactttctagcactgtccatattcatatagatgatgtataccttgattcattaacatctatatgaatgtggacagtgctagaaagtcttatagcctgaaacggaggaagtaataattttattttcaacaatggaccatactactgttagctactcacaagctatgtaatgtcattgtgttttgctcttaattaattattcacaaggataatagctacaaattgattctattatggtcaatcttcgcggttctgagttctgtgctgaccagtcaaaatgccactgctcctctctcaccagctataaatatttagccttttgaattaatcatgcatttacgtgttcttctgatggattttgtaggcatatgctgataagcatattatttgtcattttgcaagtgaactaaatcccagatatttcttctttatgttgtagatgatgttcaaggtgagcaggggcgccagtagatgtctagctagcactgtggttcttcagtattttgtaacccatgttgtcattccttttatataataagatttcattgtaattttagattaaattcgatcaatgttgcctatataaaattatgtatatgtattctctaagttgttcgtttacagtatagtttgtttccaaatttggccaacattatagagtaataatgcttatgtagaaaattctgattatcataaaggcacactgtgatgatggtcaaaggttatttgattccatggatgcacaactctatatatgaagggacaagcagactcttctgtgcattttgatcaattcagatcgcacacggcgtagcacgtgtttctttctagtatatataagaatgaacaagtgctcatatgttgattttaaaagtcattatataaagttatagacctaataactagagttatctaagaattgatcattaaagaatttatgctacttaaaagttcttttaagagtttgatcacaatatatagataacaaaaattagtactaaaagctgagataatcacacgttactcctttaatggcaaacttcatggaacatgctatgacaaaatagaaaaatgaggttctactgatttatgagctataccaaaaaagaaaaggaaacctcaaaataaaaaccagaactgttgttataatcaaaattatacatgctttactggattgtgagcaaaattagttcataatgttggaataaatgggctaggctcaatttaattcaattaaaatctcaagagcccacaagtaatgttagagagaataatactgccttgaaaatttaggtggaagaacctcaacttaaatagggtgatattagaaattccctgttaaccggttgaggtgatggttggactgccacacgcatgcgcgcatgccgagtcgccctcggccgtgggcgtagcgaggcgaggcggccgaccgagccgagcctgcttgctgctcttctgttttgtaacagacgagaataaagtcaccattaacaaatgaaattcattgtgttgtaatctccacaacaaatgagagattcattgtgttgtaacatccacaacaaatgagagatttatttgttgtaaccttcacaacaaatgaaagattcattatgtggtaaccttcacaacaaatgagatttattttgtggtaaccttcacaacaaatgagatttatttgtgtggtaatggagatctctctctctacatataacgcaaggcagaggctctcaaagtgtgtgtcttcctcctactattgttccttggtgatactctccttctgttcctgcgctgtctctctgtttccccggttctgttcatcccgcgcgcacgggtgatcggaacgagcaggtgcctccgaaactccgtccgcttgagaacctgcacgggtaggcgggcgatcaagtttttgggtagcgcttcaagcgcgactgctctgcatcatcttcaccaacatgtcgacaaccagtgacaacaacaacactggagacaaggagaaggagcctctcgtcaataccaacagaagcaatactgcctcaaactccagcagagggccattctcggggtataacgtttcactattaccgttcgttcttcatttcctacaactgtctgtcgcaatattattgcgttctcttatctatgttgatgcttattctatattaagcatgctcatgttgtacacatctagtactgccactagatctactcaaattacaaatgtcatgtttgttgtcttaatattttggattaaaatatgccgaattaattatgaccaaatttccaacacataatgcataggaaacttcgatgttatcaccaaccaattgaagcaagtggtgattttgaaaaattttcatgtaacaaaagctgtacatattcatcaataggggaaaaatggcagaaagtgaaagagttaccgtagtatacatgttatttcactctccaatttatttaaaattaatcacctataatactaggtagaaaaaaaatcttgtaaaggctgatcagaagggatgtttttttttcatattcacaagtgacgtatgcataagataaaaaaaagaaatgtaaaactaaatggataaatgtatatttaaaggaaaccagtattctttttttttttgggaattgaaggaaaccagtattctataaatggagaaactcaaactgttgttctaatcgagttcagcttcaacaggccatctgggaattatttttttgactgacatgggctcatatattttgttttaatttttaaattattaaattttgcttcatatgccatgtcagtgccacgttagatgaaaatcgagtcaaattagctatgtagcgtgcctcatcggctaaaaccaccgtccaaaccaccttgatacatatattagaccggttttgacagtccaggtaccgattatattggtagtgcggtttaaggatgaaaatcgaactagctgcaagttaagggacctaaaataaacttattcctttcaaaaacgaaagaaaacaaatcagcccagtagcaaactgggcctggcaaagcttcgtctcgagccccatgtgtcagaaggatggactcatcgtcctgctttaggtcatggcccagcatcctgcatagtagtatacctgagtcatcgatgggagctaggctcgatgtctcctccttcccgactctctccactctccccgacgccgccgcttcccgaagaccggcggcgagctgccagctggggatgcgccctctctgctgccggagaatctggatccggccggcatcggcgacggcgacggcgagggccgggcggccagatcgacggcgccgtcgacgtggggtggagagcaggtacgccacgcagctctactcctagccctaggtcgctctgcgcgctgttctttggctccgactgaatccatccggtaataagttttgtaccatatcgcccattctgagacaacacgacctgtttattagctcgatttgattctattccatcgccaccccagggacactcaccccgactgcaatgggcagcggtagggcgtgtatccgccctaccgtttcagctgcaaaaaaaaaaaggcagtgaaaagatcccctactggggcacggcaggcgaccccctgccggccagctgcaaaaaaaaaaagatccccacggcaggcgaccccctgccgaaaagatgccctatagaggcacacagtcgggtctctcggtggaggcagcgctagacactagcgcttggctttttgaaatttgtaacattagatttttttttctatgttgaactcattgctactcatgggttaatcgaaccaattgcaatttgaccattccatcctttggatgcatagttcgattactccatatataatactccaaaaacagtgtatttagccgagagaagtttaattttttgaaagaatcttacaataaacacacaactagacattaagataggtagcagaggagatacattgatcttttgatatgcccttactgctagcagttttgccgtaagacgcacaatttcgatcatactctggatgatttgtcatcctttgccttctgacttaagacaataggagtataggacatgaaatactctggacgatttcagcgtagtgactgtgaaaatgatgccggtggtggaggacgctgaactttcatattaccttcccttggaatccttgattaggtggaatccattgaagtgaaccaccagcggttaacagaattgaaccaccagaaaccgggggatcatttctgaaggctgtccacaagatgaacctggatggatcagtgacaagccacacaccaatggagaatccctccccttcgggatagaagccaaacgcaaagcgccctgagggggagacccaactttgggggccagctgtgttgatttcagaaccttgaggaatggttgtctcattgatctgagctcccatggaatgactagcttggatgatgaagagaatcaggcacagagggataatacaagggaacattgtttggccagaggaggttcttcctttgggctctgcaaaatgaactgcttggttctcatgtaaggaaataaattcaggacacaaaaacctcctattatgtgcacatgaattaaaacacaacatcagggataatcacaactcacaagaacgttgacctggacctggacttgggaaagggaaagtactaagttagtcaactactgatgtaaagtgaaagtaatcttgattttttttttctgggcgtagccgtaccataatggtatggaagcaacatgtcagtacaaggaagtccccaattttccagggtgacaaataacacattggacaagtcatgcaattaattgcgcaggaaggtctgggggcaaaaaattgaaccgaatgatggcaatgtatcagaaaatgacatcctaaccaatcaaagcacagaggaaatagaacaatcaaatatgcagtttctcaatttattacaatattttttcaaaactgttgctctttgagtgtgctatatatggcgacactatattactagttagggcgaattgcagcgatgaagattaaatgtcacatgtttgcacccatttaaaacagaaacacatgatcattccacactagacaaatacaacatgataatttgattggctcacataataattattttttcaaaaattgttttaatattaaaaagcactttactgatctctctgtagtcaaagaccatggcagttggagtaaatattggcgcaactgcgatgtgctacactacaccccaagcaggaatgtttctattgctaaagtcaagtgaaattgtagtgcattattgaaggccaggctccagctatagtgaaaccagagatatatagctaacggtagcagattgtcttgaacacagaactgcttaaaactttatgaatctatctagtcttttcaaatctactagcagctcatattttgttccctaaccattgctcaaattttgttgcgctgttgctgacaatcctcagcatcatctggattgtgacacaggtttgctatccttatgttttttcatggaaatataggtgaactaggtcatttacatatgcaggggtaccatttgaagtgcaagttacaagttgagagggccatggttacagatgcatgtcacctcaccattgcatgtggaggcttgatctgctaggaactttggctggctgaagaaacaaaaaataatcttatttgcttttacatgctcgtttgttaccgcatggagcaaactatctcaaaatgttcttttgtccaaaaactttgcttcggcacaagatttgtacatgctatgtaaagtatttttgcaggtatttgccctgtcaagctgatgatgtctcagttgtcaatgtgaacaatcaatacttttcaatacaacaccgttagtcacggcaaacagtatttgtacatgcaatgcatatttctcagaaatccaatttatatatctctgttttcatgtgagttcagattagaaccgagacggcagcagagtttgtataaccccttttttttactttgaaattcaatgggaaaatatgttctgaaagttgtttttcctttgcttgatgttccgtagtaaaatgaaaaatttgcttgatgcaactcaacatgtgattttcacctgtcctatgaccaagtatggtgtgcctgtagagacgcccttggctggagttctgttcctttttcttttgatcattgtttgctgcagctgtaaacgaaacaagagctgattatcatgtagtagtgaacatttcattccacaaatgcaaaaagggggaaataatttgaagtgaaaattaccattcttgagtgtacgggtgaaaagtagattttaagaagagtccaagagaaggaaaatgaaaagatgtagtattactgaaatgcccaactcaggggtagcttgtccaacagtccaaacctcactcgaaatttgaaatgcccaactctgtttctcgaaagagcatggttgagcccaaaacacattgaagtgagcagacgatcgatttgaacaaatatttaaagtgcacgctactatgacttttccttagatactcctagttcatactactatgaaaattttccggtcttctcgagtacctaacatttcagatcgtatctatttggcaaaacaaaagaggaaaatatcatatgtacgtctaagtatgcagtcttgttttcgattaattaacactacttaaaaaaggtttttatatgcggctaaatttatttttcacagaaaattcacgctataatgtctaaacaaggcttgtgaaaataaataatttaaggtggttataggcggccaactctaagagacctacccgtgaaaattggatttcacaaactgcccaaattagttttcctaggcggtcctctaaagtgaaccatttcttcaaatgtttttgacggaaagaaaaaaagaatattaagatccaatcataatatgcaatttcccaaacttcttataagtaattgtaggcacaatcacaaattcccaaaactaaaaaaaaaaattgcaagttctccaaaatccaagaactcacaaattcctcaagcatatgagcaagcggatggtaataggtcttgcccgagactttggtggcctatggagctaccgttgacaccctaaccgacctttattgacgccatcaagtcatttttgtcgacggcacgcaagccacgaccctcaccaaggtcttaattgtcaccaatccatagtcctgatcgtatatttattttgcgacggaatgactagtactaaccaaacaaccccaataccaatttgagcacatacaagaaacaataatccttcgggaaaacattaaaaaaaagaagaaaaaaaagggggcaaaactgcccagccgtgaactgggcctggaggacgtgaactggactcatggtaatcttatctcatggcccaccttatatggaaggctcgatctcgcttcccgtcgtgccgcccctctcctcccgacttctctccccgatggcggcgcttccccacgtccggcgacaagcagccagctgcagatgcgccatctctgctccatcggccatactctccacggcatcggcaacggcggcggtcgggcggcgccaagcttcagctcgggccagatcaacggcgccctcgccgccgggcctccatggagagcaggtaggcctcgtctctactcctaacttggtctgcgcgacgcgctgaatccatcccgcaattagttttgtcccacctcgctcattttgcgacagagcgacctctttttaaactctgattgattctattgtgttgcctccccggagacacccacaccgactagatacagcggtaagatccccactgtggccacggtttggcggacaccttctgctgtaaaaaaataaaaatggagcagtcataaggtcccctcccgttacggggcacggcaggcgcctaccggttaggctgcatccatcatacacgttaagatgtcaaatacggcatacatacagtcgggtctctcggtggagacagcgctagacattagcgctttgccttttttgaaattttgtatcatcaaattattatttttctgttgattaatcacgatagcagcaatggaggcctgcatttgaaccccctctgcgtttcaattccaatttcctttgcatttgtatttgaataccatatttaccagcttaaattatctatggtatagactacggaatgtgtatagcaaactggaaaaattagagatgtggcgatagaggagagcctatcatcagcaggtatgcaaagaatttcctgtgaaacgaagtactgaaatactcttagcagaggtgattttttttaagccagagatgtgaatgatttgttcacgctgcaagacaatggaaataatgattgaagtgaaacatcaatcaaatattttcagccaattgtctgaagatgtcaataccgggattccaaataaagcaataagatcggctatgcgctgctttggctgctccgacaacctctgagactgagctgagctcatccaagcatggacgaagtatccaacattttgaagtcctttttgtgctcaaggcattcatgtaagcaaaaagaaaaatgatctcccacacgagtaatttgcgtcaatttttgtttctgaaaaggataccctttcttctagttttctcagagtgcaatcaatcatgaggacataatgcatgctaatgattaccagaagctgcgcctagaagaagcagaagcttcacaggcgtcataaagggaagctgaagctttaaggttttatgcctatcatggatacttagaagttgcaacaatttttctgttgctacatggactggatcattggacgagctggtgcagtggtgctgttggagcaccattctgttttcaggtgggtgctctaaatggcaaagcatgttccctgctgaactgttttaagacctcctactaggaagatactagttcattttgaagtcctaatccgccaatctacaccttcatacgactgcatggtggttcagtcagctcaatgagcataactgaacatttcaagaagtttttttttaagaacaagaaccacattccgtccatggatatgctgctgtttgagaacctgttggcaacgttgcaaggatgtgcaaatgaggtgctgaaacctgactaccacaaattttagctgtagctggtcggagcaaagtaatgtctaggtgtaacgcactgtaaatttgatagatgagacgcgtccctaaataatatcctttttaagtctttgggtttggcttactgattctttttgtacaaaagaaacaaatttcaaacagagcatgttgggttactggttgcgaacacagcaaaacaaacatttttcactggaaggcatttcttatggatttatgtagctgactcgaatttatcactggaatgcttaatgaactggcagaaccacagcaattcgttctttttcctagcctgtagtgctgtatgtgaatgaaggcatgaagcatgacctaggaatacttgacgatttgttctgtacttatttgtgagattactagccccaacaaatttagcgcaaagtttgattatgcttggtttttttcctttgctttgagacggtgtcacgccctggcaatgagaacttggttttttctttgctttgagacggtgtcacgccctggcaatgagcgatttcaaggcacggcgactagattcatttctccttgtcgatcttaatcgaacgaattacaacttaaataagactcgatctaagattgttcatgagataaaacgtgtttgctgtccatcggagaacgaataacactgcaaagtcatccctatttttgtccgttaatgatgacaatggcaactaatcagaaggaatttgcaatttctcaggatttagctcgaagtagagcggtacttttttccccgcgagaaaccaacaagcatgagattctgactaacagcaatcaccatgacatggcccggcacaagctatcggccgctgatattgtagcaatggtagaggatacgaaccccacgaactcagcctaaatgaagattgttgatcaatgcagagagttgatcaacagaacaaataaggcaataaagcaagcacaactagcgaacatatcaagaaacaaaagcatccagacaggaacaaaccccagggccaacgggtacagatttcccaccggaagtctcactgtaaacacaggccaagtctacctcctgttggaacgccaaaattgcatatccagtatccagctcaagacagcctaaagataaaaataaccatgttgcatacatagataaggagacattctccccagtaacagaagaaaagcctagttcatcctccggatgagctcgttgatgtagtcctcacggttgccggcatcaccaccctcgacatagtggttcctcttcttcttgaggccaccgagtggtgccttcaacttgaagggccacaggaagttgttggcctccttgaagtgtggaccgacagtcatgatctcgtggacaagatcctcaatgcagatgatgtcatgcttccccaagccctaatggttgaccaacaataggccaaataagaatttgattagctgtaaatggcatatatacaacacaatgaaagcctacaagagcaaacatacctcctcaatgactttgttgttctgaagaggaatcctctgcttgttgagctttccgtaacccctcttgtagatcaattccctgacactcttcaggtttgggtacctgatcacaccagagaaggtacttgattcagccaggtagaacattaaaaataaccaagtatctaacaagctcaaaagctataaagtcactatgagaaccctactgctgatcaaagtattatcaaagcaacatttatgcctcaagcagcttagcaataatctaataacccaattgagatagtgtcatcattctaattctgcaacagttgacatatccaccatagtactttcaatagcttctgaacttagatcaaacaaacaagattgaacagaaataggcaaaggccattaagattaactctttcaagaatgtctaaatggtaataccacaagtccacaacagactataaacaagggggaaacttatatgttcatcacacaattttaggtcttaaaagcattgataatttgcgatggaggattacaagtctgtaacagcaagcaataattagcacagctaaatatataaacagaacagcagctaaaattgataacatacccatatgcaacatatggctcaaccctgcgcagcatgttaatggttgccttgttaaccttgaggaagacaccattgaagatctgtagaatcaaacaattaagcacaaagttaatacaccagcgtacgcaagagttcacgcatttctaagaaaactggttcataaaccaacctgcctcaaccgcagaagctgcaagatcttcctggtcttggggtgcatggcattgatactacataaagcatagcgaactgtcaatgcttatgcaaacaaagacaattttaagccgtagcggtatagtttctcacccacggatgcggaccacaaacagaagtttggcctcagggctgacgtagaacccacccttcatccgagcctcacgcttgagctgcacaagctccttctcctgcaaagaacacaatcgtcacaataaattcaaaaagataatgatcatttcagaaaggaactatcccttgaacaatgccaacgaacagattaactacacttcaaaagcaaaaaaaaaaacataatccaatcgcccaccagattaagtgtgttggcattaaaacaaattcatgggataattagaccatttaatcataccagctctcagcaaaacagattaattagaacatgactacaccgttggtttttaaatctaacgcaagttgctaattactggcatctagctaaaagaaactgaaatcttgaattaaacgggttcagcatccaccacggacacctgcagacgcgcattagacgcttctaaacaatcaatcgtcacaggagaaaacaattctcatattttttagcggacttcacgatgcgtcgatgcgcaacgcaaatctaaacgaaccattcctagacgccacagggttccgcgaatcaacgggcagcggggaggttgctctgctcacctgcgcgtcgtactcctgggcgtactgcttggcgcgggcgaagatgagcttgcggctctcgacggccttcttcttctcggcgagcgccttctccttcctgtccgccgcccactgctcctcccgcttccgcttcttcagcaccgactccggcaccaccgccgccttcgccacctccgccgccatctgcacacacacacacaccgctcagagatccgcacggccgagcagtcgctggatcgagctagggttcgggagcttaccgcgatcgagtcctgcgagagagagaagacgagatcgagaggggagagagagaggaagaggcggcggcgaggagggagaaggggatttatgggggaggcgggaggttttagggttagggtttcgggcgcggctcggggtgtggatcggacggctgtggttgccgcggccgcgtgatcggacgggtgaggagggctctgggagggatgggaaatggcgaatgggagatcttccgagggggtgtgcggaaatgtgacggcccaggttggtcaaaggtttgttgggccggctgacatccataaatgtgacggcccagattggtttgggccgaatgagatggtgttacgggccacatagttggctggctagagccgataataataggggcaattgcgtttttggccatatttcgaagactaactactaatttgactaactctaatttcaccctgttttttcaagtttgctcatttaaccctctttttttaaacgaagatggaacttggccctattccgtgaaggcaagatgacggtgttaactcaagacaaaagtttcatttatacccttatgaatttaaccatgtttctcaaagttttttattacacttatcagtatatattgcctcaaacacaaaaatacatggtgcaaaattatgtctaccaaaaacaaaaaaaaagaaaaaaagtcaagcaataggtcaccgcgtggccgaggagcggcaaccaggggcggcgggaggagcggcaatggaggggcagcgtcggctcggcgacgaggagggccgctgctggcggcagatgagcggcggtggcggctgcggcttggtgatgaggaagtccaccggcggtggcgtcggctcggcacgaggaagaccaccggcgacggcggttgcggaggggcggcgtcggcgtcggctcggcagtggcggcggaggtagttgccgaggggcggcggaggccaccactcctctctccgcccaccggctccgctgctccgtgcgccggcgctcccttccttcgtacgacgccaccgccggcgctccctccctccccgtagaacactccatccattgtggcataaaaaaaacatttttttctattttctaaatgaaaccctaacggtgtgatgaaaccagggccaaacggcaactccaattttgaaaagcagggtcaaataagcaaactttaaaaagtagggtcaaattagtagttatagttcagaatagggtcaaacgagcaattgtcccataataataagggtagtacacccgaagtccctcgtcttgtcaccaaattacaaaatcgtccttaaattgtaaaaccaatgagaaggtgggcccgaggagctcgcccactctgcccaataggggtggcagaccgagaccgataaatttggtcatcaattcggtcctacgtagtaaaagaccaaattttttcggtcaattcggttagtctcctcgggtaaccgaatagaacgaattatcaaaaatgtctaaatacaacctacaatccactacatttaataggattaaactctaattttcacatccctacttcttctaggcatgcaacctaataagagtctttactcataagtgcttatgaatttatttttgtgatttttgtgttgaaaatttccattatttctttgcatatatgaaaatgttgttgaatttcggtcaggacaaagaccgagagcgaatttgtcggtcctaacatttttgcgctgatattcggtctttatttttcaaagaccgaaataccgaagaccgagactggaattttcgattagaccgaatgcccacccctattgcccaacgccgtatgcgaggagaaaggagaaaatgagaagagaggaaggagagaggagaaagagaatgaggatggcatgcgggccccacatgagcccatcatttttagttattttctagcgtaactaacataagtactacgtggagcaaagacttagtcaaagcagccatctaggcgccacatcagctaaaaacggggacaataccgtcaagggatctcgttcgcactggttttttggttttttaagttagagaatgcgttatatctggttttacggttcaagaacgattttgtaattcggtgataaaatgagggacctccgctgtacttttccctttttagttgattggctagctagcttgcacataggccaaggagggaagcggcgcgcgcggcttcagctcggaaacgtgtcgcgcttcggttcgtcgaaaggagaatgacacagattgatccctctgttttggtgtggaaaattcggatcgattacacaatcatctggagtatttttttttgagaagaaggaagagtggatagcttagggtaagtactataaatatccaagtacaatctcttggagagataaagaaccacccctcaagaggtaacgactatataaaattcaagacaaaaggagagagaggaaaagtagattggacaaacaaatattggggctaatctattagaattagtatatatatactagaaatcagcgcgtctgttggcgcgccctcatagttaaactcatactaagatctctttttttaaaaaaaaatatatatagaagattatttgtccattgttaatccaatttcagtaaaatcctttaattggtttcaatcaaagttgaattaatgaagactgcattaagaaaacaatacagtatatttgaataggtccgttactttattctaaaaaaataatttgtacaaaagaatgattatgttttatttgtatataaaagaatacatgttatgaatcaattgtaagcaattttatggtagtaatttgtatttatattcagtttttatgtttccatagtttatcgtggcaaagttagtcattgagcatccattcgatggttatcaagctgaccagcgctaggttgcacgagtgcatgcacatgcgtgaccacggagggaagacaaaacatacggaagatttgggaattgtttactccctatattagtcgttttggacaaaagtaaaatcaaactttaaaatctttgactacgaatgatttctaaaatatttatcttagaaatatgaaaaccacatgtgtagattagtcttaaaaagtacttcaataaaataatatatttgttaaaatgtctatatattttataatagaaaatagttatcaaagttactttttaaagaccgtgtccttatccaaaacgacaagtattatcaatccggagggagtacaatttagatgatgtttggatcgagggactaggatgtttaaacactaatttggagtattaaacatagactacttacaaaactaattgtataaatgagagctaattcgcgagacaatttttttaagcctaattaatccataattagcacatgtttactgtagcatcacatacgctaatcatggattaattagactcaatagattcgtctcacgaattagtccagggttatgaaatggtttttgtcattagtttacgtttaataagtatcccaatacatgatgtgctgtatcatacacaggggcttactaactcggttgaactcaagccgcttgtcctcttcaagttcacaactccacagatttgccaccgatctcaccgtccagcacgagggtcagtgccggcgtcgctctccatcgccaagtccattgtgcattttgtgagcacccaggaccgtcttcgcttatgtcgctcagcgtcgtcagatacattggtgga

SEQ ID NO: 4145 - DNA, 702 bp, Oryza sativa
gctgtttgttgccccagaggaggacaacatggagacgatcgtcgcgcatgatgccgcttgtaatcacgtggaactcgtcgccagacaccgcagatcttgcccgtggcattctgatagacactgagagtgcccgccaaggtggtctccagttgatgctcctccaggattacacccgcatcatcaacgaattgaatggcacgcggacgaccgattcgcgatgaggtgtagaaagagtagtatagattcttcttgtggaacaagaaacgggcggtggccaccacattctgcggattgtaggtggtgtacatggacttcatttcctcacccttgaggaaataggaggtgcggcccgttagcaacgcagcgtaatctataaatagggatcaaatgaaaggtggagataatccaggtgttagataaatacaatagttctcttgttattaaatgtaggagctggtgaatgggattacaatttcccgcaggatttggcggattctattgggatctgggtgggtgtccggtacttttgtacttacgtttcatgttgcgctcttcctcttcattgggcacgggcacatccaaggctacatccgtatctgaaagatggagggaatacaaatagagaataagatgatgctgggcgataaggtacgaccttaaatggaatttagatagcaacaaatgcttcaaagcaaccgaacc

SEQ ID NO: 4146 - DNA, 10732 bp, Oryza sativa
  unsure (1)..(10732): unsure at all n locations
cgctcttgtgcttggcgctcctcctccagtcggcgtcgttcggcttcttgtcgcacgcgttgttcttctgcttttcgggcttgacactgctctttcgtctcattgttggccatgaaaatgccgaaggagaggggtgtgtagttgtcttcaaagccttcgtcgaagtcgtcgtactccacgatctccgctggtcatgagtcgacaccgggggagctgaggtagccgtccagttgttccgttgaaaccgtgccgagaggctggagtatgacgccgacttccctgaagctagactggatcagggccggagccggatctcgcctagacctacggggagaagacgcccttgtggtgaagacggcaaccaaatcattggggagtttcatcaggattggcggataggctccatcgtcttgatcagatcgcgttggagtagattggatctcgtccgagtggttttgggccgactcggatgaaatgatcttggagtagatctcggccgagttccggataccgaacgggatggagacctggccttttccgactggttcgaacccagtcgaggagagaaatcttgcccaagtcgtggtgatgaaatccaggctgccgaatcaaaacgcctgcccggtgggaagacgaaatcgtcgatgccggagacgaaacccatcgcactactcggtgaaaaaactgacgctacccctacctggcgcgccaactgtcgaaacatgatttcggcaatactaaaagggggtggctatcaagctagaaaagcggatgggtttagagaaagaatcatatacaggtttaggccttcttaacaagaagtaataccctactcctgtccggggattgccccgccaagtgtattattgatcgtatgacctgggagaaaaatcgtgccccaatagacacccgtaccctccttatataggggaaggggtccgtattacaaggtacagcccatattcctaacggaataggtagttacagataagatacaattgtatccgactaggatcctgggtattttcttgacatacaagtttagaatttaacctaaattcctttaaagatattctatttatacatggcaccccatacccagtcggatatacatgccgtgtaggtatagggtatccataatctccacaccgttgtgcatctattttcatatcattctctactacagccacgtatcttttcttccctcaaaaaaccatctcttttcttttgatgagttctctgccgtattatttaatttttaagatggggagaaaagttttacgaggtttctttgttttctttaataatggttaacagggtttctttacgtgagacggttacagaggtgaaaagttgcatcttccaaagggcaggtagttaactctataatgccgttttggagcgataatcttcgttcgttcgttcgggtcttccataattaaataggcgacttgatcttctctagctcgtattatgaaacacttacttgtgaaaggaattaaggaaagaatggcttgctctgactgtatggaacatacacatagccggtggctgaagaaattacgaaacactactacaaaacatcaaataggtatcgccactgcagtgccgatagtgctaaaaccggcacctataagccttttccttcctccacgggttaaaatggcaaaaaattggcaccttttagtaattataggtgtcggttttaaataaaaacaggcacctattatattttgtgtcgttttttttaaaaaaaggcacctataatatattataggtgtcggttagttgaaaaccgacacctataaaatattataggtgccgatttttaaaacaaaaccgacacccatataacacgagccgagccggtgggccccaccatgaggaggcgacacgagaggagataaggtttctctctcgctcccttctctagttctctctcgctctcttctctccctcccttgtctcgctctcttctctctccttcccttctctgctcgccggcggaggcggcagcggcgaccgcgccctcccctcccccaaatctagtgggaggagaggcggtggcggcggcaggaggggaggcgtcatcggcgggcggggtggttggttccggcgtcggcggcgggcgagggggggcggatccggccgggagggttgtcggcgatggctcggcggcggcgggaggggcggcagcagatccgacgatggcgtggctcacgggcggtggcgacctcctctccgccagatctggcaggaggggaggcagcggcggcggtggagccctcccctacgccagatccggcggggggtaggcagcggcaacgacagcggcaagctccccacgggcaacggtgagcacccgagtcccccaaccatctcctttgcttgcgatgatgtttgatgtgagatgaatgttgattcaacgatgtttgatatgagatgaatgttgccaaatttttttctgagatgaatgttgcttgattcaattgtttgattcaatgatttatttgtgagatgaatgtttgattcaaatattttgccaatttttttcgcggatgtgggaggagggactgctcagctcgatgcgccggctccatcgagccgacttttttttttcattcatcggacctaaaaggtgccggttctaatgaaccaatacttttttattttcaatcagtgccgcctcccttgtgccggttgggaaaaccggtatagaagggggtttctcaaccggcacagaataccttttctgtagtagtgaaaggtggtttatatgggtcatagaaggtggcttccgctatgtcacgtaagtaaaagagaattttagcatgctcccaaagattgatgtgtagtagatgaggttcacgacttggtcaaggtcttccaacgccgctcggagagagagatgaaggacactagctagacgcggttcccgcggtgtgacgccacgcgcttggaaatgtcaatgagtgattaagctattttgttttcatttctgatacttatgttttgttttatttcagatatttatttatcgttcaagtaacagttattacttcgtagactgagaccaatacaccgtaaaattttatctccgaatatggatttgtatgtgttttagtttccattcgtaatttaaaagtaatccacacttccacagaactatctacatatacaggaagaaattggtcgatagttcaatcaccgagcatttcaacgtgaagctctacgcgtgtaagaatatgtgtttggaaccccaacccttttccatcgtattccgcacgcacgtttaaaatcatattgatccacacgctgtgtatggaatcatctaggctgtgtttggaatcatctcttcccaacatgcacagtacccaaaaaaaatagagcggtctattagcacatgatttattagcacatgatttaagtattagcttttttttaaaaaaaaaatgaatcaggtatagttctgggcctcagggagatgaaaacagaacagatacgcatgcatatatacgtacgtactcattcttttaggaatcctaaacttaaccttatgattcagatttcagaatagacattcaaataatcgaggcactaaccttctctactacaatcatgtatcttttcttttgatgagctctgccgtattatttaatttttaagatggggagaaaagttttaccggtttctttcactactggagaagtgattttcgccgggtcatgcaaaaatgatatagtcctgtttcgaataggaagttaggaaccggccggactaaagatcatttttagtcccggttaaaaagcgcaacagaactttatgatctaaagatcatctttagtccaggtttattttttgccagccataaccgccggacatatttagtcccagttggtaacgatcatctctaaagtcttcttcctccatcaaaccgagccattgctgcaaaggtttggaggagaaagggaggtgctgctaaaattttttgtgaaaatgttttaatgataatatacaaattagagggatctaaaaggttagcaactgcattcgctaatgatgcatgcttagcatattgcatctatagctgtgtttctatacattgttgtctcttaaaaggtttatggaaaatgatgagagagaaaatttgttaagggaaaattaggttacttttaaaattataagcatgtggataaaaatgttataaaagagatgacaaaggaaaaatatagaaaattaagaaaaaaaaagaaaactaagttaatttaataaaatagttacaaaaaattacaatacattaaagatatgtttagaactttaaaaaatatttaaaacatgaataatatgtgggattattgtatgattatttatatataattattgtattattatttaattagtttgactttcgtggattttatttttacgatttttgtgcatttcaggtagatggatcgacaatgaatatacaccgcggaccgatggttcgcagagtttattggctcgtcgttaatctcagccacttctgcccaggtactatattttttttaacacaatattacatagtcaccaatttaactcgcattgcttggaaaactgaactttgaagcatgtcatcaagtctattgctatggataagactacgagaataatggacgcaattgaatatgttacatgttactccctccgtcccaatatgcagtagcaacctaggatgggacggagggagtagttactaatcactgagcaaatgagcctagatgaaacatgtcacaaattaaaagagaatatcgttgtaaccaattgataatttcgaaatatcctgaatatgctgccacccatctgttgtgattgtagcataagctactatagtctgcaaatgaactgataacatattttcatcatctgaacacgatgaagttgaacttgcatatatccattgatagggactgaactttcatatatttgtattttattttcaaatatagtgatataaatggtattttatttttaaatagtgtggtcatcatgtagaaatattattttgtagtttgtaaactatgagaggtaacctcaccaactaaggtgtagaggtaattgtatccaggcaacaatactatagagaagggatttagtgtcggttggaaaaccctcttcggtgccggtttttctaaccggcataagggaggcagcactgatttgcaaatcaaaagggtgccggttccttagaaccgacagcttttaggtttgacgaataaaaaaaaagccggcccgcatcgagctgagcagtccctccttccacatccgcaagaacagaacgaacacatcacacaatcacaaaatttggcaacattcatgcattactgttgatgcgaaaaacacacactggcctggaagatctgcttaactcctgtgcaggtccaaatcttgcttttaggttcataagcgtgctagttgatttgatcctgcaatcaacaagaataaaagacaagaaaaccgatgttaaatccataaacgatagccgatcggctaggagccgatgacatatcatcaatcgtcaagccgatgtcattgtcattagatcggcaatgaagaataaagcaatataaaactaaatctactcgatcggctgcagatatcaacgacaaataatccttttctcggtgtatatttaaactaagtgattgagatagatcgaacatcatgtcaagacaatataaatcacttaagtctaaagatacgctaagataatgattatatgaacatttatagcatagccatcagatagatctagcacgtatcggctaatactccgataccactttataataagatattaaaacaaataaaatatatcaaacagaaagcctaatatactctaatgcaataagatcttaacataaaaatcaagcatataaagtataaaatagctaaatcaggtaagatcgtctgaaactccgacactatcttcgttagaaatcataaaacgagctagatattgcagttatgaatattacttaatagatcgaactcaaccgatacagcattaagcataaaaacaagtacaagatctaagcaagattatgaaaacctctaagagatggtagatatgcgatataatctagattaataacaagatctaactctatcggctactttctaacaacaaaaaccagccgattgcgggttagataacgtaactaacaaagattataaagcatatataataactcgacgaattacataaataagattagagtgtcgtaatgatggaagcactaatcccgagaacgcaagccgccatgacaagtttacctcttcttgaagatcgaaatcgatgcagctcaacctgaaagcaagaactcgtcgaaacaaacgaaagtgaaaaagggtggcgatgcgccaaaagtgttattgaactgttattataaattacatgggtttgggttatatttattcccgagatacatggtaggtccttgctggacatgattcttatctctaacaaactctaagatacaaacgaatcttcacggcagacttttgctgaaacatatctttaaagaaactattcaaaatatcctaattaatagatacaattgcctatctgagagcttatctccatcgtgacaatcctttcgtagcacgttgatcgattccagagacagttttataaccatctcaatgaaatcggctgtatcggctgtcctctgtccgatccatctcagccgatgcagactctagctgatgccttcgcaaccgatgcatactctgttcttcgaatccaattctttgccaaatccacttcgattccattgccgaacctggttcatagtttaccaaatttggtcgctaacaattacacaatcaaatattcaacaagtttacatctctaaattgttgaatgaaacaatcattgaatcatcgaatcaaacaatcaaacatcactggaatcattgaatcaaacaatcaaacgctcaccgtcgttgtggggagcctgtcgccatcgttgccgctgcctaccccccggcggtggcggagccctccccgccgccgctgcctcccctcccaccggatctggcggaggggaggtcgtcgccgccgccgcctcttgctgctgtcgcccctctcgccgccgccgagcggtcgccgactcccctcccgccggaactagaggaggggaggacgtcgccgcctcccctccatccgttgggccgccgcgggatcccctctagccgccaggcctccgcgggctcccctccagctcctgccaccgccacctctcctctcgccgagggagcagtcgccgcctccgtgccagcgcgcggaagaggaaggagatggagagagagagagagagattgaagagagcaagacaagagagaagggagggagagggggagagagtgagagagagaaagaaaagcgagacgatgagagcgagactgcgagacgaccttatctcctccggtcgggtggtggtggtggggcccgccggtcggctcatccgatgccggcttggctcgatttgtataggtgtcggtttttaattaaccgacacctataatatattaaaggtgccggttttttaaaaaaaccgacacaaaatacaataggtgtcggttttatttagaaccgacacctataattatttaaaggtgtcccttttttgcgattttagcccgcgaaggtgggaaaaagcactaccggcacctatagtggtgacacatatttgatgttttgtagtagtacaacccattttgatacctccattcaaacaaaatataggatcattccaacccatcatatccctcaaaccaaacaaaaaaacagggttcgtttcatcccttcaaccaagcaaaaaccagaaccattccattccaaaaaatagggatggatccaacccatcccatcccatccccaaaccaaacatatgctaagtgaattgttcaatcctattttttggtgttagatgttcagtgggatgaagagatggttcctagattttttggtcggtcgtttatgctaatcgaatcatacaaatagcgaggatggtgtagaattgcgacatagtacatctggtatgttcactgttagatctgcttatcatgtacaatgggatcataattttggcaatctaaggagaaggtcgaactgaggcttctctctgtaatgagctagaaattacatatagtcttatagatataatatagttaaaaccatagtatattttcatcacaacagataaatcagtgggcttttccattgcatacaggaatgtggagattatggataccccatacctacacggcatgtatatccgactgggtatggggtgccatatgtagatagaatatctttaaagagactcgggttaaatttcaaacttgtatgtcaaggaaatatccggtatcctagttggttacgattgtattttatctgtaactacctattccgttagggatatgggctgtactttgtaatacggaccccttcccctatataaggaggggtccgggtgcctcttgaggtacgatttttttcccagatcatacgatcaataatacactcggcggatcaatccccggacaggagtagggtattacttcttgattaagaaggcctgaacctgtataaaattccttctctaaacccatccacttttctagcttgatagccacccccttttagtattgccgaaatcttgtttcgacagttggcgcgccaggtaggggtagcgtcaagttcttcgccgactagtgcgatgggtttcgtctccggcatcgacgacttcgtcttcccacccgggcaggcgttctgattcggcagcctcgacttcatcaccaacgacttcggcaagatttctctcctcgactcggattcgaaccagtcggggagaggccaggtctccatcccgttcggtatcccgaactcggctgagatctactccaagatcatctcaaccaagtcggctccaaaccactcggacgagatccaatctactccaacacaacctgatcaagacgatggggcctatcccttaatcctgatgaaactccccgacgacttagccgtcgtcttcaccacacgggcgtccgctccccgtaggcctaggcgggatccagcttcggctccgatccagcctagctccagggaagtcggcgtcatactccaacctctcgggacggtttcgacggaagaattggatggctacctcagctcccccggtgtcgattctcgaccgacggagatcgtagagtacgacgacttcggctaccactacgactaccgcaacctcgacaacttcgacgaaggcaacgaagataactacacgcctctcttcttcggcgttttcatggccgacaacgagacggaagaacagcgtcaagcccgagaagcagaagaacagcgcgtatgacaagaagccgaacgtcgctgacaggaggagaagcgtcaagcacaagagcgagaacggctacagcgtgagcaacaggagcgcgaacgggccgcgaaggaggctgaggatcggcgacagcgcgccttggaggccgggcaacgagcacgagaacttattgggcaacaagacgttgaggggacggcggtttttcgcaccccccagcagaacgcggttgcagcgatcacccttctcgacaccctcctcaaggaagtcgcactcaatcaagccaatcacctcgtcaacatcttaaatcagaccaagaccatgatcgccgcttcggtcccggtgaactccgcaagcgtccgtacgccgactggcagccgagttccccctctccgatctcaagactatcatcaaccaagcctcagcgtcgtcggcgcgggatccagtcgcaggagcaaggatcacaacgagtgatccgtccactcgcctcctgaccgacgcagggagcgtcaagctgaaccgcccctgctccccacatcgcaggcgtcccatcgcagncgacntgcgtcgagtgatttggcaagcgggctcaaagcngactgaaatcaagaagtatgacggcaccactaacccggagtcttggctcaccatctacagcctcgcaattcgcgcagcaggaggagacagcaaagccatggcaaactatctgcctgtggccctagcggattctgcccggtcctggcttcacgggctaccccgtggcacaattagaacttgggcggaacttcgcgaccacttcatcgccaacttccagggtacctttgaatgccctggcacacagtttgatctctacaacgttgttcaaaagtctgaagaatccctttgagattacatctgacgcttttccgagcaacgcaacaagatctccgacatcaccgatgacatcatcatcgccgccttcaccaagggcattcgccacgatgacctagtcggcaagttcgggcgcaagcgtcccaggactatcaagcagatgttcgaaaaagccaacgagtatgccaaagccgaagatgccattaccgcgtccaagcagtcgggcactacttggaagccgaacaaagatacgccgaccacaggggggagtggaagtaccaatcacaaggatcgcaagtgtaagcccgaggaacttgtggcaactactacaccatcctcccgacaacgttcacgcgtcaacacttttgacaagatcatgaactcccaatgtccacatcatccaaattccaatcacgcggccaaagattgcttcgtctacaagcagttcgcagaacaatatgc

SEQ ID NO: 4147 - DNA, 13123 bp, Oryza sativa
  unsure (1)..(13123): unsure at all n locations
aatcatttttttgttttataggttcaatgttttgttccccttttcgtgagctgaaaatatttcttgagaatacttatgaatgcccatctaatatgaaatttttggacataatgtaggggatagctttagcagcatccagtactagctcatgtgcaaaattgctatggataaatgttatgatgtgatgtttttatcaagctaaagcactacatttctttgcaacgcaagttctattgaagagatcggtttgtacatatgtcagaccaccttctaattgcgctttataaccacttagtttccctaatataatccactgtacgcatgcgccacttttctgtggttgctatttttgctcaagtgtacatgatcatatagatagcactccaaacaaaccgatcaaaacaactcatatttgaactttggtggtatggttcgaatgtaatgttggctatatctaccttctgttgcttttattatgacaaaccttctaatgtcagcaccggcacacgcagcgtagcgcgtggctctttctagtagatagtatagcgaaagtagtaagcacctcctgcttcatatagaggttatattgaatggttggcatgcatataactctgctcactctttggcaactggctagaatacgtgcaaaacttcagccaccggataatggtgcagactcatctgcttgtaatgaattgaatcacctgcagctggcatctggtgaatgatatgacatctggattttggaggcaccgtggcacatgtatggtgattggaggcacacatgcatgataaatcatgatgtgcagactctagagatgaaatcatataagctcgtagaagagaattaattaaggatattaaattccatgactctacatctaagtaactggtgaaagttgggggaaaaacgtacggctgttattactactatttagatcaattagaggaaagcaatcggacgaaagcatcaggtattaagttgaaatcgaatggcttgatgaggcaggttagtgtagtgccatgcatttgaatggacttaattagtgaggccattgatttgagagaagatgatgcgtcctcgctgcatgctgcagccagaggcacctctaacaaagagacgaatggtctcttgcactctcagctcacagtcagctgggcctacctgagaaatgggcctccaaggtgcatcagcagagatcatgctgcttagtatctaatccaacgcttagtagtagctgatatgaattgattcaacggcttcaattagctggtgacgtggaggcatgagatagcagctttgggtcttaactttaatgaaagaagggatacgcgtgtgggggcagcttggacttgaggcttacacgcatgagtgagaaaattgatattgtgtcatcgtcaaaagtgggttttgtccaaatgccactccgcaaaatagattcgataaaataccactatcgacacatggttacacggttacacgctacaatactactccctccttctaaaagtctaagtcctatttatttttcaccaagatcaaggtgcagttaactcattcatcatgtgataaaaccaatgaacatgcaaccaataagtactgaatgacttcttgggttccgataaaaaatttaatatagcacatagtgactgcaaataggacttagacttttgaaaaaaccaaagaatgaaataggatttagacttttagaaggagggagtatctcggaccaaattaccctactctcatcttcttcctccctccatcaccatcagctctcgccggcagccatcatcagctctctccattggcaccaccgccttcaaaacgctaaccctagcttgttgccttcgcgcgagctctcctccatagagaaccccaggccacaggcccctgcggggacccctcccatggctcccctccccgtgcccccaccccggccattgctgccgtcgcctccacctccgcggcggcaggaggtgggggcggcggtgaggctaactacgaggtttccgatgactaccgcgccaagtgggagcgccacgagcgcgctgtgtaggagctgctccagcgctgccgcgccttcaccatggccgtgcgcaccaacgactccgccgtgcgggcgcgcctccaccgcctggaaaaacgggagcggctgggacgacaggttggcacgaaagatggagactgccaacgtcggtgttggcggcgcggatggcgtggagcgcaaccacggggtcatcgggtgggggcggggaggaaggggagcgcaggtggaggccgatgaggcgagcacggcagaggcgagctggcggggcatccgtcctcatgtccttgtcagaggtggaagaaggtagcagcaagaggggcatttttgtccgttcagatattatagcgtgtagtcttcgattgaaagtgacatcctatcttactataaagttataacccacttactcctaaagtttaatatgcaaagatgccatatcatcatctactaacaagttgacaaatcatcatctactaataatcaatacatttaatatcatgcaaacatgctatattatctataatttaaaatttattatattttagagcttttaaaatgaaagcatgttaaatcatcatcccacataattcacataatatttcaatatatatcttcattattttttaaattttaaatatcttatgtacctatgtaagttcatcctcacttggttaatgttatttctctcttatctaattaagccatatcacatcaattgattttagtgcatatgtaagtttacgttgtttagctatcttacacattatttttacttattgttatcatactgaagtcccacagcaacgcacgagattttacctagttttaatgaagcccactcccagtttggcatttgagcaaaacccgttttcgaagatggcagaatatcaattttctccgcatgagcagatccaaggcccgatgaccctggacagccactactgcttacacgtcgaaaatattttatacatgtatttgcctaggttccaaaagatttcaaaatcgatctgctatactgcttacacgtcgaaggaaatttcaatggaaaaattctaaattgtacgtactttgaattttattagaacttttaaaactatatggtccagccattacgtacgtactcttggtaaaaatgtttgcctgtgctgctgattctttccattttccgttggtgagggggcgagggggaagagaggaagttttcttggaatggagattatgggcaacgagtttggttgtaaatgggccgatctttaatggctctcatggtccatatacactgtgacttcggttatatgggggtgtttaggttaggggtgtaaagttttggtgcgtcacatcggatattatttatggtgtcgggcactaataaaaaaattaattacagaatccgttagtaaactgcgagacgaatttattaagcctaattaattcgtcattagcaaatgtttactgtagcaccacatgctaaatcttggagcaattaggtttaaaagattcgtctcgtaaattagtcacaatatgtataattagtttttttagcatatatttaatactttatacgtttgttcaaatgttcgatgtgacatggtgtaatttttttacagggatctaaacaggccctaagacatttttggttttgaataaattcatgcataaatccgtgcatatgttttacatatgtatccaaattaataaggatattagtgatgctagacaaataatggagatgccaaaacgtgtggaacgaaaagagtaacaattagtgcggtggaggagctatggatgtccgacgttatccactaggatttaaatcttgtcatatatggttatatgcatcttttaattgatatatagtcatatagccttgctaaacaaaaaaaatataaactcgttcaccatgctttaaataaacttaatagagccatccacattgaaggtgtcctactgtccttacgacgttcacaatgcacacgatgttttattatagatgaagaaaataatgtttcattcatccactttaaaccaagatgaaatcatatctttctatatagttcgtatccactacgggcatttactcctataagacaagacatgcaaaaacctacattatcaacaaatttaaactattagatcatattagtacaaagataataatcgttggaccaagaagctacttattcatcctattcaattatttatgagttatccattcacctccatttgctccacctcacagtcacatatagcactgttatatattttgtgcataacaccatgtgttccaaatacaactcaaattagcgttcaatatgtgtgttttattttataatgcatgataagatggcttataattattagatatcgttacctgaatctattttcagaaaaaaagttgagtgaagtagagagatacaaattatctaactataacgatacacatattgtatatgaaaatattattcatatattataataatacacaatgacgcttggacaaagaaaacataaattgtattgtaataacataaggcatatataaatctacattatcgtatattttatatatacatagagttacacctaactatttaaaactagagttaagtccgatttacccccctaaactcgtacgaaagtacgctttacccccctaaactatgataccagatataatacccccttgaactattcaatagggacacttaaccccccctcgcgactaatttcggctggttttacccctttcgtctgacgtggaacacccatgtggtaaatgatgtggcagttacataaaaatatctctccccctctctctctccctctccctcgtgaaaaattccccacccaaacccctaaccctagcggcgcaggtggagctgggcggcgcggcggcgtggtgaagggtgacgcaggcgaggcggtgcagcacgagcggcggggtgctgcgcaggcacgacgctcgcatgacggcacgagacacgggcggcggtgtggcacaagcacaacggcgaggcacacgtgcacaagcgcagcggcaagacacacgcagtggcgaggcaagaagaactcctcaaaagtgaagacaaggatatgtttactggttgaaaatgttgactgaagcatatgttcccttgtgctttccaaatagcctcttgatcctcttgattgatttatactaactgcgcacacactttattgcacaaaacatgactatcacaaattgagaaacatgctggttcagatagccttcatgacatatatcggtactgattacatgcagtgattacatgctagcacactacatatacaggaagatcacagcttaacatacaaccccagaattacaaatacacatgctactaatgcatacagaagcacacatcttcccttctccgatatattatttttagcaactagattagtatttccagcatccttttgcttccctcattgcttccatctgttccttgtgcagttgtgcctagcaacattggcctccagctgcacctttgctgctttgcatcagtgacatgcttgagctctgtggcatacctgtgcgccgtcccgtgctcgcgccttgctgccgtgcgagcgttgcgctgctgcgcgtgtgcctcgccgctgcgcttgtgcgcgtgtcggcgtgtgcctcgccgccgcgcgtgtctcgctccgccgtgcgagcgtcgtgcctgcgcagcgccgcaccgctcgcgccgcacagcctcgcttacgtcgtccttcaccacgccccagcgccgccctcttcaccacgccgccgtgccgcccagctccacctgcgccgctagggttaggggtttgggtgaggaatttttcacgggggagagggagagagtagaatttagactatttaaggatatttttatgtaactgccacatcatttgccacatggatgtgccacatcggataaaggaggtaaaaccagctgaaattggtcgcggggggttaagtgtccggattgaatagttgaagggggtattatgtctggtatcatagtttagaggggtaaagcgtactttcgcaagagtttagggggtaaaacggacttaacccttaaaactatgattttgtttaaacataaagctacaaaacccaaggcaaagatgcggggtgccaactggttaagaattaagaaaccgcctagtcgcggcccatggaggaataggatgttaagtctattttaccaagtcatgcatagaaatcacatgaaattaagaactataagaagccaggttcctcatttgctctcccagtcccatttctatttactacgtaacatcaagcaacgcaaaaacagctttcacaacacatttttcccctgaatttcaaagtgaaaaagggatatacaaactctgctgcagtataggctgtaatctgaactcacatgaaaacagaggatatataaaatttatttctcagaaaataaagtagaagtttagtttaagccaaaattagaagtttgattgaaattggaacgatgtgatggaaaagttggaaatttatgtgtaggaaagttttatatgatgaaaaagttagaagtttgaaaaaaaagtttagaactaaactcagccttacaaatactgtttgccacgattaacggtgttgcatttgaaaagtaacgattggttcatattgacaactgagacatcatctgcttgacaggacaaataccagcaaaaatatttgtacatagcattcgaaactaaaatcttgtgccaaggcatcgtcaacagcatcccattctctcccatagtgtgaaatctgaacctgcaaggacaagctatagattttatatactaaggctgagtttagttccaaattttttcttcaaactttaaatttttctatcacatcaaaactttcctacacacacaaacttccaacttttccgtcacatcgttctaatttcaaccaaactttcaattttggcgtgaactaaacacaccctaagcaaattaaggttttgacaaaagaaaaaagaaactttgagatagtttactccatgcagtaacaaacgagagtgttgttgctttgctcatgccaaattggtgctcatgttggagcagaaagtaatgcaaccttgaaaaaaaatattgagatcttttatgctgtaaaaggtcaaaaggttctttttgggtcttttatgctgtgaagtgtaaacccaaataaatcagtttttggtttcttcagcaaagctcaagcctccacatgcaatggtgactggtgaaatggtgaggtgacatgcatcgctaaccatggccctcaacttacactgcacttcaaatggtacccctgcatatacagtaaacaacacagttatatttccatgagaaaaaacatcaggatagcaaacctgtgtcacaatccagatgatgctgcggattgtctgtgacagcacgacctacatttgaccaccctctgcataaaccgctcaaaaacagccctgaagacagcacatgtttagcactagttgacatatatcgagcacagatgtccgaagaaggatatcataatatatgggaactagaagtccactactattacataagagcagagttataaccattaaaagatcgatcatggagacaattatatcaacgacttggacaggcagtctgcacccttagctgcgacacacatcgctcgagcggctgcacgggctctgtccaagctggaagacgacactgtagctcggggatataaactatactttttcctggacttccatttccttgcttgggccggctgagacagagggacaacaaacagacttgcgcagagaaaaggggaaaggctgctggtttggctgggctgagggagagagttgggccagattaagcccaagaatttggaaaggattttaattacttcttcaattaaattaataactgaaatgatctttgaattgttgaaaatacttccaaagctcaaataattccaagaaaaatcttgcaactacgtggacactcaaagtatttttaaaaattaagatcatatcatttaatgactaatttaaaatttaattaattgttgaaatgtttttgttattattaaaattaggagttgagctctgaaaaatccgagaaaattccagagagtataattaatcatgaagaatttaataaaaattaaatccagccatgctttatatttaggaaattttatttcccacatttaaattcacttgtaaattaatgaacatttaatataaattataataataatttttttaaataatttataaatcctgaaacgaaaatcagatgcgacaacacaatggaacaaatacattatagtggcacaactacataatccagatccctcccaatcccagctcgcgtcatatctacaagcccttctcatgcatgcaaatatttctacattataaagttcaatatgttttaacattgattattagacaaataaaacaaaaacaaattgcaagacacataaacaaaatccttttatccaacttagaaatggttctataaatacatatcacttgcattacactactagaaaatgcattttttccaacgtagaggtctgattttcgtaggcggatataacccttgaagccaaatgaccgcctacaaaaatataaatcggggtgaagttcgctgtagattttcgcaggcggactacttaagcgacgcctgcgaaaatcagttttgcaagcgaaccactcaaaccgcgcctgcgaaaatgctacctaccccaaaaatttctaagtcttatcttctcctccacccctccccaccactcatttccctcactcagctctctctctctctccctcaaacacttacccctcctctcccctccccttccctcaacgcgcgtctgggcgccgtctccccctcccctccctccatctaccggcggcggcagcggcgcgggccggcggtgatgacgacggcggctcccctccccctccctcccagatctggccggaggaggaaggggggaggccggcaggggcggcggcgacggcgcacgtggggcggcggcgacgacgacggctcggcggcggctcccctccccctcccttccagatctggctggaggagggaggggggaggccggcaggggcggcggcgacgacgacggcggcgcggggcggcgacgacgacggctcggcggcggtggctctcctccccccttcctcccagatccggccggaggtgggaggggggaggccggcaggggcggcagcggcggctcccctccccccttccttccagatcttgccggaggagggaggggggagggcggcgggggaggcggcggcgacgacgacggcacggggcggcggcgacgacgatgacgcccggcgcggctccggtagggggagggcggcggcggcggcgcccgcgatttttttttttgctttttcattgcattttcgcaggcgggccattgcctcgactgcgaaaatcttcgcagtcgttgggctgcaggcggtcctcccctccgcctgaaaaagtcacttttggccgcctgcaaaaatactttttctagtagtgttagttccttgtcgaaacaagatttcggcaatactaaaagggggtggctatcaagcggaaaagtggatgggtttagagacaaggaattttatacaggttcaggccttcttaatcaagaagtaataccctactcctgtccggggattgatccgtcgagtgtatttttgatcgtatgatctgggaagaaaatcgtacctcaagaggcacccggacccctccttatataggggaaggggtccgtattacaaagtatagcccatatccctaacggaataggtagttacagataaaatacaatcgtaaccaactaggatcccggatatttccttgacatacaagtttggaatttaacccgagtccctttaaagatattctatctatatatggcaccccatacccagtcggatatacataccgtgtaggtatggggtatccataatctccacagtagcccctgagacttttacagtcgacgaaattgtcttctctcgtagtgcaaaatgataatccgagtgcttgaacttcttctgccttgatctcccgagtaccaaaatcaaagactgtgaagagctgaaaataaaaaatcgggtgcatcgactagatgcacctaattaggtgtagccccagactatgtgattagttaaaaactaaacatatagtcaaggtgcaaataacatccaaccgagtggtcttataactaaatcatccaaagtatcatacagctaagcatatgggacgtttagtaaaacattcagccgactgctttaactttattataccaaaaattgagatataaagaggcccgagtaaaaaatactctaaaggtccataaatcaacacatatgacaagaatccgagtaaaaactctcaaaaagatccatcaaatgtggtataaatcatgacaatcgatgagtctaaatagcctaggctatgactcacgccataatcaaaataagcatataacatgccgagagaatgactgttcaaaaaccagtcatctcaacaaaacccgaacagcttttgtagcctaaaaagacttacaaaattagtataacacttttccatcgggcacctttttatttgcatcatagtaattccaaaaaattatctaactgcgtccaaaaggattttagcagcattgggctaccctgttgcgagcaagtattgctgaagcaaaatgcctaagtccctaaggatcacaacttagccacgctgatagaaagaagtgggctgaagtaatgtttcgggcctaggcccattagtactcccgataccctaataataccaaaagccaaacatcgcgtcgtcttccccgccgagactctcgccactttccccattcccagctacagtgcgaaaccacaccggcgaagctagggttcgccgattcactccaatccgtcctccaaaactccacagaaatcttccacacaacctccgcatcaatctcccatccattcccacccacattctggaccaaatcataccatccagttcgcatccatggcggaagagagagaaagctttgaaagccagtgggtgtcctccgatgtaatggaggagaacttgaaggagatggtggcgcacggcgtccttccggcaaaagagatcatcaggtggcgtctagcatatggtgaaatgttcccggcccctgacacacacgaggtggtggtattctcccatttcttttatggcgggttttctcttccgacctcaagtttcttccgaggaattttggatttctatgggatcagcttgcatcacctaaaccccaattccatagtccatattgccaatttcatccatgcttgcgaagcttttatggggattaggccgcatttcgctttattccgccacatcttcttcctcaagccccagccaaacaaaaacaaaccatgcatagttgggggagccggatttcaactgagggggaccttgagccaaaaatacttctccatgccattcaagacctcgaacaaaggttggcgcgcaaactggttctatgtgcaaaaccccgagccagcgcttcccggatactcctgtcttccccagtctatcgcgatacctggaactcactgccaatgggagaagaggccgcccaagcgctcgacttgttggatcgcatgctaaagctgaaagaacaaggtctgcagggggaacaaatcacccggcacttcatcaagacccggctggcatcaatcaaggaaagatccagaacagccttcgagtttgacggcaagcatgaccccaaccgagagaacccagaatctgttgagttcaaaattatgcaggagaggatgtacaaaatcttctcgaatgctatcgtggtcagctattcacatttattgccagttgtgccatacaatgccttcaaccctcctccaccggtatgtattatacaactcagtttctctcaaagcatgcttttatcttccataaagtcgactgagaacctggaataccatgcacaggaattcgctttgatgaagtccgatcctccaatcgctcaacgctgctcacctcgccgacacactggccaagctagtggagggccaaagattcagtcggacgtccaacccaacgcctcaagatcgactaaccaatccgattcttgtaagaggaagctggtttcaagtgacgatgaaggtgatgatgcggaaaagacgggcaacaaaggggtgactggaaaacaaccaaagccaaccaatccgaagaagaaaatatccagtcgtcccataccaaaaatcaggaagtcatctaggtatgtattctctggcaatttcccctattttactatttactcacaattgaaacagagctgatagcgtgtctaaaatttgtagaaaaccatctgacatagatccctctggaaaagatcccactccgactggcacagagactggtccttcggtagaaactggaccgactgccaaaaaccacccgggtaataatcaaccggcaaccggcaatgtagataccagcaacgagcccccgactggaaaccagtcggctgaagctaaagccaatgctgatcaggagccctcgactggaagtcaatcgggtacagaacagaatcgagacatcccagaaatagaagctcaagccaacagccctcccaagacggacactggtgctggccctggaacgagttctcctattagggtgcaaggacctgctcgtccccgaccggaagttatcacaggtaaataagtcctccaaatctgctttgatccgacaacctttatccaattacttcaccattattcatgaatatacaaggaccaatgattggtgatgaagaggaggtcctctggatacgatcggctgaagattctcgcccaccaatattagtcaagtggtgggacgatgaaatgcgtccacaaggaattgtnataaataagtagagggaagacgaggaagtatgtctactgaagaagacactcggccaagctactcgtcttgtaaacgtaagtctacacttacatagccttaatcatcctgtcggtcaccttacttgaacaagg

SEQ ID NO: 4148 - DNA, 554 bp, Oryza sativa
acggctggcctattatgccgccgctgttgggcgtcaacgacttcaccgccggcctgtctccgtagccgccgattggtgcctccgcctacacgactggcctattatgccgccgctgttgggagtctacgacttcaccgccggcctgcctccgtcgccgccgattggtgcctccgcctacacggctggcctattatgccgccgctgttgggcgtctacgacttcaccgccggcctgcctccgtcgccggcgactggtgtcctcgcctacacggctggcctattatgccgtcgctgttgggcgtctacgacttcaccgccggcctgcctccgtcgccgacgagtggtgcctccgactacacggctggcctattatgccgccgctgttgggcgtctacgacttcaccaccggcctgccttcgtcgccgacgagtggtgcctccgcctacacggctggcctattatgccgccgctgttgggcgtatacgacttcaccgccggcctgactccgtcgccgccgagtggtgcctcccgctacacggctggcctattatgccg

SEQ ID NO: 4149 - DNA, 1813 bp, Oryza sativa
ttgctacccctactttacttcaatataagatactctcaattaaaacaacaccataaatcactgctccactcttctaaaattctctgtatttgatctaatttaatctaaaaccaataggccatcaatgtcgttaattctaacaaaattgttaccatttcattaatatctccagtttcaattgcacaaacatatccttgataaagaattaagaatgtatccctatataagatagcccatatgtttcgtttacccacaattcccatacgtactgctcaatgcttaatgtaccattaatatgaaatcaggtgccagtcaataacaggttagtctgttcatatttcatcattttattttattttttatcttcttacacccccttcccataattatagtgtaatttccccttctgttttggacaatatgtttgcatgaaatattttctttagggtgtcagtgacactatgatgtgcccaattctcttccatataatatccaaaggatatacattttagagtgataaatggacacagagctattgtagcacaaactggtaacacttgactaaatgtgttacagggaatactgcagtagcacatagtatgtgttacatgaaaaggttgtaacacagtgtgaaacagtgttacagaaagagctgcagtgacatataataaaagttactaaggtttgattaccagtatttgcagtaccgtcggactcttgagcatattatattactttacttaaacaccgtgggaatggtggaagattaggtggccaactcatcaataactttacttaaacaccatgggaatggtggaagattaggttgccaactcatcaatattttcagaaacaaccctcatctctggttaattgtgttttggctcaggctatcaaggtccgttcgatctcgggctagcattgatctggccgtccacgtggcccagcgtggttgttctttcggagtcataggaacggtgagattagaatggacggttcagatcttcgagcagatccagggacaaaaacccaagccgcacatgtactcccggcccagccggcctcgctctcctcgcctttgtctcgcgagaggtggtgacggcggtggaagcgcgatgtatcggcaacagcggaagtgcgacgccacgcctgctgctggcgtgcagtgccgccgtcgttttcccagctcgcggctctcctctcctgacgatgtccttcccttcttccctctcttccattgatggctccatccatccccaatctcacccctaaccctaggttggcctaaacactaaagattgttgacgatggtgctgcttgcgcagcaggtggtcaggttttgccgacggtgcgccgtggatttgggcctcccatcctcaaaccttcaaggtcatttctatctcccagccaaggacactgttcaaatgtgctcctccattcccctccttccccaggtcagcagcagctatgcctcctttctccttctcacatttattctcctttttatgaacaacaatttagctttgctgtttatatatcacagaaacataataccatcccctcaattggacgatgggttagtcatattttttttccatttttacaaatccacttatccctggaattaacctgttaatattaattgcaggtagacatgtatcatgtgtttttgtatggtctggagaaggcatgctttagccatggtatgtcatatttgccaactctctcgcaacaagatgtaacacacacgttttagtattattattattggttttatatttcttggttgattgctggtaatgctactctaatg

SEQ ID NO: 4150 - DNA, 1637 bp, Oryza sativa
ctgcttcttaagaaccttgctgatgtgtttgcaaagagtggtggttccatagctgactacgatcttccacaaacaaacaacgtcccagaccatgtagttggcaatagaatccttgatgaagaactgaatgttgactgtgatgctttagcctcccatgcaaatgcattgatcccaaaactgaacagtgagcaaagaaaagtatttgatactatagtggattgtgtcaacgatggccgtcctaggtttttctttcgtttatggccatggtggtacgggcaagacatttctatgaaacactataatatctaaaatacaatccgaaaaaaaatcgttttggcggtggcatcatcaggagtggcttctttgttgctcccacgaggacgaacagcacactcgaggtttaagataccaattgaaatcagtgaaaccagcatatgtagcattcgaagaggcaccatgcttgctgacgtaattcaaaagacatcattgattatatgggacgaagcgccaatgacacatagacgttgcttcgaagcgttagataggacattgcgttacctactttctgaggaggaacctgcaaatgctattagaccatttggtggaaaagtggtagttcttggtggagatttccgccagatcttaccagttatacaaaaaggttcaaaaacaacaataattgatgcttcgataacaaactcaatactttggccccatattactcttctcagtctaaaaacaaacatgcggttgcttcgaaacgaccttatgcaaatagataaggacgaacttgataggtttgccaaatgggtgctagatataagcaatggaacagttccaacgacagtgaaaaacaacgaatctgagccatcatgggttcagattcctgatgacttgctgataaagacagatggtgagaaaatacctgcattaattaatgaagtctttcctgatctattgaataaccaaggaatcctgaatacctttcatgtcgtgccattgtgtgtcctaacaatgctactgtcgacgacattaatagctatgttgttaacatgataccaggaaaagaaaaggagtactttagctgtgacacaatctgtaattcatgtgagcacatacaggattacgatttgctttatcctactgaatttctcaactctataaatgtgaacaactttccaaaccataggcttgtgcttaaaaagggtgtcaccgttatgctactgagaaatcttaatcaatcaatgggactttgcaacggcactaggttattagttgatgtgttaggacagtgggttcttcagtgcactgtattgactggatctaagattggtgaaacggttttcataccaaggatagcacttaacactactagctcaaagtggccatttatcttgcaaagaagacagttccccatacgtgtttgctatgcaatgacaataaacaagagccagggccaaactttgtcgcacgttggggtttacctgaagaaacctgtattcacacatggccagttatatgttgctgtgtcaagagccacttcacgcaaagggctcaaaattctaattgaggatgatgatggtaattgttcctcggaaactaggaatgtggtgtatcatgagatacttcaggcaata

SEQ ID NO: 4151 - DNA, 4601 bp, Oryza sativa
aaaaatcaaagagctaatgcaatggaggttaattgacgacaattgtaaaatgtaaaaaagatacttgtatggtgacgcattgttgaacttgtgctgaccaaaagtcgtagaatcaattttttttataataagcaagaatcatctcttctaaaaaaatatctgcatgtaattattcttcatgccatcgttacatcttatctaacattgtatcatatagctttccaaaggccatgttgacctgggcttagataacagggacatactcacatacacatatgaatcagctatcatgcctgatagtgtagttgacattgaagatagcgttgcattatccagttttcgacaagattgtaatagtcgaattagactcggttttctaagctagagaattggtccggaactcaaggaaagaagctgcaatcaaaattcattcctattttccttgactagaatttaacaatgggcacaaacacaagaatgcctatggacaataaagatataagctggaaggagataacttctgttgtctaaaccagaagctaaaaatgcaaagttccacgtatgaagttttgtatcatattttacacgagaaaactggtttcataacagaaatcctttccttgcaaagattctcaggtgatgaacttaaaaaaatggactaattccacatggtaattttttgtatatatatactactcttcaaattatattcgtacactcatttttagaaagtttaaaggaagaatgccaactgttttttcttcttttggagcatccttcactcattgtttccgttcactcattattgctcccttagaagcaaagaatgatgttctagcatttcaaaatcccacacatttcaaagtcctagatgatattaacaagtttaacaccaagatatactccctccgtttcataatgtaagactttttagcattgctcatattcatatagatgttaatgaatctagacacacatatatatatatctagattcattaacatctatatgaatatggataatgctagaaagatttacattatgaaacggaggaagtagttaacaatttttcagttttgtattagcaatgcctcaaaaaggaatgagataatgtcctacaattactaaccagtgaagtgtatttacacccatcaacttgtgcttagatggagtttttcactttagtcttttcataaatcaagggaattgaattgcgtaactcagaatcactgacctccaattttaacaaagtttattaaaaagaaaaattaaaaataatcctccttcctcctttgggccaagtctggcccaaagtcttcctctctcttcctcggctcgcagccgaagtccttcctttctccctccctttctcttctctctcgggcctccccctcctcccggcccacctggtccatgccactcggccgcctagcccaagctgagccgcccagcacctggcgcccctccccctcacctagggatggcagtcgggcacgacaggcactacccatgcccgtgcccgcgaggtaattcatgcccgcgggcatacccattactacatgacaggtaaggaacactacccatgggcatgcccgtttacccgttacagactcacagttcagcacttcaaccataaatctccacaagcagagacattatcacagtttaagaaagggtatagttccaccaagtttaaccatacaagtattacaagttcatcaatactagatggtggcattatactaatttgactgagggaccacatatcagttggtttttgcgggtaaacgggcgaagcgggcatgggtagtgactacccatgcccgtgcgcccgttgattataggttttgaccccacaaaaaacccatggatactaaatggagaacatacccaactctattagggtatttacccacgggtaaacggacaaacgattaaattaccatccctaccctcacccgtcgcatgcgcaacacacgtgcgcccgcacgcgctgaccacgcctcccgtgggtccattggttagaccccgtccccttcctcccgccgacctcctcttctctctccagtgaaaccctatgtgccgccggcccctaattctgctcccccatgcgagttctagccaaattaattgcaaaaatggaatccccatccccttctcattatttaccctaattttccccctctaatcccgtccccaatcgccaggatttgaagttcattcaaattaatgtcgccattgatgccgccggccacatcctccggcatcgttctcggtccctcccatggtcggcactccctccttggcctataaaacagggtcccctccctccccttgctccgttttgccctctcccgagtccctacccacctccccgcagtgctggcggttggatcgggaaccagagtccgccacgcggagtcctccctgtgccgacagcggttcgacggaggcggagcgccgcgcggagcaggcaccttccggcgacagcaacggcggatgacctcccagcaccagcagatgagacgagcggcaacggcaaggattgcaggattgttgatgaactcgtacttttatactactccctccgtttcacaatgtaagattttttagcattacccacatatatatatatatatatatatatatatgttaatgaatctaaacacatatatatatccagattcattaacatttaaatgaactaggcactctggcgcgctttgcggcgccccttcggaagttagtgtggtaatatttaggaaaaaagaaatcaatgtgatatagcgagtacatgagtattgtgggattaaaagcaacacatgacagcattgtattagatcaagtaaacaactaagcaacacaacttgattcgacgactatagataatggtttctaggtattgcaaggtaaaaaggtaggagataagattatttcaacatcacgattagcattgcaattagcggaatctattgttctttctaagctcttgaggtagacggcgtcgtggtgcagatgtggatgctgcttcggaaggcccttatttgagtccgctactcttggtgtccactgaaaattcatgatgataggaacccggcctggagtttgtttcctcatagtgtctcagcatctctccatctgtatcactgccactaccatcatcagagtagtcaaatagcttttcaatatgcactaagacagtagcagttgcagcctcacggtcccaatcaaccttgcttgtatgttgaggaccttttgtttcaatgttccagtccataatctttggtatcagattaacatctgttgtccaagctgcaagcctaaaaattgagacatcttgtatatgatactgctcatagatttcttctaccatacaactattgtccaatagttcaggtgttgcctcatcattccatgtttctgggggtataccttccagagcaatgataactctttgtctcaatgggttctttacactgtgcatgttaggcttgaaaggatcaaacgctaatcgagttgtctgaaacgtgtaagttttttgttcgattaatctttcggctgcttgttcctgctcatctttatccatgaacaaagctagatacatcctatgtttgaatggaagaagtgctatgtcgcctggttctaacttggatattgtagacaccatagctaccactttagtctttgtgggtgtgccagctcctaggacagtgacaacaactgcattgtgataaatgatatctgcaagtagctgagatagtggttttaatttgctaaacttggtgcctctaagtggtctgttggttccatatgacatcgctaaatctacatgaaagtatcttacataagtagcaggtttatgcatgaaggagacaaacactgaagtagacaggagaaagaaatgtagattgaatggttgagcttgttaccttttgttgaagacactgagcaaggagaaatcgctgaagcagcaacgcgggatagaggaaagctagtgtgacattgctcaaagggactcagcgttctatatagaggatgctttctacattgaatttgggttggtgtggtgtcttgtcaagtcctggtcaagaagctgcaacggttaaagtttatgctggatatgtttgaatgtagctatgttatctggttatgtctgtatagcgttggttgaaacgggtgaattccagaggaatcgttaattgtcggcctctgctttgttcattaagctgatggaaatgtgtgagcggtaaacgcagtgctcgctatgagtatgtgatatctttaagcagtaactatgattgacgaacgttggctattagattgtgaaacaaaaacatccagctgtatgttcgatgcactgagcagactaataaacagagattaaggaaggtgtttgaatccattagctaacttaaaccattccacatagcattcactattatcaaggtatagccatgataaccatgaatactgctagcaatggcagatgttgtttgcagcgttacaaattaagtttcagatcacatgaatagaaatggcattttcgtgcgatatatgaaatgatcgcatcaaatgcaggtttgcaaaaggggggtgcagga

SEQ ID NO: 4152 - DNA, 1735 bp, Oryza sativa
ggctaaaaccctatgccggcaaatgggtgaaacagctgccatcagtactttggtctttgcgaactacacccagtcgggccacaggccaatcaccttttttccttgtctatggggcagaagcaatgttgccgagtgaagtcgaattcgagtctttgcgctttcgaaatttccgcgaagaacgatacgaagaggaccgagtggatgacttgcaccgattggaagaagtccgcgaagcggctttgattcagtcggctcgatacttacaagggctgcgacgttatcataatcgcaatgttcgatcccgtgcctttctagtcggcgacctggttttaaggaaaattcaaactacacgagatcggcacaagttatctcctttatgggaagggccatttatcatctctgaagtcacccggccaggttcctatcgactcaagcgcgaagacggtacacttgtcgacaattcttggaacatcgaacatcttcgtcgtttctacgcttaggcttatcattgtacttccctatcttgactgtcaacatcaagttttcttcttgaagttgtcagtcgggggctatcatcataataatggagtgtgattttttatcaatttaatttgcttacttggtctatcattgccttgtttggtttttctacttagtgtgcgaggactgaaagtttttaatagcttctttgggttttaggcttaataaagcttgataaaagcttttaagaaatcaaagacttggctagaattatcaagcacagcataaatacaccagtattgtacaagtatgcctccatttgctacatttatactcagtcagaatcagtcttttcatcatcagatttattactactcggctgaaggtcggcgttgcggaattgatccacaacgtcacttgcaatcttgtcagccgcattttgagcattgctgataagatcaagagcagcctctacgcttgtcccgtctgcaaagccatcaatggcgtcaatttcaattctcgggtacaaggacttggtcatcgccaatgccgtgctagctcccatacttccagctttcttgatattcttgaaatatacatccggagcaactctcagcttgtcgaagatttcggttgcgtcgagtgcactcggaccactgttattgaggaacatagcttggacgagtggtgtagcgacattagcgacttcatctcttgctccttcaagcttcttgatcttaccaaccaggacgtcaaattgagcttgagatttgattttgcagtctacaaaacacatttatgataaaaatcagctgcattgaaaagagagaagttcagattgttagctggcagtaccttcaacctccttcaaggccgagtccctttgcgcagccagttctaccttgtctctttccagggcttcaatttgtttctccatttgagccatcctggtggtttgcgctatttgaaatccaaatggttgaggatacagttacaacagcgtaaattaatgggacagatctagagattaccttttgatgaacctctcagctcgaagtttgaatcctggagctgagcaatttggtccctcaattccttctctgtctttttggcgagctccttggcctcgtgtagctggtccctaactgcttcaagagttcccaaatgaggaaccagcttttctaaagttgcggtcttggcctcattacgaagatggattctctgcatgatggttcatggtttagttttgctgaag

SEQ ID NO: 4153 - DNA, 668 bp, Oryza sativa
aaatttttcatttaccttaaccaaacctgtagcgagaacggcacttgttgcagcatcaccaaaaataattgattcagtcttagatgccttctttagggagaagaaccaatttttatcaccggtcatgtgccgcgaacaaccggaatccacgatccacacgttctccttccttgccaccaaagcctacacacaagcagaagtcgaagcctcagtactggggttagatgataataaaaatttaggaatccagtactgagacgcacgaccagaagatccaataggcatatatccacgtgtaaaatcaactttagaattttcagaaaaattcctccgaggccagtctgaccgggggctggtctgaccgagagctctgcagccggtctgaccggtcgccggtctgaccgcgggacccactgcggtttgaccgggttcctcgagggaaaaccagttttttgccactttgattttgcaaaagcaatctctctctcctttttctgtttatgagctaatctgaaacaaaaaccaacaatatgtccatctttgccacaaaaagaacaagtatatttttcatgatgattagacacattggaagcattagaagatttagcaacacaagcaacaagaggagattttgcatgctcaacattggattttgaagaagatgcact

SEQ ID NO: 4154 - DNA, 1670 bp, Oryza sativa
atgcaaatttgattgatgggaaatgtctcccatgtctttttaaaaccttctggtatggctagctggttctttttgtaggaaagaaacaaatctgaaacaagaacatgtagatgacagattgtacatactggaatacaaacatttggtattgactggaggaccgcaacaattcgttctttcccaactttcaattccatatatatattgaagcatgtcctggtaatacttccttcacaattcgttcttttctcatttgtcagattacgagctccaaaaaatttggtgcaaagtttgttatgggaacctggtatggagtgtgcacgtgaaaaagttataacaacagaatgcttaatttgttatttgctttgagatatcgagaagtaactgaacccactacttggatttgatattaggcaagcattttctgactagtaccagcattttaatttcttttttctgattgcccatgcaggaacttagtattcacttttgacgtttcatttgtttgtttcaaccatattgtacagttcatccctgcctatatatatcctctccatgtttatctaaaaaaggaaaaagtattctccagtcgggcctctggtggaggcagcgctagacattagcactttgcttttttgaagttatcttttttccgttgaactcattggttataatcatgcttgccaaatttattgaacataagctacagctaaaaactcattggttatgatcatgcttgccaatttcattgttttttgttactgtcatgcatttgtaacataacttgaattattctcttagctagataaatagcacagagaatggatcagtgcttctgagacaccatgtaataaagatgtggtcaatgtggttcccgaactttggggtgtaaaatataaaatcaagcagctttccaaaacttattagacacaagatttttgaacttggtaaatgtttttgaacattgaagatcgatccctgctacttctttaactgtaggttgcacaactggtaaaccattgatgaatgttgtgtcagttgcatccacagctacctcaacaacaccacccggaagaacggcaagggcttcgccaacccgggcaacaccaggtacttcagtttggacgacaagcgcacaggattttggaaatattgctaagtcccaggtaacactctagacaagcaaagatcgtgatggattttggaaccgttcaagcatcagataaatggacaagttcataactgttcaaactaattcagagagcacagaaatgttcagaacctagatgcgatcaccaacaagtcttgtttcactgatcactctttatgttgcaacacaactttaaaaagacttcaaagttttacacaaggcgtgctatggttcttttatttcagtaaaacactcgttgctatgtgtatttatttgcccttttgatgcagaattatattggtaaatcgatcagttttcttaaaaagttaaagtccgtactctagatgcaatgctatttggcttcgaatggaataggtgcaattattttcgttagtaattaatgttctaaaatagcactcatgtttcttgtatttgagaaaattgattgcttagaagttgcataatgcacttatgctatttaggtggatgaatattttgatcaagttttttgttttttggg

SEQ ID NO: 4155 - DNA, 2845 bp, Oryza sativa
ctgcacccccaatggataagagagctatagatacccatggtttactattaatctagtctattgctgagatgtacatgttttgtagatagcaccttactttaccattgcgggtgctcttagccagtttatattgcctagaaaaatgaaatggggcattatcaaaagctctgatcatttaatctcctgaactatctatgcccatgtaatagacactctatatgatagacttgactaatagaagtcttaagatatatttgcaaattcctctagaaaaaagaacatttcaacaaatagggatgccatgtgatccacaatgtcttccgttcagttcccgtagactataagagcagcttaattattcgagtatctatgcatatataaatttgctgacaacatgttgttgtgtttctaagtgttgaatgagatagcatcactgctagcatcccagctaagatgttaaggtatacgcatacattcaatacgctcaatttgagctggcccatctactgttgcgcgactttgccgcgggtactttctagtcaaaccttaaaagcgttccaactggaaaaaaaagaaaattaaaaaacaaagcaagagaaaaggtaaaacgaaaaaaaagtcacatggatggtctatggtatagatgggatgtgatcaagccaacagattcatatgctcaaacggatcacatgaccacatgtgtcagtgtgagttagaaatccttgtgcaggaaaggtgaaacgctagccccaccacgtagtcagaaatcatgggtgtatctgatcggtgatcgaaaaaacgtttgccttatattaacttttaagttatcctgttcccacgtaatgctgttatgtagattttctgtttaagaattggtctcgtcaggttgtcttttttataatttttagaattcctattatacgtcactactacacttcattacggtccgcttactctcctcttaattctggctgcagcttggccgagcttcaacttttaacttttctatcacattaaaacttttctacatacaaattttcaatttttctgtcacatcgttctaatttcgatcaaacttttaaatttagcgtgagctaaacacacccctttataacagcgaaagcaaagaacccaccaatttgagcaaaaacaacagtcctatgcacagttattaagaccggaccggaccgaaccggcgatcggaccggaaaaaaccggaaccagagcccccaccggtccggtccaggtggtcctatactcctatggggaaaagggaaaaaaagaaaaaaaaaagaaacgacccaggcggttcggcgtgaactgggccttgggcgggttgggctcgagcgaagacgttccctcatggcaccgcttcccctccccttctcgctcgctctcctccgacggcgccgcttcggcgcttcccgacttccagcggcgagcagccggctgcggatgcgcccgcgctgctccaggaggatctggatcccgctggcgtagtctccgtggcatcggcggcggcggccgggcggtgggaagcttcagctccggccaggtcgacggcgcgctcgccgccggcttcagcgaagaccaccaggtatgccccgcctctactccctaggtagggtctgcgcggcgtctgtaggctctcggactgaatcgcgtccagctatcgagttttgtcccacatcgccaattttgagagcgagcgacctgtttatcaacgcggttcgattctactccatcgcctccccagaggcacccaccccgaccgaatacagcgaaaagatcccaaatgtgggcatcggctgggtgtgtatccccttccggttaatggctgtaaaaaaaaaaagataaaggagcagtgaaaagatcccctcccgttatggggcacggcaggcgaccccctgccggttagctgcatccacgttaagatgtcaatacggcaacggtaagttgtcaaatacggcatatgcatgcagtcgggcctttggtggaaggcagcgctagacactagcgcttagcttttttaaaatttggatgaaatttttatttctgttgaatcgttttttaattccttgtcttaagccaagagaagcttaaataaggtgaatttggatgaacttttttttttctgttgaatcgtttttcaattccttgtcttaagccaagagaagcttaaataaagtcttaaaacattaagatagggtaggagatgagaggagatacttgctgtgttgatatgcccttactgctagcaatttcgccttaagacgcaaaacttctaaccgactgcatttccaagtttcgactggatgccggtcagagatgacttggcagatgaataattttgatcttactctgcagatactatggttagcatagtattagtaatgctttgtcatttgttcactgaattttggcttgtatgtagttttgtttttaatagtaaatttctctgtaaaatttgcacttatatctgaattaatttacgctgcaagactatgacggtaaagatttggctggaacatccaatattttcagccaattgtctgaagatgtgattaccaaagttgcaaataactagcaacaagatcaggtatgtgcagagttgcagacaaccgttgagactgaaccaaattcgtcctggcatggacagggaaaaatagaccatagcagcatagttttgatcaggtagatgaagaatcctacattttgaaaagtattttatgatgctcagggattcatgtaagcaataattctgatccttgagtcaaatgattttctcaatttttatttgtaaaaatgactgtccttttctttgtaaatatgctgaaggaaatag

SEQ ID NO: 4156 - DNA, 600 bp, Oryza sativa
tatgttgggctctatggttgagtatgaatgatttggtttttaacaaatcaccatctttctcatatatgcaggtaatttttagggcaacatattggctccggtcttgggcacaactacaaaggtgtgatgaagatgagagcttctgaaggttgtatatcgtaagcttgagatgacggtcatgcaactttttgccaactatggttggagattcacaaattgatttgaataattgtgtgctatttatattggtttggtcggctttatttttacttgattgtgtttaattttgtttgaactacactctttgtttgagtgattctttataataactagtaagcgtgcacgtgcaaggcacgttgatacataaaattgaagaaaatacaattattatacatcattaaagaatcatagtaggaaccaagtaaaaataacattattgtaagcaatacattggtaattcatgaactaaaccttaatttttttatttattacatgacaaccaaatgcaaaaaaatgtaatatttgtttgtcattatcgatttcatgttcacttccaaatcagtcactcacttccagatcagtccctctcaggagatgagg

SEQ ID NO: 4157 - DNA, 671 bp, Oryza sativa
tgcaaccttgcatcccagccttctctaaaattcttcctgcatacccagcttgggacattgtaatgccttcttcagtctgtttaacctccattcccaggtaataggacagtaatccaagatcactcatactaaacatacttctcatctgctccttgaattttgctatttctgtccccaaagctcctgtaatgataagatcatcaacatatacccccaccatgagtctggcattaccttcccctctagtgtacactgcattctctgttgcacttcttacaaaatccagatttgcaagtgtagaatccagctttgcataccaagctcttggcgcctgctttaaaccatatagggccttttttaacttcagtactttgttctccttgtgctcaacaacaaaaccaggtggttggactacatacacctcttcctccaattcaccattgaggaaagctgacttcacatccatgtgatgtatttgccaaccctcatgtgctgccaaagcaaccagcaacctcacagtttccatccttgctactggagcaaatacttcttcataatctatgccttgtagctgaacatacccctttgccaccaatcttgctttgtacttcaatatctcaccttcggcacttttcttgatcttgtaaacccatttgagaccaattgcccta

SEQ ID NO: 4158 - DNA, 4107 bp, Oryza sativa
agaataggtggccatgacttgtacacatggataaatcaaactattaatgatggagcgatggaggcatataaatactacgctccaacaacgttgttgattttttatcattcatcttattttaaaaatttacgtaattataatttattttactgtgagttgttttatcacttaaaatactttaaacataatatatatatatatatatatatatatatatatatatatatatatatatatatatatatatatatatatatatattatatttacataaaaaatttaataagacgaatggttaaacatatatttaaaagtcaaccgtgttatttattaaaaatgaaggcagtaataattatctacaattttatctatatatctccagtgatctttaatttctttttccaatgacaatagctagtagtactagctccggtcaatggaagaaaacatgaaaagccaagccaggcgcacgtgtgatggggagaccgacacgactcggcccgatccggttccttgaaccaataatccattctattactacatccaccccgtcacatctctgctcggcctaagggggcatccggtcgttgccgcgcgtgatttgtgcttctactgtcactaccagtaaatgatttttccatacgaggaccaatcttaactaaatctgtattttcatatacggtttcttaaaaagtcagcaagaaaaattaatttttacagataatgctcttgacatacccgtataaaaaataaatatatttttgttatacggatctcttaaagagccgtatacaaaaataaatttttacatgagagatacataaaaagcacgtgggtccccgcctttttttaccgcataaatttttttatcccctctctctctccagcacacctttttaactttctcttctcctctcccaatccttatctcttccccactctcacctctactctcctagtctcctctcccccttcactccaatcacctctctcccgatcacctctactcttctcccctccctctctctaaccttcctcgacaatggcgacggtgggaacgagcggccaacagatggatccgctacacctgctcttgggatcgatgatggtgtgtagatctgctgcccctgcctcgcgaatgtcggcaagagcgagcggttggcgggtagatcaactgccccagcctttggtatagcaacggcgcgtacgtgcggatctgctgcccccgcctctgggagcggtggcggcgggctcaggcggtaggagcgggcagccacggcgaccggcgcacagatctattgcccctactctcgaggatggcgatgatgatagtggtagtggctaaaacgacaatgacagcagtgacggttgcaatgacgacggcggtaacagctacggttttgggtgattttgtttttcggatttttttcaccgaaactattttcatgtgcgattagcataggtgaccgcatgcgaaaatttcatttcgtatgcaattgcgctacccgtatagaaaaatggtgatcttcatagacagctgggtgtgggctggtcagccggatgcaaaattttgttttgtgcttttggccgtctggaaaaaaaattatagtgggtacatgtggcattttgtagatcgtgctcctttaattaacgagaagacatctacccacgtcacagtaatatttataaacaacgggatgaaagcttacgattctaccaccaaatcacgcacctttttaaaagattgggcatgaattatgtcctaagtatatggagtactccctattaaaaattagagcaagtatacagaagtattttttttaagtcagctaacaatatcactgttttgtctggttaattaattagtatgtattatggtgattgttatttgacaatgcccatgcgtatttctaaaggcaaaacagtatcactagtgagcaaatccttattggtaccagttgggaaccggctattggtgtcggttacccagccagaaccaatttgacggctccaatacccaaacacatatgtaccggtacctatagagattatatgtatcggttcttaccccaacaccggtaactctagttttcaacgaatgaaaaaaaaatcttggccaccaacgccgccgccaccaacgccgctgccgctggtaggagaaggcagtggagaggagaggtcattgcggggaggaggcggatgcataggagaagggctgccaccgctgctggtgaccaccgtggtcctctccgctgtcactgccagatctgggtggccctgcggtcctctccgttgtcgccatcggatctgggcggccgctgcggtcctcctccaccgggagagaggggccggaggggaggatggcggaggagtaggcgacgctgcaaccacctccacctccgccgggagagagggggctggagggtagggtggaggaggaggaggaggcgacgccagccaccatgttgcaacaaggaggcggatatagaggaagaggagtggagtatggagaggagagagagagatagaggagaccgcccagatggataaggactaggaggaggaggccgcctggacgaagtgagaatgggtgctcggttcaacttggctctggtgccgggcacctatagcttattataggtaccggtttttatgcaaatctgacacacctataatataagtataggtcctttttttaaaaaaaaaaatcggcacatatacaataggttctagtttttatggttggattttagcatgataacaataaataaaaaaatgtgtaagatagctaaataatataaacttacgtaagtgatatggtgtatgataatttaaatttaaatagtatatagataattcaaatgtaaaagtaagataatggagttttatgagaaaaaaagggagtgagatagtttggaccatagattaatcatctaagtctaaaaataattgatgtgatatgatttaatgggagaagagagaaataacactaactaagtgaggatgaaccaaataggtatatatatatatatatcataaatgatgaagatatatattgaaatattatttaacattcttagattttaaaactctaaaatttaataaattataaaattatagataatataacatgcttgcatgatgtttaaatgcaataattgttagtgggtgatgatgttgtttcttgttaatgcatgataatgtgacatctttgtatgttgagttttaggatttagtaggttataactttacaataagataggataggtgccagtttaaaaaaataaaaaccgacacctatgaaccggtacgtattatatgttttgtagtagtgtatctcatagtactgcatgcagcatagcatcgtcacaaatgggccaagagcctatcataacggttctgtgaaccatcatattttttatgtttgtgataatatgaggtcgtcattgaatgtttttctgccataggaaaatttctattggaaaggagggttgaaatacgtgtacaatgaaactcccaatttagatgaaaacttgtgtaaaacaaaaaaaaatcatctaaattcacaaaaaggaagatctcgcatatagatgaaatgatggtggacaatagtgaaaaaaatcttgtctgaattcgacttcattataaactgattgcgttgggccatttgtggtgtatggtagagacattagaaaaataggcttgggattaggggatgtttggctgctgagcatagtttgccttgttttttgtatgccaaacttttctttaactttatcccatacttcataaatacaataagttgtggtacttgataagaaggctaagagcaagtataataaataagtgatgcaagtgagcttcagaaattgctacattagatttgtgtttaagtgaaaaagagagaagaggggagaaaataaaagcaggctacatatttgtagcaagctgtagcacaggctctagctcttaagatgttgcgtgcgtatgagaagtcgcctaggtattagtagtatagtatacatttatatgtatatgtataggcaggctattagattgactgtaaataatgtatcaattttagactatacaattaaactttcttta

SEQ ID NO: 4159 - DNA, 2573 bp, Oryza sativa
taatggagtatatatatggtgaaaatagctgagttactgggctccaccctaaatatatggggctccgcccgtgattattgttgtagtagttgtttagaacggtgtgctgtgtagtatgtgtctgcatgtgcagtgtccactggtgaagaaaccctttgtagtcccggttcgtaacccccctttagtcccggtttccaaaccgggagtaccaatccgggactaaagatcgctatcgttagtcccgggtgaaataaccgggagtaaagatcgatctttagtcccggttggtaacaccaaccaggactaaagatcgagctgaccttttttttttgcatgcccctgttgctgcatggtttatatatatatatatatatatatatatatatatatatatatatataaaccatgcatatatatgtttcaatacatatatatgcatacatatatatatatgtatatatatatatatatatatatattatattatattatatgtatatacatgcataatatatatgtatttatacatatatatgttatgcaaatgcatatgtatatagatatatatatgaacaaaatatatttacattatagaaaatgtgtacacatgcatatagaaacatatgtagtcatgtattaattacagtccattatatgtcctagctagctacaatttcgatgtagtagtactcgctgctagctcagaagctaaggaccggtgaattgtgtttccgtcgtagtagaattcacccttgggatcaaggatttcttcgttgatgaatcccatgagttgttcttgaaccgccgcgataaattccttgtgtgtggtcaggttatccctcatgcgaataaactatatgaatgtatgaaattgattagtaattaaacaagaaatcgctacgtaatgaaattttgaatttatttgtacgtacatcgagctctcttgtggtgatgatttgatctgcaaggcagtggcaatactcgcacacgtaatagccgcacaagttagttccctgcttttgctttgcgcactacaaataaatgacaaacaacgagagatctaattaatatacacttgtatgtatttgaatcggagaaatataaatgtagagcatgtgtactcacaggaaatttgaacttccgcctaagtctttctctccatttgccgcggaccaaatgacggaaccgataccaagccctacatggagtttaaagctatgattcgtagtagcaattaacataacaagattttcttaattaacaaaggaacttatgacggtacctgtctataagttcgaaaaccttgtcaaacgtagactcttttttatccattgagtcatatacgttgacggtgcaggcctccaggtcgatgagtaaaagcacccagtggaatctgcaatgtgcgtgggatgcattacatatgaaacacttagcaagttcgtacgggaatgaaatttggtatgtaggaagacagtaaaattaaactaactctgtgttgtatggcaacagtatgaacgtcttgtaatgctgcgccttcaggagatggacgagattgtcctctgtttcttgtggatattggtcgagcattgcggcgtttactttccgagggtcgatgaatccagtatcgaaaaccctccgccgtcgggccctttgaatctccattctacaacgataaaagggagtatattattttctatggtctacttatatacaaggacctaattaattaaaggagacgtatagtaagaaatctaactgaacgatatacttacaaaatccagcaactcataatagagacgtcgagggcgtccagctggtatagttcgtagattcccctgaaattgatccagagaatgtcatctccttgcaagaagtccgtgtccctgatcctcgctccgatcatctctctaccggtggcgctcatctccatgtacagctgatggaacttgtacatttgtgtgggtagggactgcagcagctcaggcttgacaagcggtttaccgagttcgtacatgtatttcacttccgccttttcgattggtgcgactcctagcaattgatccgtagttagaccggtgtcagtaataaattgttctatcgtcatttctttaccggtcaccaacggctcgatctccaggtttggttgctctccaagctgagggactggtttggactttccagaagatgctttcttcagcgttcgctcatagtccgatagcttgatggcctccttgacagatgcagacatacccctgaagaagttcctgacactggggtatataggaatcttcttttctagacttcgaggcttgaattgtctcttgacttctgatgcaacgtaagcgtcaagctcctcttgcgtgcaatcgtatcccgggtccttgttcttggcggcgtcaactttcgccttcttcgttgcccttgtgtgggcaggcggtggagctgggggggcccttgactttgaaggtgccggaagaggagcttgtgggggagtaggtgtaggagcacgaggaggagtcggtgcaggatcctgaggaggagtcgatgctggagcctgaggtggagacggtgct

SEQ ID NO: 4160 - DNA, 21348 bp, Oryza sativa
tgtgagagattatttattagtaatcaacatatataagcagcaactagcggaatggctaaatcttacctttattgataagttcttgaaaggaatatgcagctcacatggtgtccgctgagtgatgtcatcaacgggacaggtcgattcgtcctgtgtttgcatggcgtccatgctctgtgatcctacctgccccgttgaggcgcagctgctacggtttcctgacgggctcaccattgcaggaggaatggtcggctggggatcatgggaccgatgtgcggccatgcgttcatcaaccttccttgccacctcctcttgcatgttgagttcgtagctcgatacccggaactctaggtctgcaatcttcgcctcggtatctctcttgctcctcatccgactcctgtacgtgtggatgtcctccttgaaaccaatcttccaaggaatcacccctttccctcgagttcgtcctggatgctctggagtctgcagggcgagtgtcacctcgtccctatctctgtctggtcggaacgtgccctgagaggaggcttccactgcatctgttagtcatcgcgcagcctctcgtatctgatagccgaagaccagtgagccatcagctgggttgagcgttccaccgtgagcatagtaccagaacttcgatcgttccggccaattagctgttgccggttcgataccccatctttagtcccggttgttctcaacaaccgggagtaaatatcttttcctgctatttcgaaattctttttaaacccggttagggttaagaaccgggactaaagattatagcactgcatatgattttcgcttacatatgtgtttataaaatagaagttaatgcattaacattatttaaagtacaaagattaatgacaattacttcgaaaaattatttttgtctgtaataaattaagtggataaatcgtaataagcaaatataattaataaaaattccaataatcatatatacttagcatatatatgaatgatattattatattggtaaaaactctaattaagatatgtatgtacatactgcatgatttaaaattaataaaaattgtaatcatcatatgtacttagcgtaggaattatattaaattaaatgctaaaaactctaattaacatatgtaaatgccacatgcatgatttaaaccttttaaaaattcgaatagtcatatataagtagcatatgaaagatagtaaattaaattgtgaaaaactctaatatatgaatgatagttttaaaaatatattaaatttaatacttttaaaaattctccagtcaattataattagcatatgaatgatagtaaagtaaatgttaaaaactctaattaacatatgaaattgccacttgcgtgatttaaaacttttaaaaatcctctagtcaattataattagcatatgaatgctagtaaattaaatgttaaaaactctaattaacatacatatgaaattgccacctgtgtgatttaaaacttttaaaaattgtaagtatcacatataactagcatatacatgatttaaacttgttgaaacctctaataatcatacgtaattaacatatgccatacatcaattgatttatatggataatcaatacatccaaaatagtttacatcgtgtacacaataattacggcacgtactttctcctcactattgttccctccttgtgatcgttgcgtgagtaaggggtgtcttcatttgataggaggatgctagggtcaatcgtcaccgtgaaagggggttgcccatccaactgatcgtaatcctcgtcagtcttgtcctcaactccgacgatttttcttttgcctgggagaaccacgtgacacttcggctcatcaggccctctgcccttctttcctttgctagatatgtccttcacgtaaaagacttgcgttacatcattggcaaggacaaaaggttcgtctgagtatccaaccttattaaggtcaaccgttgttatcccactatcatcaaccattacgcctccaccagtcaacctaacccattggcaccggaacagagggaccttgagagaaccatagtcaagttcccatatgtcctcgatggcaccgtaaacgtgccagttgttccatcgtgtcccatggcatcgatacgaacagcgctgttttggttcgtgctctttatgtcttgggctctcgtgtagaatgtgtacccattgatctcatatccctggaatgtcgcgatcgacccaaatggtcccctcgctaggaaggccagttgttggttgatcgtctcgttacccatgagatgttgtcgtagccacgcggggaaagtatcgatgtgatgccgtgtaatccatgcatcggacttaccgatgttcctggcgcgaactagagccaagtgctcctcgatgtaaggagctactaatgaagagtgttgcagaacagtgaaatgggctttacggaataaattgttgtctaccgtcattattgctttccttccgagagttccctttccccgtagtctcccttcatggcgtgattcaagtaccccgattgggcgaaggtcttcgataaattctacgcaaaattcgatgacctcctctgttccataacccttggcgatgcatgcctctggacgagcacggttacgaacatacttcttcagaacgcccatgtacctctcgaaaggaaacatattgtgtaggtacataggcccgagaatactgatctctttcacaaggtgacaaagcatatgcgtcataatattgaaaaatgaaggtggaaatatcaactcaaaactgacaagacattgcaccacatcattctgaagggcttctaatctatccggatcgatgaccttctgcgaaattgcgttcatgaaagcacatagatttgttattgttgcccggacattgtctggaaggataccccttattacaactggtagcagttgtgtcatcaacacgtgacagtcatgagactttaggtttgtgaacttcttctccttcgtgcttattattcgcttgatattcgtggagtatccagacggtacctttatgctctccaagcattcaaacatactttccttctctgccttgctaagagtgtagctggttggaatcaagtaatagcttcctttctcttttgtttccgggtgaaggtcgccgcgttgttccatatgcttcagatcattacgtgcttccagtgtatctttcgactttccatatacacctaggaagccaagaaggtttacgcaaaggttcttagtgaggtgtatcacgtcgattgcatagcggacgtccaagaattcccaatagggtaactcccaaaatatagagttctttttccacatagccgcgtgaccatcttcgctctctatatgctggcttccaggcccctttccgaacactactttaacatctttaaccatagcaaacattgttttcccgctgcgatatttaggcttcgtacggtggtccgccttatgttcaaagtgcttgcctttcttccgtaccgggtggtttgctgcaagaaatcgacgatgacccatgtatacaaccttcctacagtgcttaagatacgtattttttgtttcatccatacagtgagtgcaagccttgtaccccttgttggactgtccggataggttgctaagtgcaggccaatcgttgatggttacgaacagcagcgctcgtaggttaaactcctcctgtttgtcctcgtcccacacggggacaccttccttcttccacaactgtttaagatcttcgaccagtggtcttaggtacacgtcgatgtcgttaccaggttgcttggggccttgaataataatcggcatcattatgtacttcctcttcatgcatagccaggggggaggttgtagatacacatcgtaacgggccaagtgctatggccgctgctcatctctccaaaaggattcatgccatccgtactcaaaccaaaccgtatgtttcgtgcgtcctttccaaattctttaaattttctgtcgatgtttcgccactgcgaaccatcggcggggtgtctcagcatcccgtcctgttgacgctcttcagcgtgccatcgcaacattctagcattccccttgttcctgaacaaacgccttagccgtggtattatagggaaataccacatcaccttagcaggaattctcttctttgttagctgcccgtcaacttctcctggatcgtcccgtctaatcttgtatcgtagtgctttgcaaacagggcatgcttctaggttctcatactcctcaccgcgatataggatacaatcgttcggacatgcgtgaatcttatgaacttccagtcctaacgggcagactatcttcttagcctcgtacgttgtctcgggcaatttgtttccccccggaagaatgttcttgacgagtttcaataaatcgccaaatgccttgtcactaaccccattttttgccttccattgcaacaactccagagtggtatccaactttttgtgcccctgctcgcaacctgggtacaacgaagttctgtggtcctccaacatcttgtccaatttatgggcctccttttcactttcgcagtcctccctggcgtcctgcaacatctgaccaagatcatccgcaacgtcgttaccatcagcaactatttcctcctcgcccgtttgatttccttcaaatccaacatactgagcaaagtccggaatattgtcgtcttccacttcatcttcttccatttcaacaccttgctctccgtgggatgtccaacaattatagcttggcatgaaccccgactcaaacaagtggaaatgaatagtcctggatgcagaatactccttctgattcttacacttattgcatggacaacaaataaaacccctttgcctgttagcttcggccactctcaaaaaatagtgcacgccgttaataaactctttggaccgccggtcagcgtacatccattgccgatccatctacatgagtcaaaaaaaccgcacacaaataattattcttacaataatgacagtcatacaataattataagatatctttattcatacaaaaatcataaaatattacaccaaataattcttaaaaactatttgtaaagttttaaactaattttaatgtgttttacttcttttaattttcattttagtttgttttctattatttaagattaactttcactagagttttccttctcaactattttataaaaccttgtttagcaaatgaactaaatttctatatattctttcttccccacacacattttctctctcatcaacttacaactaaattttggagacaaaaaaagtgtgcaaaacataggtgcaaatgtagtatgacaaaaaaaacattggaggatgaagttgcaaaccttttagccacctccgatttgtatgtaatcaccaaaataaattcaatagaaattttggcatgacctcccctcttttttgaagtaattttgaagcttgctcgggcagctggaggaggaagaagacatatatataggggtgggactttagtcccggttggtagcaccaaccggggctaaagatcaccgggatcatagactaaagttaagatctttagtcccggttggtagcaccaaccggggctaaagatcaccgggatctttagtcccagttagtattaccaaccgggactaaagttaccaaccgggactaaagatcccgggggggcctgacaggtcctgacagcattcgaaccgggactaaagatgatctttagtcccggttggtaacacaaaccgggactaaagatcaaatatgcccgttacccttttgaaccgggactaaagatcatctttagccccggtttttattgcatccgggactattgtggaaatcggccgaccgacgaaagatggtttctccaccagtggtctttttttaattcataataaaattaaagaaagtaatgagatgttagtatgaatcactgttaaaagaaaaagaaaggaaatttagtttgtttttttaagctcctgtccttttgaaggccgggcctttttgggcccgtctaaggtctattaattcctcattgtatatatataggatacctaaatactcctagtatatactactgagaatatattgcagtccagataaggcaagagcacaacaaattgccttcaccattcagttttgccgtctacacatgtaatatatatcattatctaaaaaaaacacacatgtaatatatatctccaaaacccagtagtagtaatcttgaacgaatcatcatcatcatcatcatcggtctgcatcactgaggtgtcccaaagtccaactttcatccatctgcgcgtacgtgtgatggaggaattaacacgagtatggtagtaagcccatacgaaaatcttcctcctctttggcaaaagaagtcttgctaaattctctaattttaggctcttgtcaatttaagaatcttaactttttccgcagaggatgaaaaaacgagttaaatgctggcactaatccaaaaactctgcacctagatctccctcagtctcttcaatgtattctgttcagattgcatatattggatcaagatcgacccacaggacccatcaatacttataatagtacatgaaacaaaccaaaccgtgggtaacaattcaagtcctaaacttgacatggttgctcgtacttactgttatttttttattcaatggtataagtaacgtacctgtcgacagcaaggcatccatagtaacttcatcaatctcaagatatatcgaacctatctttgaaaggtcatggtaatttcattcaacttaagatatgcccgttctagctatctttcgaagttgtgtatgtatacgtttataggggtaagtgtgggcacgttgtgagcgacggtgtgtttgtagtgtgtttaaaaaaatcaatgaagtatttaactaattaattactacgtgcttctttcttaaccagtccaaaattaggcagtatatatatcaaacgaaactgatgaatttttctttttccttcttttttctttgcaaaaattaactttgatgtattgtcatgttggacgatgtccatgataggagctctgttatatatagggttggccggatatgtgatagtgaatcaaccagcgtccctatcacacggggggagagccccaatcatgtgattttggtcctatatatggagagtagtacgccaacagcaatttgatgattggaagatgagcttaattaatcgccatctcttccattaattcgatgatcgattggtatagtacgtacgtactcctctgaatccgataggtcactcatcgatcgttaattaaaattaacacgattttattaattatttcttgatgcttatatattagtactagctagctgtgttacgttggtgttttaaggatatagggcctggattctccgataggaacggcacccctaccttgaccatgatatgtactcccaaaggtatagtcgtggcgaggtaagagacgacaaacacacaaacacacacacactgctctctcccaggaccctcaatgattagatgaggctagtctagtgacaaatttgcatccatctgtccctttttctcaacattggggagcttgttctctttcccttgtcatctgatcgtggagcaactttgtttttgttttgccagtacatgcagcactatttggtgagtgggatgtccatttttcatttaattttcactgtgctgcctagctatactagctagagtatttaattgattattcttttgttgtttttttctcttcttctagttagccctagtgctttattcatgtgctcaaattttgttgctaacatcaaggatggatttctttttccctcatttcaagaaagctcactcctaccttttgacaatggaaaagttcacaagtccacaagctgcaaatgcactgctgccttttggagcaaagataaatttataaaacatttttaaagctaattaaatcacacaaccaagatccatttagacaagaagagaaacgcaaagagtaacgcttagtatttctgtgtttgtgcagttcatgcgttccaaaaggaaaagaaaaaaggctgttaatttgatgataaccaaagttcctgttaatctgaccagtgattcgtacacacaaaaggaaaacgtccggtctctctcacgctctcatctcatgacgctacacacatcaatgagcattaagcatggggaaaaggagaggtatcaaaccgggggggtgagggccccaggagtaggaggaggagatggagagaggcagaagaggacaagttagaggccctcgtgcaactctgatttgattgataagccccatgtactaccttgacggcacatcccaaaagccaaaaacaaaaaaccaacacgtacgcacacgacggaatagtaaatggaagaaaaaagaaaagagagggagagaaaaaagtatagcaactggcactgacatggccgcgcacacaggaccggcggaaaagacgcatgaaaagcgcaggatttcctgggaatctctcgtttctgtcctttagccccaaggtttggaccaaaacagctccaacaacaaccgactcatcaatcttaccaaacacttgagactactggcttgtagtaggatttaaccatttaattaggtttgtaaaatttctttggaattcatttctatgctctagttttaaagaattttaaatatgagctccaatctcaagttaatttttcctataagaattccaaagcaatatctctctttctcttactctgtgcaagtaatacatacctcaaaaatcttatatttttcccatgagccatctaaaaacatgtgtttgagcaatcttgtgattctattttccaccagtaggattgatcgtgccacaacattccaatcatgttttttttctattatggtttttttttaaatattacgttccaaaatagccttatagaactcctttaaatccatataaattttagagtatttccttcattaataattaaatcctttcaagactcttttcaaacctaggaattgcatcagaattccatcattttaaagagtggtgtgcggtttttttattcacatcaaaattccatctgtgtgatttcagtgaaaaaaaacatgttctgatatatgtgtggtagtatataaagggttaatttgatacattcaagtagaacattgcaaatttgccaatttgaaaaaaatgtcattaccattcacggtatcgactgggtgctactgaaattttgtaaaattagaactatatcaatattgtcacgttttctatattcttccttattttctttcttcttattaccatcgaggggtcggctacgactacgagaagtctggtcgacaagctcccccaatccatgttaatataaaggaggtggtcggcgagcatccatcgctgccttgaactaccgtgcctggaaggcctcagagcggtcgaggatgcgggtgcaagaagcgttgacaaagaggaggtcggggatgatggggtcgaagccaggatggcgagtaggcgtaggttgaccctgaggaaccggcacgtcggcttcctccttgcagtcgacccctcgactgtgtcacccgcaagtttgtgggctagagctcgtggtagggtcaaatgactatggcatgactagcctcaacgccgccgacaacaatagctggtagccgcgaagactacgacacggcgaggaagagggagctcgcggtgatgggaaaggccccgacctatatctagcgaagccccgtcctcttcggtatcaggagtaggcagggcagttgggaggagctcggggcatgtggcgacaacgcgacgtgcttgagcgagtggtggcagtgcaagagtgggtgggggccatcgggaggagctcgtcatcgacccctccaagccgagtgcaaagctaacgatgcccttatccacagacaccaccaccgcaccgttcgagcgttgccacgtcctcggatccaacgctaggctgacactatggacctcgttggccggcctcctcggagctcactaacgatgagaagaagaaaaggaaagaaaagaaggaagatggaaaacatgatgatgatggcacgatttcaattttgcaaaatttcaatgacattcagtcgatatcgcgaaaatagtaatgatattttttaaaaacaaattggtacacttgtaatggtatggatccaattaatcctattataaatgtacattatacttgtttatgtattccaaacagctcagcttgttaataattatcctcagtgctagtatattagtatatacaaataagacatcgatctccatctccctgatctaaggctgtgaaagatgaggtatagaggataggatggattgatgggcaacggatgcatgtgaggtcgcatgtggcgctaatgagagggcacatggtggagctagcagcagagcaagagagggacattccccactcgtgtgggtggttggttggcggcttaaattactctcactttttgcatgacagagttgggtgagtgagtgaatgacactccactatactactccactccagtaccaccagtcgacgatgcatgtgtgcatggattgatggatatgtagagatagatgctctgtccagtgttgtgcatgcgtgcgtgcgtctgtgtacctactcgttggaagtactcgcggcccccttctttttattttctgcatgtttgtttgtggcttttcatggatcatatggatctccaaaccgggcgggcgccccatatatctctgctgcttctccgaaggttccttgatcgataataaaaacagctgcttaactaattgcaggaccattttgttggtgtcccgttttgcaaaagagaaaaaaaaaaccgctgttgaatttcccttttcccaaatccacttccgagacaaacaaaatgaacaagaggccggggacaagtgagttaagaggaatgaatattgtacacctatccaatcttggaggtcgagaaagcagagacgagaggtaaaccgggaaatggtaacaggcgttgaacactgttccatcggatcgatcgatgggcacatgaatgatagagtatagtagtactagtcgtgtgcgcccatgggaagcagacatacatacggcctaactagcgcacagtacgtacgcactgtatgtgtgtaggcggagcccccccaactcccaaggaaggcggccgatcagatcgatgagcagctagcatagcaaaatgcaggacgatccatgcaattgatgcgtgcctagctgtgagtcgatcgccggccataaatacacgcacgcgtgcacgtacattacattacacccatccatccacgatggatcgatccatggccgtctccatcgatatatactccctccgtcttcttaaatgtttaacgtcgttgatttttttaaatatttttagccgttcattttatttaaaaaaaattaagtaattattaattattttcctatcatttgattaattgttaaatatatatagttttatatatttcataaaattttttaaataaatcgaacagttaaatatatttaaaaaaattaatagcgtcaaatatttaaggtacggacggagtatatatctgtcgtatactcgaatcagtggttggaatgataaatgaagagaggcgaaggtttggggcgggcgcgtatatcatgcatctatgggcaattggcatcggcgcctctagtaggagtacgtacactcctggagtagtacgagtagctagcagcaataaatgcacacggcaaagatgatatacaacgtactgtaggcatcggtgtatgcatggaccgacctcccatccgtgcgtgcggtagccccctcgctcctcccctgcaactgcaagctgccaacgcgggcacacagccaccgcacgcccatctatcgccatcccctctcctctcctatcctgcgacctgcgcgcgcgtgcggacgtacgtacgtacgcgcggccgctcgcgatcgatctctcctctccgcgcgcgcgtcaattcattgctcccaaccaaccaagcgcagggagcaacactgcgctgctgactccaccgcccggcggccgcacgcgtgcctgcagcctagataggctaccgtagtagcgctagcgcgggcgtgggcgcggcgcaaaaaagccgcagagcccgcccgcccgccccgaagacggcagacggcgcaggaggcagtaattgcgatcgtgcgggcgtgcgggggcactacccacacaccgcctactgccgtcctctttctttaccattaacgtccagcccatgcaggctgtgtttagtttacacttagaagtttggttaaaactagtatgatatgataggaaagttatgcgtgtatgaaatgtttgatgtgatagaaagttagaagtttagaaaaaaaactttggaactaaacagggccgcagtcccctgtctcagttcctgttttcttactatcctctccaatgcatttatttattatctagaaaatcagtaatttatccttcgttctaatataagagcaggtgcaatactggacggtataaggtccacgtaggattttttgatgagctagaggagagacagcagcagcagcccaactgcatgctcgtcccgaggcagcggggcccactagcgcgtccgcatcgccaactcgccatccgctccgcccgcgttccccgttgtcgccgtcgcgctacaccgaacgccgcctcgtccaccatcgccggcgtctccgtcgctctcgtctgccgtcgttgagctccaccgggccgccgcctcgtccaccatgaccggcgtctccattgcccttgtctgccgtcgtcgccaccctcatccaccatggccgccgtctccgtcgcctacgtcggccttggcagcggccctcgcccaccgcgaccgcctcggttgcggacctcgtccacggcagccactaccgccgccactgtggttctcgtccagcccgaccgcctgcgtcgtcctcacccgcatacgccgagccgtggccaccatcctcgcctcgtcgcccgtatccctttcgccattgtcgccagcgtccatctcatcgtcctcgcccacatccgccgcgccgcgaccgttgtcctcatcctcgtccatcccgccgtccccgcccacatccgtcgtgccccaccgtcctcgtcctcatccatcccgccgtcctcgcacgcgcctgtcccaccacccttgtccacgtctgcagcggccgccgtccccttccaccacagccgtcgtgtgctggcctcgctggacccgatgaacacggtggccaccgcggctgtgccggcgagcgccccacgccacgcgaggcccttgttgaggctgaggaccatcttgctgaccgtgatgtactggtgttcgtccttggacttgagcacgtgaaggatcccgtgcatctcctcctccagcaagaaagagagtagagggatgatgggcccataaaaattaaaaaaatatttgtgttgcagtaagtatacgatatctctattgtatcaattggctataatgattactccagatgaggtgtccctctattgcagccgatagttggctctgttattgacctcgctctaagcttaaatttttcacgcatcccaagtataccaataaaaaacataatactttattcttctttttatattttgccaatgcatttatctcctactttctcaaattcggatgcaatggttactcaaaaatgaacttaaaaaagagagatgagtcaaaaacgaacttattctgaaacagatgtagaatcgaaacaaaagaggctccttgggcaaaccctaaccaccgctacaaccccatcattcctctatcctcacagtcgtccaagcgagccactggagatctgtacatccattaggaaggtggtggcggggccaaatcactagctagatccaagccagcgagaacaaccttatggtgattttttggttgtggatggcaacatccttatcacaacatgcagtacactggtggagaaagcgtttctagtcccggtttgtaaccccccttagtctcggttttcaaaccgggactaaagatcgagctgaccttttttttttgcatggccctgttgctgcatatatatatatatatatatatatatgaccaaaatatatatttacattaaagaaaatgtgtacatgcatatagaaaaatagacatgtattaattacaatccattatgatgtcctagctagctacgatttcgacgtagtagtagttgttatctcagaagctaaggacctatgaattgtatttccgtcatagtagaattcacccttgtgatcaaggatttgttcgttgatgaatcccatgagttgttcttgaaccgccacgataaattccttgtgtgtgatcaggttatccctcatgcgaataagctatatgaatgtatgaaattaattagtaattaaacaacaaatcgatacgtacgcaatgaaattttgaatttatttgcacgtacatcgagctctcttgtggtgatgatttggtctgcaaggcagtggcaatactcgcacatgtagtagccgcacaagttagttccctgcttttgctttgcgcactataaataaatgacaaacggcgagagatctaattaatatatacttgtatgtatttgaattggagatgaatataaatgtagagcatgtgtactcataggaaatttgaacttccgcctaagtctttctctccatttgccgcggaccaaatgacggaccaaatcttcaccggtcaccaacggctcgatctcttggtttggttgctctctaagctgagggactggtttggactttccaaaagatgctttcttaagtgttcgctcatagtccgatagctttatggcctctttggcaggtgcagacatacccctgaagaagttcctggtactcgggtctataggaatcttcttttctggacttcgaggcttcaattgtctcctgacttctgatgccacaaaagcgtcaagatcctcttgcgtgcaatcgtaccccgggtccttattttttgcagcgtcaactttcgccttctttgttgcccttgtgggggcaggcggtggagcttggggggcccttgacttggaaggtgccagacgaggagcttgcgaaggagtcggtgtaggagcctgaggaggagtcggtgaaggagcctgaggaggagtcggtgcaggagcctgaggtggagacggtgctggagcatgaggaggagacggtgcaggagcctgaggaggagatggcagagccggaggagatggtgcacgagacgccgcttgtcgcccagggaggatgatgtaccgcttgcgccatagtataatggcgtggcttgtgtctcgtagatgcgtctcaccgtctcctctatggtaatccaactcgaggtcctcgtacgtgccttccaccaactcaacttcgaccttggagtatcctgctggaatcggcctgcagtggtaagtacctgaagggtccgttggtatggccatgcccgacgccaccttcacgtggtgagacgttatttattagtaatcaacatatataagcagcaacttgcggaatggacaaatctaaaatctataaactacaaacttacctttattgataaattcttgaaggaaatatgcagcttacatggtgtccgctgagtgatgtcatcaacagggcaggtggtttcgtcctgggtttgcatggcgtccatgctctgtgatcctacctgccccgttgaggcgcagctgctacgattgcctgaagggctcaccattgcaggaggaatggtcagctggggatcatgggaccgatgtgcggctatgcgttcatcaaccttccttgccacctcctcttgcatgctgagctcgagctcgataccctgtactcaagatctgcaatcttcgcatcggtatctctcttgctcctcatccgactcctgtacgtgtggatgtcctccttgaatccaatcttccaaggaatcacccctttccctcgtattcgtcctggatgctctggagtctgcagggcgagtgacagctcgtccttctctctctcaggtcggaacgtgccctgagaagaggcttccactacgtccgttagtcgacgcgcagccttgcatatctgatcgctgaagaccagggagccatcaattgggttgagcattccaccgtgagcatagtaccagaacttcgatcgatccggccatttagcggtggccggttcgatacccctctcaagcaagcttgcctccatctcctcccacttcggcatcgcgacgctatagccgcctgaccccaagtggtgatggtacttcttcttggcggcattttctttgtttctttccatcatcgcctgcccttgttgacctgtcttatatgcaatgaactcgtcccagtgatcccttagctttgggaatgtgtcgaagttcggtgtctgccccttcaggatatatttctggtacagatctcccttgaagctctgaaactgttctgccattttctttagagtccaccttttcactttgtcctctgtacccgcgggaagggtgaatgtctcgagcattgcggtccacaacatctctttcttcgaatctgggacaatgctctcatgatctccgcgtgcccttgttttgccagtacaccgtactgacaggcatgttatcccgcacaacccaaccgatgtgtcgtacgtagttcttggctgcttccgccggggcactaggtcggccgtcttcgtccacttccgttatgatgtgccaaccctctagcttcttcgcggcacctcgttgcccgcgtgccctcttctatccagcggagggttgacttccactagcctcctcctcctggttcccctccacatccctctccacgttcccctcctggttcccctccgcatccctctccacgttcccttcctcgttcaagtattggtttggatcctcgttcccctcttcttcgttccagtactggctgctttcctccgcgattgtatcgtacagtatctattcctcatcacgatcagccatctgttcatacgagaaatagttgctaagtctataggtcatttttgctttaacaatcttatatgctaacaatcatatatgctaagtcaaatatgctaagtctaactgtcgtatattataaccctacacaatcttatatgctaagtcttattacaaatctaataatcttatattaaaactctaataatcttatattaaaactcaaataatattgtattaaaactctaatagtcaactatgctaagtctaagtgtcgtatattaggaccctagacaataattatatactaagtcttattacacaaatctaataatcttatattaaaactctaataatcttatattaaaactcaaataatattgtattaaaactctaatagtcaactatgctaagtctaagtgtcgtatattaggaccctagacaataattatataccaagtctaattacaaatctgataatcttatattaaaactcaaataatcttgtattagaactatgctaactcaaacaatcttatatgctaagtcttattacaaatctaataatcttatactatgctaagtctaagtgtcgtatattaggaccctagataatcatatatgctaagtcgtttaagtgtcgtacattacaaacctagataatcatatatgctaagtctaagtttcgtatattaaatctaatagttttaattgcattaaaaaaaatctaacaatcatatatttacatcacttgcctgtgcgaattccttcgagggctagctaccactccggcttgagggacgacgacgacaacgtcttttctgcaacatacaaaaagatgtattaggataaacgcaaagtaacatatattgtatttcacattcgcgttctcgttaagttcacgtttcgttcacgatcgttcacattcacattctcgttaagttcacgtttcgttcacctacgtgcgttcacgttaacgtatgttaagttcatgtttgcgttcttgttaacttcacttttcgttcacgcacgttcattcatttacgtacgttcatatacaacgttaagttcatgttcgttcacgttcacgttaggttcacattcgttcacgttcacgtacgtttcgttcgttcacgttcgttcgttcgttcgttcacgttcacatacgtttcgttcgttcacgatcgttcttcgttcgttcacgtggcggcagcggagcggcggcgtggcggcgcggcatcggcgtggcgcggcctggcgtcgtggcgcggcttcgtcggcactgccggcgcgacgtcgtcgccggtggcggccgcatcgaggtcggggttggcatcgtcggtgcggcggagtcgtgttcggccgcgacgacgccggcggcagcgtcggcaacgaggcggctgatggcggtttggggagagagagagagagagggaggcggcggcggctctcaccccagagatgcggcggcggcggaggcggcgacgatgacgcgcgcgagacgacggcgagatacaacggcgacggcggcgcggggatgccctaggcagtggcggcgaaggagaagccgagagagatcgatccgggaaaaaacttctaagtgttggtggagaagacgagggcgcgcatcgggaatatatatacccctagatctttagtcccggttgatgagaacaaccgggagtaaagatatctttactcccggttgatgagaacaaccgggagtatctttacaccctgttgttctcatcaaacgggaataaagatattttccagctatttccaaattctttttaaacccggttagtgttaagaaccgggactactgataagcgcactgaatattaatttccattacatatgtgtttctaaaatagaaaataatgcattaaaattatttgaagtcgaaaaatcaatgacaattacttcgaaacattattgttgtctgtagtaaattaagtggataaaacgtaataagcaaatatatgatttaaaattaataaaaattctaataatcatatatacttagcatatgaatgatattaaattgttaaaaattgtaattaacatatgtatatacatacgacatgcatgatttaaaattaataaaaattataataatcatatataattagcatatgaatgatattaaattgttaaaaattgtaattaacatatgtatatgcatacgacatgcatgatttaaaattaataaaaattataataatcatatataattagcatatgaatgatattaagttaattgttaaaaactctaattaacatatgtaaatgccacatgcatgatttaaaacttttaaaaaatttaattatcgcatataactagcatatgcatgatttcaaattgttaaaaactctaagtatcatatgtaaatgccacatgcatgatttaaaacttttaaaaattataattatcgcatataactaacatatgcatgatttaaaattgttaaaaactctaagtaacatatgtaaatgccacatgcatgatttaaaacttttaaaaattctaattatcgcatataactagcaattacatgatttaaaattgttaaaacctctaataatcatacgtaattaacatatgccatacaacaattgatttatatggataaccaatacatccaaaatagtttacatcgtgtacacaataattacggcaatacatcggcggtgacggttgactgcacgtactttctcctcactattgttccctccttgtgatcgctacgtgagtaaggggtgtcttcatttgataggaggatgctagggtcaatcgtcactgtgaaagggggttgcccatccaactgatcgtaatcctcgttagtcttgtcctcaactccgacgatttttcttttgcctgggagaaccacgggacgcttcggctcatcaggtcctctgcccttctttcctttgctagatatgtccttcacgtaaaagacttgcgttacatcattggcaaggacaaaaggttcgtccgagtatccaaccttattaaggtcaaccgttgtcatcccactatcatcaatcattacgcctccaccagtcaacctaacccattggcaccagaacagaggaaccttgagaggaccatagtcaagttcccatatgtcctcgatggcaccgtaatacgtggcagttgttccatcgtatcccatggcatcgacacgaacagcgctgttttggttcgtgctcttcatgtcttgggctctcgtgtagaatgtgtacccattgatctcatatccctggaatgtcgcgatcgacccagacggtcccctcgccaggaaggcaagttgttggttgatcgactcgttatccatgagatgttgtcgtagccacgcggggaaagtatcaatgtgatgccgtgtaatccatgcatcggacttaccgatgttcctggcgcgaactagagccaagtgctcctcgatgtaaggagctaccaatgaagagtgttgcagaacagtgaaatgggctttacggaataaattgttgtctaccgtcgttattgctttccttccgagagttccctttccccgtagtctcccttcatggcgtgattcaggtaccccgattgggcgaaggtcttcgataaattctacgcaaaattcgatgacctcctctgttccataacccttggcgatgcatgcctctggacgagcacggttacgaacatacttcttcagaacgcccatgtacctctcgaaaggaaacatgttgtgtaggtacataggcccgagaatacggatctctttcacaaggtgacaaagcagatgcgtcattatattgaaaaatgaaggtggaaatatcaaatcaaaactgacgagacattgcaccacttcattctgaagggcttctaatctatccggatcgatgaccttctgcgaaattgcgttcatgaatgcacatagcttttttattgttgcccggacattgtctggaaggataccccttattacaactggtagcagttgtgtcatcaacacgtgacagtcatgagactttaggtttgtgaacttcttctccttcgtgcttattattcgcttgatattcgtggagtatccggacggtacctttatgctctccaagcattcaaacatactttccttctatgccttgctaagagtgtagctagctggactcaagtaatggcttcctttctcctttggttccgggtgaaggtcgccgcgttgttccatatgcttcagatcattacgtgcttccaatgtatctttcgactttccgtatacacctaggaagccaagaaggtttacgcaaaggttcttagtgaggtgcatcacgtcgactgggctgcaggaatt

SEQ ID NO: 4161 - DNA, 14197 bp, Oryza sativa
aatcttctgcttcggatttttgctctttttttatcatgttttttcttttgaagaattcttcgaagtgtctgacttggctactttcataccaatcaaagaaaaagatgttcttcctttgttctctcatttctttatgccaaagttctcttatctttagtctaaatggttcatcgaccctttcaaagtatcttttcatcttgggtcggttcttttgaagcctgagttctcttttaagcaaatatttatcaatttcaaactcatcttcttctatagcaataacaaagccaacatcaagctcgataacattgatatcgaagtctgagattgaaggttcgtcggagttgtcttcataggtagcatagacaacattttgaggttttgtcctaggcctagaatctagactgacagaaggtctagactggagaaaggctttttgttttgaagcaaatgttatctcaacatctccgtctggtgtttcaatcaaggattcgacttccgactgatccatagacttaggttcaacagcttgagataaaacccatttctcaggcagggtgatctcatcccatttcagggttttggggatagtatgtctgttattaggattggtttgaaggagagtggttaggccttttggtgtataatgtttggcacaaggtgctaaagttgtcatggctttgtagtaaactctgtaggtaacggagatgttttcactccctggttctagatcataaccagatgtttgtaagttgagagtgataactttatggatatttttgtctgagagggatacagaaaaatcgggaaaggtattaaaataaacaggaccattactaaggctggcttccaccatgccaagtaaggaatctttgaaccttttatttctgcaatctcttagacaagccagaacagagacgttcaaaccctttctagtcaaggatctgatagcaacttgtataagaccaaagtgaaggtagtgatattgatgtttagttcttatagaatcgatttctctttctgaaagaagatgcagggtttcatgcaaagaactgattggaatagttttttcaattgttttttgtctgccacaagaggtttatatatatatatatatatatatattgttatattctttttctatagcattttttagaaaacttttttatatgaattattttcatgaaaactttctacaaatatactttttatatacaaactgtctatatagaatttatgtatataaactttcatatgtatagatttatgtatataaactttatatatatagactttatgtgtatgaattttctatatatagactaggctcagtcacgcagcgatgctccgtttttcttttttctgtgatttcctttttttttctttttatacatgatttctattacgcgtcaagtctttctgtttttcccactcctctcctttttcaaatatatattttttgttatattctttttctatagcattttttagaaaacttttttatatgaattattttcatggaaactttctacaaatataatataatatatatatatatatatatatatatatatatatatatatatatatatatatatatatatatatatatatacaaactgtctatatagaatttatgtatataaactttctatatttagactttacgtgtattaattttctatatatagactttatgtatatagactttaaatatataggctttttatttataagctttatagtatgaattatatttgcggttagaaagtatagtgtataaatttagtaaaaaatcatcagattccggatttttctttagaaaatagaatccaatcaaacaacttgataatagaaaaaaataagcatgcaacgatctgatcttgtaactgaaaagacagaatactagtatgtactaggaagtaggagctgaagcacgttattgagacgaactgttcgcgagatgcgaatgttcgtgggctagacccacccatgagtggataaccccttccgtttcttctatggtggacttgctgacccaaactatcaccaggtcgtcgtcatgatcctatgggcttcaccaatagtgaattagctaggccggcccaggataggaattgctagtcatgtactccgtagttctggtgggccatatagagcttccggcccagccaaaaaaatgaccttggattattactaatagatacatgtctgttgattatagtatttattaattagggatgaaaatttcgtgtaattgatagttcaggtggtcgtacggactatatatagagaatgcatgtgtcaactcgctcagagaaaaaataagaagaagaaggaagacaatgtgccaacgagcggtgagcagtgactttgctatagatgtatgatgaacaagtatcacaaattgtgcaagtgtgttgcacttgcacgctggctggagcagtaggggcccaaagcacacatgggactggagtggatagtggcagttggtgggcggttaattggaaccaattgaaactgcctccgggtagggatctcgtggccacttgcacaaatgctcctttcatttaaaaatcttctgcatattttattttctatttttttcaaatgagatattatatttaaagttttcacacattcaaacttaaataaatggatttatcttttcctttttacagtgttggattaaattattgactggaagcagtcatgatgttaatactcgttggttgcatgcatgcttatagtttttgtcttttggaataagttaatttctttttaatcttagtgataaaataaatatacccgaaatttttgcatatagggagtatagtgctatgcctccgagtgttctggaagctagctaatgtactctactatactgtactagagtaataatgttaggggtaaatcttaatgaaaacaccttatgaccatcccatatacaaattaattaagcttctaaaataataaataaattaagagttagtatacattacaaccgatgcaattatcattttttacatgaaaagagactttaaacattgtcatcgatcggtctaagacagacgcatctagaaattaagaaaatcaaaaccacggccatcatatattatatattctgccattctggatcactctagctagctcgaccgatcaatgatccgtataattgcgggcgatcaaataataccggtttgagctggacgagagatgggggatcaataatttaggaagcgatcgatgatcgatgttggttaggtggatgcatgcatgcgcacgagcgcatgatcagatttgttaatctcgatcgcgagtggtactagtactagtagctatagcagcatgcatgttgggggcgcaatgatcagtggccactggccagtggccagcgccaacctgacgaaatccagcggtggggcccacatgtatgtcgcagctactagctagcatcctatgcaaagcatgcatcatcgccgttgcattgcatatgctgcaagaacaaattgctgcttcacagcaaagcagagagagagagagatttggattttggaacgacaaccgcaatgcacgggtgcgggcatgcagcagatcaagctcagacgatgcagatgcatggtcatggatggactaaatatcgatcatgctgtgttgcagtacgcacgggagcgagagggccactgcagggcagaggtgtcgggcagcgatgaagacgatatatgttgtcaacttgtcatactaggatcaaataatggatcggtgtgcatggtgataggccaggggtcaccaacctgatccagtgatagatttgatcggagatgtatgtgttgcagcatgatcttggattgtggatatacattgcatcgtggggattaatcaatgatagggggactggataacaagttagctcggctcgttaaaactcatcttatttaaacttattgtctcaacaatctagctcgattcatatcgttaagcttaacgagctaaaagcctaattcggttcagtagcgagatagcttggtaaacttgttaggcttgatgatgtatttaaactatctttgtgatttcaaatttatcattttatattatgtgaatacaataataaacactaactgataaatagctcactaaatataaataatttagatgtaattaaaaaataaaacactaagttaagaagcagtaaattcatctcttgtactaacgagctaaagctcgtgtattggctggttaagatacgagttaaaagactaatttggttcaactgattaaaactatgagttcaaccgatccgaatcaagctcgctacgagccgattcgacccacgaggcgatcccacaatataattaatgtatgtcctgccaccactattgtgtacttgaaacttctaaaaaaacaagtaatgagttcagcctttgataattaaaaaacaagaattatctgctccctttgttctaaaatataatagcttttaggatctatttggagagcttaagattctgacaagcagctgatgagaatctggagaagctgagaaacctagcttttggtttctaattcattttccagattctacaattacagattctcagaatctgggtaaaaagctagactgtttagggtagcttcttacaactggagattctaagagaagctgcaactgctagaagctccccaaaatagggccttcaaaatttgtcctaaaatataacttcaccatctactttcttaaccaattacaaccttccttcatttaattccacatatttccttaatacttgtatccaactcttaaactttttatattttgagatgaatgtagtagctctagctactttagctaatatttactccctccgtcttaaaataaattcatttttcactcaccttacacatacaaatgcaatagcaaaaagactaaaataccactactttattaaataccaatacaattattttcattttatctgctcccaatacaaactccgatgcaacgattccttagaaataatcttattttgagaccaataaatattgtccaatgtcaatcgaaaaagatctacacatatcccggcaaattatcgatgggcataacttttcaaccaactactagggaaccgaagacccaaaaaccagttatgaaatacggcccggtatagttcacaaatttttttttccaaaaacattacattgaatctttagacacatgtatggagcatcaaatatagataaaaacataatctaattgcacagtttggatggaaatcgcgagacaaatcttttgagcctaattagttcatgattagccataagtgctacagtaacccacatgtgcgaatgatggattaattagtctcaaagattcgtttcgcggtttccaggcgagttatgaaattagtttttttcattcgtatctgaaaacctctttcgatattcgatcaaacgtccgatattaaaaaaaaaattccttttcgggtactccatgctacaagccacctcatcgaatactttggaccgggggaggcaggttgtgggccgcctccgcctgcagcatctgcacgtacgcacacacggccgtggtggccggcgctgcctgcacgcggctgacacttgacacaggcaccgcaggcagaggcgcacgtactcatgacgcacgcgcgcacggatgggcactgcgccctcgctgccccggcgcgcgcaccgagacaaagcagagcagcagagcaagcgtgcggacagccgcacgtgtgggcacgagcgcagagcggttggacggaccgcggatcgatctcggcggggccgcatatcgatcgtcgtcaccgcgtcgctgacgatccctgctctgccaccgccgatggccggccttttaggccatgcacagtgcaccactccggcgagtatcccactcgatccacgtgggataattgatgatgtggaggagagaagaggatggaccccgtcttctccgcaatatcaatgtgtcttgcagaagagtttgtttcctcccgccagaaaaggaaatagcgagagcggtctcctctgcttgtgtgtatgattcttcccaactccgcacaaagaccacaagagtgatctctctctaatcccttccaacctccgccgggctccgcttcgtgccaccaagtccgtcgtcaggagaagaggggataggcagccggcgcagacactggcccgtcacccgacgccacgttggatctagcgatagctacgtcattgttgtcctcctgccgtcgaagaagacggtcatcctggtaataaagctacctctccctgctctttcttcccattcttcccctctcttgcttatccccctaaggagatggctaaattttctagaaatctgagtcaccttaaaactagcaatgcctatggattagtgatggatgaatgtagtgtggtagtgttaagcaaaactgtctttcacaacgtcaccccttaagcgagctcccagcttgcagagaggcatgaacagtacaagcccctctttgaaggagcctcaggtgtcggacttactaaagccacaccttatctctcccaatacaaagtggctccagtggtggttttaacttttcgtctcaacccctggtattttctattttagtcctcctagtttttaatttacatacaaatccaatatttagactgagtacccttgaaaccgaaaaataataaaaataccccttcctctctactttcccctcactctctctagcacgccgctccatcgacctgtcgcaggtgtgccgttggcgtggtgccccttgaccggcgcgtgatgagcttgggtcgaggtaagaaagaagctgacatggcagtgaagctagggatccttgtggctatggcaacactggatggcggtttcctcaggtagtgtcgaggacgtcgagtctctccaccatcaccgtcggggcctttccctctcaagaagaacaaagggcgccgatatacggaaggggagcggatgccaataggggcggagctagagaaaagatgagggggttcctacctttctttgtgtaataccgacatctacagatctagggcgacattatactaaatagttgcataactaataaatataagcattatttctttaattgaagggaatataccacaataaatacatagagaagagtaaaaaatgcataccgtaatgaagaaatcaactagtaatatttgtgaagttgataatggttcaaccatagacaaagacttccatcaacaaaacatatgaatatatcatgcgaaatgtgacgtcaccatcttcattcctccataggacaacgaccttgaaaagagatagatataatttaattttcaacaaagaataagtcatgaaatgatttgatacaaattaaaacattttttttttcatattggtactatccagtgcttttcttttgagatatttctacatagcaatatattcagaccaaataaaaattcaagcttttatattggtgtaacaagtgttgagggaaaacactcacttgctctgagtgttggctaactgttgtttgatagaatcacaattcacaaactccggtactgccctccgtggctccgttgactacaagcaacaaaaaataacataatcatgggtagactagcatatattaaaagagaggaacagcagggacgcaactgcgcaagatttagtgacttaccgattggatttggaggcgattccggccggcgttggggccactgggcagcacgggcagtcagccgcacggcctacactggcgggcggccagccggctagggctggcgacctagcgtcagttaggctcagggcagggtggcaggcagggcgcacgggcacgacagtgggcactgggcaggtaggaggcagccaggcagaccactgagaggcaagagcgacagagacgcagacgggagagtgatagacagaggaagcgacatgcgtttgatttttggaagaggaagcgccaaaacggtgccgcccgcgcgctaattccaggtcgccgcccttcccccttctgtcgcgcacgctcgactcgaaatcagaagcgacttctcgtatcctcctatctgttgggctacctgttgggctgtagttttgggccaaagacttggagggggttcctcagtttgggctgagggggtgcctatgtggtggagatatgggggtaagaaggtatttagaattttgggcaggtttcctaggcaccctgcctggcccattgagctccacccatggatgccgaggaggctgaagaacggcaagggatcgagattgacgggccccactgccagatcaggctagcccattcctctcggtgatggtggccctcgatcgtgtgacgatgaccacaagctccttctcttctccggtgatagcgacacccaaactctgatgtaggatcggggttgcgtcaggatggaagcggggactagtgggactagggatttcccccggcttagagccttaactgcctaagaggactgccatctgttgtcactatggtgtgcttgtcttcatccgtatcgttgagcttggcaaatagctggaactgattctctagggctggaaaggagggatggagtagcaactcgacaacccgcgagcaaaggaggaggcaccctagtaacgtgcaatgatgatggtggtagcaacaatgccaaatcccttctttctccactcttgatggagccgcttgggcccctagctatgcccagatctagagttggcgcatgaatgcatggttgattggagtggcggggttgtatggtggagcggttggcaagtgttgatgtgttgttgacgataggggcatggcatggagcccttaggctggtaacggaggataggaggagtatatctatagcgtacctccgatgccaccatttggcccctcacattgtttgcatggtcttcactattgatattttttatgttgacagataaatccgcaagcgtacggataccgttgtagcatttcatatatgagtatcctaacggtatcgtatttataattccttagggaagacggcgacataaacatatgatttgtatatctttaatcagcatataattaattcaccatagtctaaaaggggttaagataataatggataaggtagtggacaaccagaagatttacctctgtaataatgtctagtagaaaatagtattagtgaactacagtacacatgtatttctgtactaatcatgtttaatatacacttaacatatacatatttacaacatagaaattagttccaggcacccaagtactctcgagagaccactctctgttggtctgctagtgtggttatggcatttacgcttttacgtcatacccaaatgtggaggaatacaaaggacggatatagctgtcaccacctaccgcttacctcactttccgttggaacacccgcatgcaacgacatttatctaacttaagcactatgcttgtgctagtaaataatatcactaactcccgcagaactctcaccctcggatgaacaagttggagctagagcacctataaaggtcattagacaattatcgtagcatggatcgacttgcttaggatgaaacagatatacgaagtatatactactcatagaacatatactcaataaagaaatatataaactatgagcataaataaataaagaagataattatattaatcaaactatagccttacaagaagagtaaaatactaaagacatacccaaaacttcgagaagactacaggacagaagctcataagccttattcctactagaactatagatagtactatatggaagagattgaggtgtaagttgtgaagtgagaagctcctctccttttatagcctcccaatgacggttttatgcggttactagtccgggaaaccagcataccgccatcaggactgcaggatgaggcaccacgtggaggccgccgccgtcgcccgccgcctcccctcccgccggatccggtggaggggagggccgccctcaccgtcgcccgccgcctcccttcccgtcggatccgacggaggggagggcaccgccgtcaccgcctatcacccgctgcctcccctcgtgccgccgcccgctccctcccttcccgccggatccggcggaggggagggcgcaacggccacccatcggcgagctgcgccgccactgatgcctcttccgggccgccgcctggccgccgccgcgcgcaagagagagagagagagagagagaacgagaaagatcgagagaggatcgataaggccgactccacgcttatgtatagggaggccgatgctatcggctcggtggctcggcggctcgtcttggtttggataggtgttgggtgtcggtttttaattaactgacacctataatatgttaaaggtgctggtttttgttttagaatcggcagctatagtataggtgtcggtttttgtttagaaccggcacctatagcgccgatctctatgagttttttttttaagtagtgcactcaactgaaaatcttagaatgtataagaagaatcatgctcttatccgatcataccactacataaatcatcgtcgctaacgtacaggtgataaccctcgtctgtattaatggatcgatatatggttgccattacagataaatcgtcagttaaaaggctatatgtatcgtcggttgaacaccccttagcaatcaactcatctgtaatagcaaccataagctgcagatgttaatagcccctaacatttgacatgttgtgaaccattacagatatggaattcagactaaaaaagaaaaaaaaattaatgcagctccggtcccaccatcaagatgtcctcattgccaatgtcgatgtagccgataagagcacccgcaatggtaaagtaaggtgctactataaaacatgtatatctcgataatagactagattaatagtaaaccacttcaatggtatgtctacatggatatctatagctctctaatccattgtctcgtttttctctatagactatctacaggttagtagatagctttgctctctctcttcatttaatctctttcaagtagaaaaatatgctaacatggattttttataaagagcctataaataaccattgtgggtgccctaagccgctcaaatgctcaatgccatagggtcaccatgtccattaattgttgccaaagacgtgcgtagtttgctcatccatgcatgttgtcgaatccacttgacagtagatatatatatagaaagcacacggtaggaaaacaaataatgggacgatgaacaactagtaagcaaagaacagaaaaaagtgtactccatccgtccaaaaaaaaaagacaaaccctggtttccgtgtccaacatttgaccgtccgtcttatttaaaaaattatgaaaaaaattaaaaagacaagtcacgcataaaatattaatcatgttttatcatctaacaacaatgaaaatacgaattataaaaaaatttcatataagacggacatttaaagttagatacggaaatccatggtttatctttttttttagacggagggtgtagtagataagtaccacacaatttgtagaacgggaagagagaagtggcgtacgtcagggtggtgattagtgacctagagatcgactgttccaagctactggtggcctcagctacaactatagtttcaccttgtcgttggctgttattgtgtatgcatgctcatccgcatgcccatcgtacgtcatgctcatcgatatgctagctccatcacctcgttgaggacaaggcagagctcagggaggggaggcactagctcgaatttgacctctctagcttgccaccgatgtttcggagcttccttgtgatgctaggtacaccttttgatgctagagagccactatatctggatgctcacatactattttctccagattaaaaatacttatcgttttgaataaggacacggtcttaaaaataattttggccactatatatatataagtaaaatcaacaaatatatttctattgtagcatttttaagattaatttacatattatcttaatatttctaagataaatattttaaaaattatttataatcaaagattttaatgtttgacaacagacttatacaaaataagtacttcctctgtcctataatataagggattttgactttttgcttatattgtttaatcagtcgtcttattcaaaaaatatgtgcaaatattaaaaacgaaaagttatgcttaaaatactttggataataaagtaagtcacaaataaaataaataataataccaaattttttttaataagacgaatagtcaaacagtgcaagcaaaaagtaaaaaaaaatttatattatgagacggggagtattatcaacatgcacagacatagtttgcttaactcgacacgtggtaatacgttttgctacctttaattttttttttacctcggtaaagaatgaatcgcaatgtcgttgtcaccctgcgcccacatgcctttcacattggcaacccacagccgcgtcggcaggccggattaaagaatggcagcaggatcgtgttaatccagtggagtgaaaaggtaaaataaaaggacaaacaaatggtcagactcacatcgatcacttcccctttttctccgcagctccaacaggggaaaagataaaatcacttgtccgtttctcgtctaaccggatcatatcatcatgtcattcaaaagctgagatctactagagcttgctccatcgatagaatcgtgtcacgcgacaattaacaatcactttgccgatttgattagtcaagtccctagctacatatccatcgaggcgacctaatctaatggctgtcggttttgaagagatcctcccatagtttaaattacttagcacctattccctccgtcaaaaaaaaaactcaactacttcaatgagacatatccaaattcattgtagtagattatgtcttgtcgaattattagattattttagacgaagggcgtatagctagctagttagtgggaaacaaggaaattactggtaaagactccgaaacttctgccctaaatccaatctctctttctttcccaccttttttctttctttcaaaagatccaagcttttgaagaaagtcatcatacacacgacgaaattaaaaagaagttgttttgcatgcatgtactctggactacctagtgcatctaacacaaaagacagattagtcatgtaattggattcttcttttgagctgaaatcaggggggcctttcaaatgtcgggttcatgcacacctgtagtccactttgagataaataatcagtactgccacgcaaaattaaattcagacaacacacctgacaaagtcaaaattttggcgagtagaaattaaatattggatatatatatatatatatatatatatatatatatatatatatatatatatatatatatatatatatatatatatatatatatgcaccgcatatagcttgtgatcatgagatttacacgatgaaaatcgaccggctagagttacgtttatgcttgtatcacctatggtttcatggacagttacgtccacataacaattctataattcaaatctgtcccttttacttctttaaaaagtgcatgcgtataggcgaattaatcattctcgcgcatcactctctcacgagtgcgagccgaattaatagtgtatattgctcacgcattaaaggccttgacctaaattttcatgcttggaaaggcaatgctgaccaaacctgagcttggtacctgtatggtactaaaatagagcaatcttagattgttccatccataatgtccctattaccacttgtttttctctcgttcatgaatcggtgcccccaagttcaaacgccatgaatgtgccacgtaggcacctcgtaagttccttaaaatatgggcaaatactttttttttctcgatgaaattctagctagttcttggtaccacacggatgaagtatctttcccacacatgaatttttaaagtaagtagacatataacaaataaacctatgtttctatttggcaaggctatcttctctgggagctgaagctacacacacacacacacacacacacatatatatatatatatatatatatatatatatatatatatatatatatatatatatatatatatatatatagtatatatatatatatata

SEQ ID NO: 4162 - DNA, 974 bp, Oryza sativa
gtaccctcatcgtttcagttaagttaactaataaaaggaaacaaattatgacctagtcaagggagatagacttactacacaatcgaatcaaatagatcacctctatcaacaataatcaggtaaccgaatcagacaaaactaagatccccaagtacactaaccccattctcctcctaaccaaggaggaattataacccatcggtgcccggccaccacaaccaaaatcgcctggatcaaccccaaatcacctactatcgaatccaaccggaaatgacagacatgcacaatcatatcaaacatttacaagaactgcagaaaaaaaaagatcgtctcaccatggaggtgatgtactcctcgaatgactcccggtacttgtcgtagagctgctgcgagtagtcgtgcggcggcttctgcgtgcacatgttgtatatcgtcctgcagacaacaacagacacggagtggggggaaaccctagatcagcaccagatcgaagcgaatcggaggggaaaccctagcgggcgggaggaggaggaggaggaaacccaggaggaggcggcggcggcggcgggggacgtacgtgtagagcatcatgtagtcctcggagctgaactgtggctcgggcttgccctcgaggatgttcttcagcttggtgatgcccttctgcatgaacgcccatccctcctccagatcgatcgtcctccgctcctgccccgccatcgccgcagccgccgccgccgccgccggtgaacggaggccgcgcggaccaaaccctaggggagagacgccgccgcgtgggtttgggttgggttccgcgcgagaaaaatggggaggaagcgggcgagagagatagagagagagagagagagagaggaagagggagcggcagactgatgacaagttgaggcggtgacgcggttgggggtaagtataccgcttatatcggtgtagtaagcgtgtcacactgtcacacaaat

SEQ ID NO: 4163 - DNA, 9250 bp, Oryza sativa
ggatgtgacatattcgtagtactagaatatgtcacatcccttcaaaatcccttatattataggatggagagagtaatataagggattttgacattttgcttgcattgtttgaccattcgtcttatttaacaaaattttggaattattttttttgacttactttattatccaaagtactttaagcacaatttttcgttttttatatgcacaaattttctgaataagacgagtggtcaaacagtgcaagcaaaatataaaaatcccttatattatgggatagagggagtagcccactagtagctccaattcatctatagccgatttaatagccaattcatacaatagttgcttactatactattaatatatggtcccacctgtcatacacacattacgtcttggagtccgtgctgcagctggctataaatctgtagcctgctgctcttctatctcatcttttatctcattaaaatatgtttatagctggctaatagtctgctattgtacctgctcttatgatcatctgtatgtgggttttattcttttattgccctataagtcagtgttcataatgatagcgctattatgacagaggatgtgaatctcgtggctaggtttaccaacctgttaatcttctcagtttttaaaagccacataaaccatgtggataaccatcatgataaccctatgcgaaaagatttgatgaaccctgtccgtagtaatgcttctctctacatttgtactcactccatctacttttgatagtcatattttcaaatctgaaaaatttatttttgataagtatatttcaatccaacaacctatcatcttaataactttctcggatttaatgcgtgactctccattcttccacacatgactggctacatgggcattaaaaatataaatattaatgaatcgcttgtttacgaggaatgactagtagcatgtttaaatggatgataagtagaattacttattcttggtctatgtgtcaagatgaaatatgactatcaaaagtagatgtagggagtatttatgaagcttatgatagctacagtttatcccaaatcagaagtttcatataaacatttgagcttttcaatcaaattttgttaaaccgtagtgtagagctcaaagataaattagaagtcaaaaaccgaatcttctagccttttttaattcttattagatgcttgtttagagcaagtttaatagtatagctaactactagctccaaatcatctatagtcaatctaatagctaatttatacaatggttaacttcaaatatatgctacattattaataattggtcttacatgtcatatacacacaatattttagagtccgtgctgcaactggctacaaatctatagcccacttctcttctctcctctcttatctcctacacatatgcttatagttaacttatagtctgttattgtacatgctttgagtatccaaaacttctccaagcaaacctatgggcctgttttggggagcttaagattctgaaaagcagctggttggtagccatcttataagaatctagaaaagctgggtttcccagcttctggcttctagttcattttctggattctacaactacaacttctcagaatctagaccaaaagctaaactgtttggggggagtttttgattctgggagaagctgctgcagctagaagctccccaaacagggcctgggcgggggtgggggcgggtgtgattttcgacccgcaggggtgtcagggatagggccccgcatttgggcgagcaggggacgggggagacattttaccgacggtgaccctcgggggcatggggatgtatataaaccctcaaaatatagcgcatagaaggcccaaaaagcccaacccaccataaaaagctactaaaccctagcctctgccttatctctctctcagtttcttcccatatcccctcccctcccgtgagacacacaggcgcctcccctcctgtgagacacacaggcgacgacgcaacagggcgcactggatctcgctgtcgctggccaccatctcccctcccctcctctccagtctccccttcggcatccggcctcacgaatcccgtcccctccacagctctacctctccctccggagtcagcaaggggtggcggcggcgcacagggcacggcggggaggcgagacaggcaagggcacggcgagggaacaggcgcggacagcgaggttgcggcagccggcgagacaaacaagggtatggcgagggaacaggcgcggccgcgtgaggttgcagcgcacaggcacgggcgcggcggcggccggcgattcacgacgagcttcacctatgcacaggtggcgattcacagatagtgagaggtattgctacatctccaagattccaactgtgccttgtgaatgaaactgtgcccgcaattttctcgtgtatatttaatagatttggtagtacatagcacataacataacaatagaatctaatacggggctctggtcaggttgtggggccccggaggggtcagggacgagcgttgtttttgacccgcatccatgatcagggcaggagtgaagttgggggtcggggtctggagcgttccagcccaacccggtccgccccgccccgttgccatccatacctatgcctatctaacaccctagaattcaattccccttttctttattgtttgaaaaaactaattttcctcggtgcagctgcaaggcatctgaccattgtctcgacacatacccatagtcaaggccttgccttggaatgtggacccttaatcagaacatgaaaatacatattttttctatataaatgctactctcgtatagtaaatttatttttcacccatctcattcgttattactctatcaaatctcttgcctactttaattacttctaatacatttattactttcataaatattgatgtaatgattctttaaaagaaacttattttataataaatgaaagaagttaaaaataaacttgcttttaacaaaggaagtagccctgtctcaaaataaatttatttttaatctttataattcgtcataaacaaattttattttttaatacttcttaccaagtataagatgcattttgatcataatcacaggagcacaggttcaaggcagcgttcctggcccgggaacgtccaccacgtccggagaacgaaagaacattttcatccagactttttaaaaacttcacgcaaaaaagcatacaacgtttctcaaccccgttccttgatgagaaacctcgttccttgatctcatcagaaaccatagtttttcaatcatcttaatttgggcttcaatagctaaagataaattatttcaggaaagatactacacaatattatttgtcttatcaatcatctttcatttaattcttttcatcttaatccaaacgactctctcacattaaccatctcacatttaatatgaggtatcaaggtctttttttttgctctattaaagaatctaaaagtgtttatgttttgtaacgaagagagtagtaaataggtttattaatagcaatacatagtatattctcctttagataggttaaagtacaacatataaaaaaagagagtagaagcagtaatttttcaaaaaaaggccgttcgtgtgccaaaatctttttaagtatacggatacacatttgaagtattaaacgtagactaataacaaaataaattacagattccgcctgtaaactgcaatacgaatttattaagtctaattaatctgtcattagcaaatatttaatgtagcgtctcattgtcaaatcatgatgtaattaagcttaaaagattcgtctcgtaatttacatgcaaactgtacaattgattttttttttcatatttaatactccatgaatatgtctaaatatttgatgtgatggaatttttggaagtttgaaggtaacttaaacactgccaaagttaggagaggggagaagtaaattaaaaaaaagaagaagaaaaaggcacaggcaataattcttgtgctgggggtggtggtggctggctggctcgcctatataaagggggagggaggggcttctcctcttccagcacaagcaagcagcttgaagcaacccaccacagcttccttcttcctctgcttcagcagagcaggggagcagaggagggagaggtcactcattcacaacctcatacagaaggaagaagaagaagaagagaagaagattcacacatacatctatagataaaatatatttatacatatagagaatactcagagagtagccaagagaggaggaagaagaagatggtgttggtggcgattggggtggttgtggcggcggcggtggtggtgagcagcctgctgctgcggtggaacgaggtgcggtacagccggaagcgcggcctgccgccggggacaatggggtggccgctcttcggcgagaccaccgagttcctcaagcagggacccagtttcatgaaggcccggaggctcaggtatatgctatattactccactatgaaacaagcaccaaaccaaagcaacacaacaactaactgcttcttttgacatgctacctgacgcgccatacattccttcccctgcaatctctgcatcatgcgtgtgtatatctatctatccatcatatgctctgctctctgctctgcaatagcaagcttgaagctttggccatggggggagaggcagaggaagaaggagctgctgcagtgctgctgctttgatgatggtgatgatgatgaagatgtggggagagagagagagagagagagagagagagagagagagagaggaggtgatctggaggaagggagggacctcggagctgtgtcccccaaaagctcacactcatcactgttccagctgggagatcctctctcccttccagtccaccaaaaagtgcccaccctcataacacacacacacactaacactcttacacaaaagatatgattttttttcatcccaaggaaaaaaaaggagcgattttttttaattacatccatccccacttggccccctcctaaacttttctcccttcaatgatcaactaaaagagaacatccacagcacaaaccaagcatttgtttttcttctccttgttgcagaatctgtactactagcagcagcattcatccatcacaatcattcattcctccatttccttttattatcaacgagaaaactaatcaaacactaataccactagcagtagcagcaatagtagcagtagtactaaaagcgaaagattttgcaggtacgggagcgtgttcaggacgcacatcctggggtgcccgacggtggtgtgtatggaggcggagctgaaccggcgggcgctggccagcgaagggcgcgggttcgtcccgggctacccgcagtcgatgctggacatcctggggcggaacaacatcgccgccgtgcagggccccctccaccgcgccatgcgcggcgccatgctctccctcgtccgccccgccatgatccgctcctccctcctccccaagatcgacgccttcatgcgctcccacctcgccgcctggtcctcctcctcctcctccgccgtcgtcgacatccaggccaagaccaaggaggtactctctctgcttctacttctacttctccttctccttgcatggatatcatcgtcttcttttcttttcttgctttctgaaacaacaacaacagtagcagtatcaggcattacgatctgtctggttattagtagcagtaatgagtagtaaattattggggagggtggtaatttgtgtggggcccaccgtaagaaaatcttggtctctactacgagtactaccctgcattaagaaaatctcaactgttgacattagttagcactagtactgtactgtggttccactgatgctgcaagttggcaacaaagaatgggtggcaccactagcagccagcagcagtaggaagcacacagtaattacctttttgacctttctttaccgcactctactgctgatagtacaatggcagcagacagaatgatggtgcctcttgcaaaatggggaatggagcaaaggaagaggaaaggaggggagaaggaagatccccctttcctctctggacccccaaaaaaggggaatctctagcttttctagaacacttgtactgctggataacaaaagaaagagattgatctatcatgagctctttcctcagccagaaataaaagacactctaccagacacagcatctctctcactctcttagtactaagtagtacatattcattccaaagtgaaatctatccataattatggccatcacatgtctcaaatgcctaaggaacttgttttttttttttttaaagtagcagtagcattgtatgagtacctggtttgcttttggttggcatgctgaatttcatacttgcatggcagctcacaccaatgtttcactttcagatggccttgctatctgcactcaggcagattgccggcgtctccgctggcccactctctgacgctctcaaggcagagctctacacccttgtgcttggcaccatctccctgcccatcaaccttcctggaaccaactactaccaaggcttcaaggttagctgactgcagaattgtactgatatggtaattcagttaaaactcatgcactgaagaactactctaacaaggcactcttttttttttcaggcaaggaagaagcttgttgcaatgctagagcagatgatcgcggaacggcgatcctccggtcaggtacacgacgacatgctggatgcgctcttgaccggtgtcgagggcaccagggagaagctcacagatgagcagatcattgacctgatcatcacccttatatactctggatatgaaaccatgtcgacgacctcgatgatggctgtcaagtacctgtcagaccatcccaaagctcttgagcaactcagggtatagataatctgaaaacaaaccacttgaatcccatgatgaaaaccatttcacacttcgagtttactgatgatctgttcacttctgcagaaagaacattttgatatcaggaaaggtaaagcgcccgaagatgccatcgactggaatgatttcaagtccatgaccttcactcgagctgtaagtttgatgatgataaactcagaaagcagccacagtaacagtgtagtctgatcatgatgaactcatgggcacttttactatgcaggttatcttcgagacattaagattagctacagttgtgaatgggctgctgaggaaaactacccaagatgttgaaatgaatggtgagatatgcatgatatatacgctgctgcaattagcatctttttgataaatctttggatagccctaatgcagtgcttatttgtttcttccagggtatgttatcccaaaaggttggagaatatatgtttacacaagggaaataaattatgatccattcctgtaccctgatcccatgacattcaatccatggaggtggctggtaagtaaaacagcaatcaagtaatttccactagcacaccaataacaccactattgattgaattgtaagtttctaaccacgtaatacttactgataacaggagaagaacatggaatcacatccacacttcatgctgtttggaggaggtagtcgaatgtgcccggggaaggaagtaggcaccgtagaaattgcaacattccttcactatttcgtgactcaatacaggtttgttcatcttgtcaaatcctctgttgcttagaatatgtctggttctttactgacaaagaagacatggtgttaatcttttctttgcagatgggaggaagaaggtaacaacacaatattgaagttcccccgagttgaagctcccaacgggttacatatccgcgttcaagattactgatcctggaacattttgcgaagttagataggaattcaaatcagatagaaaataagagtgcaattctgatgctgctgccctgatgacaggattagaacagccgtttggctcttgtaacatatgtccatgaaaataggaatattatagagataatataggcattataggaccattaggaagctaatgtagattgccatcagatgctcctgtattcttttggtccatcaattgttgaactaaaacagaagtgtcatttggcttctatgcttctgaacatgatagagagttaatagacaccagctgtccataagaacagaacacatggatgaagacttgacaagatacacgagttctcatagaaacagggatgaagacttcaaatttctcttctcatgtccactaactgaaagaaatatgaaatatgtaaaagaggaaatactgatagaggaacagtaaaggtgtacctcaatgaacaggctaaagcaagtaaactgcttcaatggtggctctcagttttccctatagataccaaggaactcatgttaatgaacaggggatgcttcaattggttggacaatatattgatgtcgggaaaagaacttgcctcacctcaacatactgaaaagcagtattgattgctagtacaggagatgttaacagttgttgaaatccagaagtgtcactgttggctgttgctgctattcataggacacgaaactacattgtgtaaacacagaggtgccagcccacaccatttataaattatataattcatcataccaaagattatacaaagggacaagtggacaacatttccagattgctacaggcaaattttctcaaggactgaaattcccctctaaatgaaggactaccaaaaccctaggtaaggcatgcaaggtattcaagtaaagaatgaaatgatacaaaaaacacaatgcagttctgttaacttgtagtaccaattccaaactagtagttctgctaagtcacatttttcataaacattactaccaaaacatcttttttgtggtgctgttatagcttttcttcttcgttttaaaaaaaaacaccctttattctggaagatacccccaattcagatcaatggcgttctttatcaccatgaaatgtctaaaataagactacacagctcaggtgagttgtatattggaataaaagtagcctgtcaagttattttgtggcaagattaataagcccttgaagttcattatgctcaattgtcacaatgaaaaaataaacctgaaaatggaaataaacttccatgggacatgagctatcaactatatctatttgaaacagttttgcactttaattactactacaataagttaatgtaat

SEQ ID NO: 4164 - DNA, 8817 bp, Oryza sativa
tgtgtatgtgaatgaatgtatatgaatgggggatgttggggtgtgatatatcacggcctagggcttaataggattaatagaatactcataccaacaaactacaactattcttccggaagccgatcttcaaataactttgatattaagcgtgtttagcctggagcaatttcctgatgggtgaccgattgggaagtgaactttgtgcaaagtattggcctgagaagggcgggacggcatggaaaggctccgattgggaagtgaactttgtgcaaagtattggcctgagaagggcgggacggcatggaaaggctagccaaaaataaaaatttattttttttaggattatactcatcagtgacgggcattaacttaggcccaattgagatgactcatctgtgacgggcattaacttaggcccgattgagatgactcatctgtgacgggctatagttaatgcccgtcacagataagggtcatctgtgacgggctatagtttaggcccgattgagataggtcatccgtgacgggctatagtttgacatgtcgtctgggttaaagctatcagtgacgggctttaattagggcccgattaagataggttcatccgtgacggccgtttgcccgattgagataatttttcacatcagtgacttctagcctgttacggacgccgtacccgattgagatgggggttaccgcccgattgagatgatgttatccgttctagtgattcaaaatattccattgtgtggcaaaaggaaaacttatggggcaaataatacattaattttgcctagttaattacatgcgtgccattcacatagatgtaataatatatatacaaaatgtattcccctggacgctgcatctattacctacatatgcaggtttatcctctgatggccgcgatgatgttggcatcgggcatggttgtgttccagcttgggcgcaacgtgtgcaccaaccctgaagtcaagtatgtcaatgcaaaacctcttccaacctaactagcctagattacagaatgtcaatatactgcctctaggttaagaatatttatcatttgagataagagctaatatcaaacttttaaaatctttgaatataaattatttctaaaatatttttagaccatatatatagattagcaaaaaagttctttaattaaattaaattatatatctattaatatttctattatatatattataatataaaatagtggttatagttaatcttttagcgttctagtcaaaaccaccagtattatcaatctgcactaattaagttatggaaatttaacttctaacatgtatttttttcggctatgctctaaataggatcagcaagcgcaaccgccgcaacgcagtgccagacagcgcggcggaagcggagaggtacagcatgcatggtttccgccgcttcttcggccggcgtcgcccagaggtgatgccctccatcaaccgcttcttctccaactccgatcgacccaatcatgatgagaacaatgatgattgatgagtaattcgcattatgtggtgtatttgttcgctataaggaccagcgttatgtgacgtaatatggttagatgtgaactggtttattattttaagaactcggcctgtgtgcatgcaaaaaagaaaaagcaagattggtaaatgtaatgtacttttactttatttgttggttcagcacttgatttttttcttttatcaacaaacttacctatgtgagtgttgacagagcctaagatataaatcatttctattataaaaataaacagaattgctaactgtctactgacagaaatttgatggttaaatctttcactttctaaaccgttagatgtgtttgagatttgtgctagtcgttcgatatgcatcaagatccgtgctttctaataaaaatacgaaaagaatcatgtcacctgatgggatgcaggcgcatgacacatctaccaagctattatggtttttatgacttgatgtcaacttacatcctatttatcatataattgcatgctagttacatatgtaattatagtacaaatataatgtaattattaaaattacattgttctttattgtactccgtagttacatttgatagattttaatgataattttcagtcgaatgtcatatagattgtttcaaaagtaaaataaatttcaggtattttggttctgtaaagggaaacgataagggaaaatcaatggtttttctctcaaattaactgttggtggcctttcgattgtcaagtcgcttctaacttttctcattgttgaggatatgcgtaatggctacgtacacggcatacatatccgactacaaatagaagatggattgaacccatgtattatgtaataaagtaggattcggtcgttatgttgccttatatgttaaagtatggtatagagccccgaacggatactaacatgtaatagaataggaaattgatgtcgtttccggctaggttttcctcattggaacccttcaccccaccctatataagatgcgcagagagctccttaagggcaaccacacaatcatatcatcaaatcaatacaacatgagagaggggggaggctcggcacatgagatgggccgcgcgacacgttggcctgtggaggaagtgaaggagaggggaggacgaggctagcgggctaggaagagtaaggggaggagggtgcccggttgaacaagaacatttataaatattccaggagtttggaagggggaaattgatgagttgaaatttgaaatcaaacttgatatttgaactcagggaattttggggaatttttgtaagcgatggtttagaaagaatttgagatgcacaccttggcacatacttgaaaaatacaaaatatccaattttttggctccaagccggtcttcatttccaatgcctcgggaaataggtcgagatagatgacaacacatttttatcctcttccttacggggaggcgcacttctcttcttctcctggccttcacctcctgcccggcctggaaatagaacccctttctgatccattcattaagtttttattcaaatagattttctcaggcacaaaaacacagtcattacaaagatcgatgccaccacaccgtgcagtcgcgccagcgctcctcttgtgcacgcccatgccatctgagagaaatggatggaggaagaagagagaaaacgcctcttgtgcacgcccattacaaagagttgttttagttaaattctctctccaactctaataaaaataatatttcaatcgtctttatgtcctgcagcaaattatcacaattttgaagtgtcctcgggcattcatgttttttttgtctacaagcaaataccacactttttcagtgtcgtgtagcaatttttaccaatagatttttctttgggatcagaataagttttataaatattatgtttttcttttaataagcccgccagccaccataggctagagaaaatacataatctttataggcaggctttcaaccgctaacaaaaattgattttcgttagtgcctatcttaagccaccagtcaacgaaaatcgattttcacaggtagagctaggttaagacgaccactagcaaaaaatcattttcgtcaaagaaaaatgaagaatacccacatgcagctcccctctgatcggctgcaaagattatttttggcaaacaaggaatgaaaatgcccacatgcagctgcattctatttccagatatcaaaccacaaatcaagcaaatataggaagaacaatcatcacaatactctataatcaataagaaacatagagaatccattcacaatttcatctcagatgtacaagaaagattagagagaagagaaggcagcctagcttgtcttggagccgttgccaagccacggtcatcgacaccaatgagccatagggacactagcgctgaagtgtcctgagcttggtggatttgagataggaaggtcggcgccgctatatctagagccagaggccttgccctccccctcatccactggcattgctcccttccttttttttgccgtggagaagctcgtctagatctaggactgtgagggaggtagggcacgtgggggcggaatgcactcgtcagacacttccgagccgataggaggctgtgctcgccggtcagtgatacctctatgaccaactcccaattctacgtctccgcaactctcgaacactgtcagcccttcccattacggcaaccaaggcttacgcggcggatccccttctcctgattttgttgcaactcgctgtcgccatcgccgccgcggtcatagtcgccatcaccgtcgctgagagcaccgcgcggtgtggaggtaggaaggatacagggagtatggagggagagggagggaggagaggtaagggagaggagggagaagagggacttagctagtgtgctggccggggagactctgccttttaataccgtagtttttttccctaaaggcggcaattagcgaaaactaattttttgttagcagtgacttaacaggtcccttgtaaaaacatcctcgatcttgtttggcacaagtttaaggagagacaaatgaaaatattccttggactccaagattatttctttgatctcttagaagggagagaaagaaatcccttgtaaaaacatcctcgatcttgtttgacacaagtttaaggagagacaaatgaaaatattccttggactccaagattatttctttgatctcttagaagggagagaaagaaacccagccatacgagtaatcatatatatgctccctctcttaaggctagatgatcaggcaatctctgacccatcctatagattcctggttctcaaagctgagataaatcttcaaagattccggaacctacccacatacaaccatgaagaaatatctctccaaaccattatagatcatggtcttgtgaattccatatatgcaaccctcgatcagatccttcaatctgatttaggaaacgctgtgaaagatgtctgcaggagacttggacatggaagatacaggattatcttctcctcaataccaccaaaattcacaccacctgttcgtccagcaattcattatatatatatcatgaatggacaatttaattttcaagaagacggtcctagcaaactatcggacgaagaggaagaaatatatacaacaattgctaatcatgaaaattggagattattttctgaagctgcagaaattgaagaagctatcaccacagattatgaatatcagctggttttccaaaacaaaatcacaaggatttttatcagcaaattctacaaccaaagttctgaatactttaagggagcaggacgcataattaaaccggattttggaaatgaatgctccaagaaaagttactacagaagcctggctcagtggtttcagaaaacagagccatcagagatcgacacggtgcaatcagcacccatgataatcaacgaagataatgaataaagatcttgtcatccccgacaaagatcactattcaagataaggaatctacactattccagataagataagtctatggtcaaaaggcgatattatgacatctttattgaaggtcaaaagcgtcatcatcaaagattctctccatgaagtctaaagggatatcatgaactctttgaagtcaagaagagatatcatgaagattctctaccgagcgctatataaggggctcactatcacatttcagaggcatcgcattccacacacaacacatctcgctcaaccgttcctctcaccgctccaccagccatcacactccactccactccatctaagtgttagtactatagtataacctaaataaaagactcatgagagtctaagtgtgagagtctatgtaagagtctttgtgagagtcatgtacctgtataattacgaacgtgttgtaccaagtccttggtgtaatcttcagaaggaactaccttcaacctatcaaggtatatgaatgaacacctggaccgttctatataaacctattatgttctaaatatctaattttatatcttgtacataatttgtatttacatctttatttcctgtactgcatttatgtttgcataataatataaaaaaaaatttaacaacctggattgccatccaattgtcacatactaatctcacatccaagattgcatatagataagcattcctatcctcatatctggtgactagacccctagtcactgccctgggcaagagctggtatcagagccaagtgctcgtaaccttcccaagccatcttctccgaaagtgggggagaggggtcgggtggcgtgctgaagtcgcggtgatcccgaacggtgtggttgtgttctgaagttgtgattaaatcgttctccatggcctctgggcagttggggcagtctccatgaactcatattcgtgagccattcagacttctgtgaagccatttccctgcatatatattcaaaatctctagtagcttttaataaatatttatcttcccatgacgtcttacctggcaagtccatagattttggaagatatgatgggaaagaatcgtcatgtaaatatattgtattcacaacttgttctctcttggtctgaacaagctggtcaagaatctcatctgtgttagacgaaaatcttaggctcacctgtttgcccattatcttaaattgaatatcttcgtttgtgactaggaaaggacgaataagtgataaaaatggtgttcctaaaataacatcttgcttaagatttttaacgagtaggaaagatgttttaatgcaaacttccgagatgcaaatatagatttcagggatttgatattctactgttaaaagtcctccatctgccccacgaattctgtgggcggctttatagaaatatttatgagggataataccttctcgaatgcaattgacatcagcaccagaatcaattaaagtaatatgctggaagtaggatccgtctataaaacgatacataacttctgtgtaccatttttgcttcatatatttttgaatggttccaacaacatgatcatcttcttgaattggttcgtccttttcttccatatggaatccttcttttgattctaacatgtatagacgctttcttatttcttctaaatcttgtttcataattttttggtcttcgaataggctgatcaaatctggttgctcattcttctttttctattcatctaaccttttaaacacttcatcaatagagaggaatttgctcttttgaaatccttttttagtttatccttatcagttttgactcttgaaaggaatttttcgaggactcttcttttttcttctggatcttgaatggtttcaaaagtatcgagaacaaattcttctaaactggttaaaacgagtatattttcatcagactcttcttctgaattatctggctcacaacaagagcaaccactgtcttggcaacagttaatttctgtatttttttcttcatctgaacttgagtcattgtctatattatttagtattgcttcaagtttttctttaacgtcttctgattctgaatctaacaaggcttggatctattttttaactttggatttgaaacatctgttagctatgtgtcctttcaagccacatttgtaacaaatggtttctttgctttcagtgtcttgtgttcttatattcttattgtaaattctttttggtttccttttggtagcttgaaagctcatcttgcttttatcatttggttttgtcatgggtttggaatgggtttttctttttctatagacataaggatcttgaaaaccaaactgatagcaaaaatctcccatttctcttttaccaagaatcctttgttttttgagttgatctttgatttttaggtcattgcaaagctcagcccctactaattgtatcttttgtgtgatttttccaatatctagatagtgataatttatactccctcccccttcttttcttagggaatttctaaccttttcagcaaataaaggaggtaaactagaaatatatttttctttccaaaagtcttgattaggttctggtagggtatatagttttgacaagaaagtatctttataccatctaaaatctgacattgttttacattttaaatttatcaattgttctctatttttttcatagatatcatgatagtttccggcaaagtgataaattatgttatagattagagtggctaaggcatcagaaatgttaccggttggattcccattaccatctctatcaggtaatggccttccttgatcatccctcttaactgcgcaaagaatctcctgtctttgagtttcatttaaataattattccaccatccttttaattgaccagaaaacccaatgacaatcatattggcagcttctctttctttgtttccattagctatgcaggcattagcatacataatcatttgatgacataaagtaaagatttgatattcagtaaagccatctaggttccattctacaatttctttgccattgtaataagtcatattttgaatctgaggcatttcctcaaactgtaggtctgcataagttggtcgagggtaataattcctagttgtggaagtaagagtagaaggtttaaaaatcttgttgaccatatcatatttctcattatcagaaatctcattgatgtttttatttacttttaaattatttagttttaaggctagcttattgactagttcttcagagattgcgggtccaaaagccttttgttttccaagtttgatgttaggatcaattgttgggacaaacataggactaacagactgagaactagaagactgag

SEQ ID NO: 4165 - DNA, 639 bp, Oryza sativa
actataaaattaaattttagccacagttgataagccaaaaggcgaagattgaagatttgatctttatgtgaactaaccaattaattgaagatttgatctttatgtgaactaaccaatttttaatgctcttaattttgttttgattttgctaaaagaagagtttgttattgttgatgctaacttatacttgttgccagaaaactttaggacagttggggcgattggttttgggtattggttatcggtttatggttggccatccgtatcagcttatcagaaaggctagtaatacagtcgacctgttagctataaggttctgtgtagtcttctcttagcttacccatataatagttagctctttacagttaatacagggcaaacttatctctctcacagagtttcttggttcttgtgtcaagtcggctgtaagtttacagcccgctctcctctcttctctcctccacctcagcatttagccggcttgtagcctactattatacttgctctcaggggattgtgatacgtctgctcatcttgaacaatatctagtcaaagtcacatcttttttgcgtaatgtcgcatcttttttgcgtaatggctaatctaatttaaatctgcgaaaaaagttcctgttcggtc

SEQ ID NO: 4166 - DNA, 593 bp, Oryza sativa
agcatttggcagatctaaagcaccagccttattttttcttttgatgcagaacaccatcatcaccaacagcaatagagttagatgtaatgttggtgaacacaatgcttcccttgcaatatgagcaaatatttcagaaccagtgaacaacatggcaaggaatggctataaaatggaagtaatgttacattaaggatttcattggtttacattccagtacatctgacgagtgcaaaaaggaaagggaacacatcaaaaactcttggctgtgatacatcaaaattgctattgcaggagtataacacagtagagcaatccatttcccgatacaagagaaataaaaaaaccattgccatgttggtgctttgttggggagattgcaaaaacattcttccaagtagctttcatgcaagtgacgctccgtctccatattgctaacaagggagttctgaccatctacttttgtatttcggtgtgtccacaagctagaagttacaacaggcagttaaaatggagcatgcaaaggccattccctgtgtctaaatctccagtacccaagaaaaatggtgaactgaacagcatggggggatcctcta

SEQ ID NO: 4167 - DNA, 565 bp, Oryza sativa
aaagttttgatgtgatggaaaagttagaagtttaaagaaaaagttgggaactaaacccggcatatatttaatactctatgtatgtgtctaaagatttcatataacgtttttgagaaaaaaaatttagggaactaagaccctgtttagatgtgactaaaacttttaagtccctatcacatcaaatgtttggacactaattataaatattaaatatagactattagtaaaaaacccatttataatcttggactaattcatgagacgaatctattgagcctaattaatccatgattagcctatgtgatgctacagtaaatattctctgattatagattaattaggcttaaaaaatttatctcgcgaattagttttcatttatgtaattagttttgtaagtagtctatatttaataatctaaattagtatctaaataaagggactaaagttaagtccccgaatctaaacaccacctaaaccatatattagctgtcaaaggaactctccgaagaaatttgctcttcaaatattgactggctacttgaccaggtgatccgtgtgttgacca

SEQ ID NO: 4168 - DNA, 539 bp, Oryza sativa
aacatcatctaagacgagcaaaaaccttctttcatgtaaaatgttctggaggtaggattgcaactccttctcttccttgtgatccatttgtgtctccaatggctcacaggttgcaacctcaataatccgttttgtgattctcattgcatcaaattggcgagatacattcacccatatgcacaatgagaaatattccttcacattgacttcatcaaagattaattgaaccaaggcagtttttcccactccttcaatgccaactacacataggaccttgaggccttcatgcttgtatctgtccagacagaatagtttttgctttatctcttgcttctcatgcacccttcccacaatattattttgcattaccaatggcacgtggttgatgaagccattgatctctgcacctagtgcattaagttggccggtgatcattttaagcttcctcttcatgcttcgaggaagaactaatggaatatacatgttgcgcatcatcctgttcctgtgcccgtcaaccaaagccttgttgtgctgagcct

SEQ ID NO: 4169 - DNA, 506 bp, Oryza sativa
ggcgaattcgagctcggtacccaccagcagttctagagttctagccctaagtcaggaaactaagcaggtataagcgatgagcaatggagacgattggacaagcaataagaaggaaggaaggaagctggacatacttggctgtgctgcccacccctgctctcctcccttgatgcgctcagggaaggcgtagttgacggtgaggacgcggccgaagagctcggcgccgtccatgttgtccatggcggcggcggcgtcctcccgctcgaggaaggtgacgaagccgaaggagcggtgcttctgcgtggcctggtcgagcggcgtcttgacgtccttgatctccccgaagggcacgaacgccgcgtgcaggatcttctcgtccacctcctccgccagcccacctgcggcaccacaaaaaccaagaaacgaggcacgggttcagctcagctcactaccacactgctactccgccggcggccaggaaaaaagataaccccgtgaaggaggaa

SEQ ID NO: 4170 - DNA, 513 bp, Oryza sativa
ggcgaattcgagctcggtaccccacatcatggttgtcttttcgtatgaaatactgatattgaatctctctgatgctggttggtcttctagaaagagcgtcagaaacgaatgcttggaactgctgagtcctctgatgaagatgatgatgatgacgaggagggtgaccgcagcacgaagctagacagctcaaaacctatatctggtgatgatcttggtgattccttttctactgatgagccagcaagaaaggaaaagggctgggtcgatgaaatttatgaaagagagggtaaaaagattggtgaagatgctgaagggtcagacaatgaagaatctgatgatgatggtgatgacgatgatgatgatgctgaggatggtgatgatgatgctgaggatgaagatgaagaagaggatttaagtgataatgactttggtaatatgtctgctagagactgggagcaaagtgacgatgatgaggttaccgtggaagaagatgaaatggaaggtctcaaacaa

SEQ ID NO: 4171 - DNA, 689 bp, Oryza sativa
cttgattatgttctttgggtactttaaattaattaaatcatcttcagttaccctagtcctgccttgcaaagcatgtcgtatctctgcttgtgccttttgcatcacatgagggttcctcacaagctctgacagggcccattcaagtgttgttgatgttgattcacttccacctgcaaacatgtcctggccaatgcatgtcatgcatatgttagtgcatgttaaaaggaaacatgcatatttacagtgctacataaaatttatacattctgttgatggaggataggaaggaaagcacaaggcgggaagccatatatacataaatatatactccctctgataaaagatacttgacattggagttttttccacggtatttaaagtgtgactttgaccataattttatatattggataattttatgaaatctaataaatctttggagattatgaaattcttttcaagacacaaatctatacttgccactttatgttgtcaataattttgtcaaattgcaagtatatttagtgtaccaatagattcatattgcaaacgactcttagaaattaaatagagatttgctagattttagatgcctaaaaatttgtatattttcggtaacctaaaatttcatattactaagccttattcaatatggaatttaagttatcttaactacaattttggagtta

SEQ ID NO: 4172 - DNA, 689 bp, Oryza sativa
aaaccctagaccggtagacctttcccctccgatcgccggtatcaatggcagccacggtcgctgccgccagcagccggaagcgtgggttcatggacattcttgacgacccgtgcccctaccgttgcgccacctggcgaagcgcggccggagctcgtcgtcggccgcctccgcggctgattagatcacaaccggatttgccacatcgtgaggtgctgcaaattaaggtgaaagattagttttttttatagatttggtacttgtttatgtgtttccgcttccacctttataatttttgtagcgtcaaccttgtgtttgcattgtgttattcaacggattcgattatgtttccttgtgaagtaaaacaatggaaaactgattatgttaagtgtttatgtaagattggatgcttgggatttttgtccgtgtataatacttataattaatgtgtataatacttataaattttacacaccaacacatcgaatgtttggacatatacatgtagtattaaatataaacgaaaaaaataactaattacacatattacgtgtaaattatgagacgaatcttgtaagcctaattgcgctatgatctgacaatgtggtgctacagtaaacatttgctaatgacatattagttaggcttaataaattcatgatggattaattaggcttaataaattcatctcg

SEQ ID NO: 4173 - DNA, 691 bp, Oryza sativa
cttgtatttatacccataggtgtccccttgtccaagtagaactagggaaaccaatatggatataattcgagtagtacttgtcgtttccatgtagaactctggttgtctttccttatctggaactccttcgaggtcagtttccgtataagacatggtatgtggtggatcctgccgagatttagtcaactactattaggtatgtattaggtatgtggtatccataaccctgacaaaatgtggggaaaaactaattgcgcagtttgcatgtaaattgcgagacgaatcttttgagcctaattacgccatgatctgacaatgtgatgctactgtaaacatttgctaatgacggattaattaggtttaataaattcgcctcgcagtttacaggcggaatctataatttgttttattattagtctacgtttaatacttcaaacatgtgtccgtatacttaaaaactttacacccaaataactaaacacacccttaaaacaaattttatatatttattttaagaaaacacaccgtttatatagcggtagaagcttggaaaagtgtccaaaccaacaaccacttgtaaggaactgtaatattttttttttggaaaaaagtttatatgattgtgaaattagagggatatttaacttttcgtcacttttaagatgtggcaattaattatctgccactcgct

SEQ ID NO: 4174 - DNA, 2005 bp, Oryza sativa
atactacctagattccattttagcaatccctttgcactaccatgctcccctctaagctgccgatgtgagcacggccgccgcctatggaggcgctcgtcggcaactattctccgcaccttgccaaaggtcggcaagctgccggaatccctctagacacctcgtagatgctctagaaccccctcccctagccatgtctaactcatatcaccttgatcaccattacagcctaaccgtaccaccgccgccctagtcgccaacccatccacataccaaattagctcctccgccgccgatcgccgtcgccggagatacctagctccctcccctcttcggccgcaaccactttccccctccatcgccgccgtaatcccaaaccctagcaccgccggctgcatttggggaaacggccgaaggtagaagaagagaagagagagagagagagagactgacaggtgggacccgcacacagtgccatttcacttttatttgatttttaaactttagaagctcatatcttttaaaatatagatccaattccaatgaaacttggaccaatattcttctaaaatcattctctatcttttgagcccctttttgctatttttgcattttattttattttctctatttttcatatttttggatttcatttgaattccttttaaatttgaattttacatatgtctaaccctaggtcttgaggattcttctgactcaatatataatatccatcaatctcaggacatctagcaaggcaagttaccatataccttttgatcattcaagcctatattttataaattatttaccatagccttctattcaatattctattttctatgcataaatcaatcatagaaacccagataatttactattgcttattttgctcacaatctggttaaaataccctatacttagatcgggacagtacgtaagatttggctgatttccgggtggctagtactgtctcaatcaatataagttttaccagatacttatgttgaacgaacgactacgaccgcagtttctacactagggacacacctacttattatgttaattagcaatatggcacctctgtatagtggttcttatttttaagtcctcgtgcaggaggcaactatagccgcgaagggaaactttaaccattaccatgtacaggtaaatggtatgtgatactcaagtataaactatatggtatatttctaaaccctgatcgagatgacgaggtgtcatacgatcagttccccttaaataccttgggaaagccagaactccttttgctgctgttaacattacattcagagcatatgaggatatgagttcatggaacaggtgccacaattgttaatgacttaatactggagcatgactaaagccgatgattatcagcaagtcatggactgcgggtaaagcgtacatctgctacagtagaatatctttgaaactattcgaatagccgtactcatggagttgagtactgggactcatatggtaccctggttagaaatctaaagtttatatgttttataaattcttgctataacttttccagattgtctagtactgctttttgcaaagaaccctattatatgtcaatgcataacatattcccatgataacttgctgagtattgtaaatactcacccttgctcttataacccctttttcagatctgggtcaagaggaggacccttatgactattactacgaacatcccgataacttagagaatccctaaaggttatacctcactagtcagaatgtatagaaacttctgttgtgtattaattagttaggtgagtacctattattgtaaaacccttagtattgtaagactttttaacatatgcaatgaagaaccggttatattgtatgtatcaatatttactgatccagggattgattcattaatctcagtcggattcaagttattagttttgggctccgacaccatatgtgcctttttcctctataattattccatcgcaacacagggctt

SEQ ID NO: 4175 - DNA, 675 bp, Oryza sativa
ctggtcgtgctcatgacaattaaggactggttcacgagtttcggttgtgaaacattaaccgtgcaaaccacaagccagtatgggcaacaactttatcttttgtatagcatggttcattgcggggcaccagactgagaagtggcggagataagcccacgggggtcgctggggagtccatgccttgtgtttataagggggtgattatgatccaggaacggtgcactgctttgagttgtgttgtgcgaagggtactgtcacgatttccccctttgcagtggcgtggtggtacttcagggcatggtaacatgtgtggaatcgtgtcttgtgggtacagtggtacacctctggccagagtaaaactattcgaatagccgtgcccgcggttataggcaggtctaacaatgtctttcgtgattagtctcacacttttcatcataataaatgatgctataactggtaataatttgattagctcctggttttgaatggtttattcctggtttggagatagatctgtacagccgggtatggttgttcaggatggttgggcctgtgcagcatgggtgtgctgttcagtgttgattaatattgatgattaattactctactgttttacaattcttaaatgtttgctaaatgctgcttttgcaaatgagccctatattatgtcatcct

SEQ ID NO: 4176 - DNA, 662 bp, Oryza sativa
catgcatgatccaaaattatattggattgaatctctaattacagttaatataaagagtatattaaatctctcatcgtttctcatgtagtgtgcaaagcaggaccagggaactaacttatgcggctactacgtatgcgagtatgcccactgcctatcaaaccaaatatgcacaacacgagagctcgatgtacgtatacataaaccattcaaaatttcattgcgtatcgatttgttaagttgtttattaatttcatatattcatacgtcattatttttcgaacgatagcgtattcacatgagggataatctcccacacaaggattttatcacggctgttcaagaacaactgatgggattcatcaacgaagaagtccttaatctcgacggtgaattctactacgacggatcgacaattcataacgtcggtccttcctcttctgacataacaccggcgtcaaagtcgtagctatagctaccgagcaaatgaattgtactatatatgcatgtatatatatatttatatatgtacacatttacttttgtgttaatatatattttggtaacatatatatatgcacataaaatgttaagtgctttaaattatacatatgtctgtgtaatatatgatttatacatacacacacacacacacacacacacac

SEQ ID NO: 4177 - DNA, 716 bp, Oryza sativa
atgacttggatatattctgctctgtcatggcaggatcggggtcttttccagatggatctatatcagatggtttcctgcaaagtattctttcagaatttagcatcattttcatgagagagcttaccaaagtgaaatcataccgagaggtcttatacctggaagatgttctaatttttggcattgcgcggccggccaattttttcctgggcatggtgcgctttgggggtttgttaggcgagcccttatccccagatttatcatcgtcgccttcatcatcatcaagcaccagtttcctcttgcaggacccgtctgaccagttgatttggaggtctgaggttgcggatccggtctgatcgttggccctccacctccctgagcagtgtgttggcgaggagaccggcgctgagtgactggtggatctgacttcatcagtgcatattcctgaaccagatgcttccatagttagtcaactcagcatgaagacaaaattatgttctgatcatggtttgaggattttcgatacatacctgtggaggcggattgaacgcattatatggcacgactggcagctggtgtgagtagctgacgacgattgcatttgagaagattttatacatcctctccttcatgattctgaaatccagagagtctgattcttcacggttaggatcatacctgccgtcgaactcgaatgccgtgcgagatctctccttgat

SEQ ID NO: 4178 - DNA, 581 bp, Oryza sativa
gacacatggcagatttagatagattgtcagtctagatttatcatactaggatgtgttctatccaaccaaaacttcttatattttaggacggagggagtactacacagtggcaaacctagaacggaaattatccagggtccttaacctgtcataacacatataatactttaatttttaactaatacaatatagttaatataagctaaaacatccaagtattaaaaattacccgggtccggtaaccacagtagtacggaacaccccttatactacccccgttttttaatatatggcgtcgttgacttttttacaaacatttaaacatttatcttattcaaaatgtttgtgtaaatataaaaatatttaagttatgcttcaagaacatttgatgataaatcaaatcacaataaaataaataataattatatttttttaataagatgaatgattagacgtatcttaaaaattcaatggcgttatatattaaaaaagtaatcattgtagatattttttgtttgttcgagctatgtgaaacacggagaaattcaataattggacactttttagtttccaatttactt

SEQ ID NO: 4179 - DNA, 1138 bp, Oryza sativa
ctgcagggccgtgtatttggcctcctttccggccagagccaactcggcctgctgtttgttgccccagaggaggacaacatggagacgatcgtcgcgcaggatgcgcttgtaatcacgtggaactcgtcgccagacaccgcagatcttgcccgtggcattctgatagacactgagagtgcccgccaaggtggtctccagttgatgctcctccaggattacacccgcatcatcaacgaattgaatggcacgcggacgaccgattcgcgatgaggtgtagaaggagtagtatagattcttcttgtggaacaggaaacgggcggtggccaccacattctgcggattgtaggtggtgtacatggacttcatttcctcacccttgaggaaataggaggtgcggcccgttagcaacgcagcgtaatctataaatagggatcaaatgaaaggtggagataatccaggtgttagataaatacaatagttctcttgttaattaaatgtaggagctggtgaatgggattacaatttcccgcaggatttggcggattctattgggatctgggtgggtgtccggtacttttgtacttacgtttcatgttgcgctcttcctcttcattgggcacgggcacatccaaggctacatccgtatctgaaagatggagggaatacaaatagagaataagatgatgctgggcgataaggtacgaccttaaatggaatttagatagcaacaaatgcttcaaagcaaccgaaccgccgccagccattcaccatccatccagccagccatccagccagccatccagccagccaaccaactatccatccacaatttgtggacacaattccggcattcaaccaaaattccagttgaatgggtgaatggtgaatggctgaatggacgaatgccaggggatcatcatgaatggcaatgcaactatcaggtagagatcccacctccgaactaagaccttccatttccacctctcgcttccacccaggtggcattcattaatcgtgcataaattgagggcaggtagaaggtagagtttctcgaacgggaagtctaacctacatctaactagggaagtgctttgtatttgaggatgtgcggactctggggttctgaattcatgggtac

SEQ ID NO: 4180 - DNA, 697 bp, Oryza sativa
ccagtacaccgtgctgacaggcacgttgtccctcacaacccaaccgctgtggcgtacaaaattcttggctgcttctgccgaggcactaggtcggccgtcttcgtccacctcagttatgatgtgccgaccctctatcttcttcgcggcacctcgttgtccgagtgccctcttctgtccagcggagggatgacttccactagcctcctcctcatcgttcccctcctcgctcccctccgcatccctctccacgttcccctcctcgttcaagtactggtttggatcctcgttcccctcttcttcgttccagtactggctgcttctctctgcgattgtatcgtatagtatctgttcctcatcgcgatcagccatctgtgcatacaaaaaatacttgttaggtatataggatgtatttgctaaccgtaatattaaaactctactaatcttatattaaatctctaataatcttatattaaatcgctactaatttcatattaaaattgtaataatcatatatatatgctaagtataacaatcttatattaaatcactgctaatcttatattaaatctctactaatctcatattaaatcgctactaatattatattaaaattgtaataatcatatatatatgctaagtctaagaatcttatattaaatctctaacaatcttatattaaatctctaataatcttata

SEQ ID NO: 4181 - DNA, 664 bp, Oryza sativa
tttgtctcgtgaggcaagaactccagaagttttggaaaagaaccactgaagtaccgggcagacctctctgtcttcggttgatagctgccgaaaaatttctgtcccccccctcttctaggctacaccttggatttcaggtgcagcttctgtacataagattataagtattatggatggcaatgcaggaaacaatcaaatttttaggctgaagaagatactccgaagactgcttttagatgttctggacaattggcttatacgagtgggttgttatgactttttgggttaagactgctggtgctacatatcaaagatctatgaattatatattcatgatctcatcggcttgttgggtgaatctatatagatgatgtgattgtgacgtctaaaagtgttgatggacacttagctgatttatgaagggtgttagataggacaaggaattctaaaaataactccatttatacggctcttaatccaattttcgctagcgaaggctaaagaggaccacatggaaaaaaaccgccctatatatcaaatagctccgcaccatctcaactttccccacatcccaacttcacgactccttctcttctctcaagccgctcctccctcctcctctcaccatacatcttcacctgtggagcgacagcgatggcgacga

SEQ ID NO: 4182 - DNA, 676 bp, Oryza sativa
cgaatgccgcatgcatctattgttaacctatgctagctgcaaattaagggtctatttagatcccctgctaaaattttataccccgtcacatcgaatatatagtattaaatataaacgaaaaaaataactaattatacagattgcgtgtaaattgtgagacgaatcttttaaacctaattgcgctatgatttgataatgtggtgctacagtaaacatttgctaatgacggattaattaggcttaataaatttgtctcgcggtttatatgcggattctgtaatttgttttgttattagactacgtttaatattttaaatgtgtgttcgtatatgcgatgtgatacggcaaaaaattttaccctgaatttaaacacagcataaatagaattacatgtatttatgtgtgagacttgagtgtgtgtgagagagagagagccagacaagaacaatgcttcgaaactcatgcatggttctttctccataggtaaggataaacaagccctcgctagtactcctacataggggcaattaagcataagtaaacacactgactgaaactctgaacctgtatacttgcccaaaactgtcgagtcttatgccggatcatttgcagtttattcctggtaagtgtgggtatgagcttgatctgtgggatattatcatcagccagccgggct

SEQ ID NO: 4183 - DNA, 39593 bp, Oryza sativa
  unsure (1)..(39593): unsure at all n locations
cacctagggcgagaacggtcttctctggcccacgttcatgtgtcaagggccaagcgcatgtccattgctgtgtaaccactcccggtctacaccagccatgcgcacaatgcttgcgcaattgcgacacacacgctcgtgaacccgcgagagtcggctctgataccattttgtaacgtccggcctcccccaggccaggccctaggccgggatgttacaccctcaccccctcaagagagatcgacgcccccgtcgatcaaccctaggccaggaacgtcctctcttggccacgttcatgtgtccagtgccagcgcatgtgccatgctgtgtaaccactcccggtctacaccagccatgcgcaccatgcctgcgcaactgcgacacacacgcacatgtcttttctgcacactttgtcctcactcgtgtgcacccgggaagaatttcccggtcagtcacccatcccaaattgctccagaccaagcacgcttaaccctggagttctttggagattggattccggaaaagaagttgcaacttgttgatatgagtattctattaatcctattaagccctaggccgggatgttacattggatggatcatggacagagacaatgtagctagggggtgtttagatggggctaaaactttttagcccatgtcacatcggatgtttggacgctaatttgtagtattaaacatagactaataaaaaactaatttcataaatgagagctaatccgcgagacaaattttttaagcctaattaatccataattattaaaagtttactgtagcatcacattgtcaaaatcatagcgtaattagactcaaaaaattcgtctcgcgaattagtccaaggttatgaaataggttttgtaattagtgtatgtttaatacttcaaattagtatacagacattcgatgtgacagagacttagaataagtccctggaaaccaaacaagaccaagtggcaactgtcaatgagcagcactgtagccatctcctaagagcatgtacaatagcagactataagcctaatataaacatattttaagaagataaaagagaatagcaatgagctacatatttgttgtcagctacaacacggactccaaaacacagtgtgtgtgacaggtaggactatgcgtcaatagtgtagtatatgtttataggtaactattgtatgaattggctattaaattgattatagatgatttggagttagtagttggctatattactaaacttggtctaataggaggaacactcaaattatggggataatgacagcacaggacaggacacacaagggatgcttctgtctctcaaacacatcatgcatgcagtgatgcagatgactcctccattgtctttctcaatcatgtgccccttgacaatctgaggccaatgagatcagaagaactcaaaagccacactcctaactactgctccctgtgtgcatctccatggatttggctggccccaacaactcgaggaacaacaggttttgtgtccttctggcgacttacctttcctttctgcacaaagactgggacagcaaactggctaaaagcaaagaatctgtgtcatggatgtcactggtgactcgtttacatgctcatcaaatcggaatcaaaacaaatgcagctatggaaaaccatcctaggtacctttagtaacagtaacataagcagtgacaaatgctgctaggggattagtaccacttactatcagtaacaaatcactagcttcatgtttacctgcagtccacttcattcttgcaatggagaaagatagcttcatatctctgtgatcactgtattttgggacagagggagtaatacattggctacgttagttcagacgacgtgaaagttcagagatttaggatgtgcatggacaagattgaatgtccggtgataaaatgggaaatgattcagcagaggaaggaatcaaaagatcgagtggtgtcacacgattcagaaaacgcagataggagcagcagctttcgcaccgagttcgagccgctggctgaatcatgcccagcgcgacacgcagacatgaatgcaagctgcagcaggcaggcaacagcaaacatcactggtcaagactcaaaagaacacactctttgattagcctccaatagaatcaaaagtacctaatacatggtgcattggtgaccagggtttacgtcaccgtttccaatatgagaaccgttttcgataaaaaaaaactgctgatttttggtcaactccgtacgaaaactagctgaaatcgatcggttttcacaaactggatcctagcggtttcacaaaaattgatcaaaactgtgaaccatggtggtggcattgcagagacgctgtcctaaataggatttaatctttcggtttagtcatttatataggggtggacaattttagaaatttcggtccgaaattatatgaatttttaaataaaatttaattaaatttgaacaaaatattaccaaaatcacgaaaatgaaaaaaaaatcagccgaaataatattatatcgagggtctgaaatttcgaaccctggtcctaaacctctgaacctaaacacaaccacacggtccaatcaaccaatcccggcctgaacctgaaactggggtgattgacagaaacacacaatgccctgcaagtttcagggagaggctgaccggaattggcaagtcatgtggaggcacatgccggccatgatgaggtgcatcctccctagatactactctcgtatcgtcgtcgtcgtcgtcttcatgttacatgttcatgtcacaacactcgcaatcacaagcgcacaaagaaaggacgcccgcattactctgatgatatgatcggttcttgcagcagctactccctccgtcccaaaagaaagacaaaccctgtatttttgtgtccaactttaactgtccgtcttatataaaatttttttataattcgtattttcattgttgttagatgataaaatattattaatattttatacatgacttgtctttttaattttttttcataattttttcaaataagacgaacggtcaaacgttggacacggaaattatgtttgtcttttttttttgcgacggagggattatagcatacgccatgatcgatcaccacgttaattatctgccgttttcggacgcttgcgagaacaaggcgccgcccctggcctacttggaagagtcaagcttagaggagaagaagaaaaaaaatttcaggtcgtggcattcgtcatgcttgaggagggacacagaactctatccaatcatcatcatactaatcaacctcttgtctgaatatgattgcttcagggattaagatagcaaactctggagagcgtcattaattggttcgttttttcagttatgaatcattcagaatcttcagcttggtggtgcactggtgcataaactactgtaatgcggattggaagatcggaaatgcaacaactatctcaaaagaattctcatacgctgatcaagagcaaatccgagatcaggattctgaataaaggctgatttttttttactctatgctggatgctaaatagcctgactaatgatactacttggtagtaatatacacgtactagtggtggtgaagaactgaaagaacacgtatgcattcggatgcagtgctcgctggtgcaagaacagagtgtgtgtgtgtgtgtcacacagtgctagtagcagatctccatggagaagttggagtcgagcagctcgtcgatcatctgctcgacgtgctgctcctcgaggaacctgccgctccattccgcgccgtacgtcgtggtggtccgcgcgtcgtcgtcggcggcggcggcattgccgagcggcggcgtcgtggcggaggccgaagaggccgcggcggcggtggcggcggcctccctctgccgctgcgtggcctgcacggacgccaggttgaaccggtggagcttggcgacgagcgcggcggagaggaacgacgaggacgcggcggccgccgccgccgccgcggtggcgtcggcgagcgggaagttggtgcgcgcgcggggcccgcacatgatcctcgccgcctcgtcgtacgcccgcgccgcatcctccgccgtctcgaacgtgcccagccatatccgcgtcttcctgcaaaatcaccccacggtgcaccaccatgagcgaacccctaaccaaccaagaaacgcacggcgacgacggcgaagaagaagaagaagacgacggtgtcgcgcgcgcacgtacaggagagggtggcggatctcggagacccaggagccccagtggcgctgccgcacgccgcggtatcgttgctgcggcctcgccatcagcttgtaggcttgtctatggcggcggcggcttcgcgggtgatcgtcgccggcggcaatgggggcagtgatcgagcacttcgccgacgtgggtgcgcgttgccaggttgcaggggagggagtgtggtgcgggagccatggaaatgggctataaataaggagggaaacgtcggaatctttttcattgctcggatggctgctcgggtggggcccacataaaatgcctcagtagcattgggtgtatggccactgggcccactagactgttttaagctcgtcttttcgcttatacttatacttataagttaaaaattgaattttaagttgattttggaatatgttcatcgaagtttattttttagcatttgcgatcgttaagaacacgtatataaaagtagtatttacaaattatttttcgtttgtaaatatgttgtttggcttttttaaaaaaaataagtgcaacgatgggccgtttgtttagtttagtttgctttggtttgattgtttggttgatccttcttgctttggtttggttgatctttagttgtgactgtgatctgtatattcttttgatttagttttacttgttagatagggaatagtaataaaattgactagtaagaccatcatgggcgtactactactttatctatttcctaggaatgttacagaagtttctttgaatagtttaattctgatcggatatgggaatgaatggatagagaaatcaattttaacctatttggaaatttgattaaaattgtagtatttaaagtaaatttttaccaacccatagtagaacaacgtacacgtattccaagttgtattttgaagaccggttcaaccttcaaaacacagattcaacaggttgtctgaactgatcgagttggattgtcagagatcaaactggactgaactttcgttcacttcacctatcacaggattaaagatttacttatcacagaagaggagatatgcagagatccagagacagatgcaaagaaaaatctcccatttgatctcactgactcttctccctgattatcagacaacccatcatgctgaagattatcatgccatttcgccatttttcctgtggccttgcccaagaacatgcaagccagacaaaataaacctcacatggacggaaaagagccatctgtctccaagcttgcgactgatcacacaccatgcatctatcatccatccaattttggtgtgtgctatccagaaaattaaacatatgtgataagcatgatatgatctagacctagctacccaacgtctcagacacaccacatgtgaccctttccctttcacctcatctatagctatagctcccctgtattaaatacaaagatgataaggaagagaccaattaaatggcaaatgggtcgtttgattctctgccattagtccaaacagcattcatgcatgcatgacatgaacatgccatttcgatgtgtatttaattaagtttgtaacttcgatttctgggacattccagatcaaactgaaactgtttgaaaacgagtacagaaaaagtatcggagaggagtcgaattcttggtctttatgattgattagttctgaacagaggatagagatttgtgagcttttaatcttgacgtacgccacatgacgatgcaattgtttcacaaaggtggatcaagttaatccagtcaattcagtcgccgaattttttaggaagactcgaagtcaccgacgaaatatatgctcgaagaatgaatattacgcatgttgactcgcaaatcgtcgctaactgtcccccactctgcttgtgatttttaatcatgatcaatatatcgatcgacctcaaagcaaaagagagtatccaaggaactgtcactgtgcactagctgctaatactacatgtatatgacgcttttaatttttagatataatatttgactatatgtttaaatttgacgtaaatataaaaagatataatttttttgacgcaaaaaaggatataaatcatatttaaagtacatttaaaaatattttttcgtaaacccgtaaaaagattgcacgtcaaaagtactttttaataataaaataagtattattctaacaagatgaatggttgaatgatatgtctaaaataaatattccgttataggacgttttaactttggttaaaatcaaactactttaaataaaaggtagtaatatttacagcatcagcatagtttcattaaatctataattgaataaatgttcataatatatttgtcttgggttaaaaatattattatttttttctataaaaattagtcaaacttaaaataatttgactttgaccaaagttaaaacgtcagtatcatatattttaaaacggagatactctatcattgtctataaatcaaaacggcccgaatcgacgacggagatcctagaaagaatcgagaataatcctccgcctaactcaatgaccgggtgagcacagaacagaaggaatttagacctaaccacgatataaatactgcaaccctctcgtaggtcagtgatgcatggtaggtaggtaaagccttgcaagctgcattgcagataaaaggaagaacatggcatccactgatgataagactactactacatggatgtgtatagggtctacgtacccaatccgtgtatagcctactataatagtactaggctactagcagtgcgtcatatcttacactaatccaatgaaatgaatacctccataagttactcccaacaaccatatgtagcatcaaaattcagtctgacattgcatatattggctccaaactcaaagtctgaagatatatggatggagtccgaaagacaaaaccaggaatcgagagttgcatatatatgcacatggatgatcaggacttgatgcatcgaggagtatgcaagcaagcatggatcggatggatggtccctggctatagctaagtaggctatagctatagctaggagagatgagctgagcatggatcagtggccggccgacgagtcgcgagttgcaatcgtctctggaatatggatggatcatgcatgttcacctccactgcgtcactgatcgatgctaattgctagctggtggacgaggggtgcagagagcggacgaaggatcctctaccgttgaagtcacgtgactttatcactgtcacgtggacccccgatgattcgtgggtttacatatcagtgacaaaagcaccgcgcaaatcaccagcgcgcgccaactttcgttgcatcgggaagaagaacgtagtgtagtaacaatgcgatggtatcgcgacgcatgtgctgcggccgtgtgcgtgcgtgcgtctctccgttgaatcgtcagctcgcgcagcgcacgcacgacgcgctgcggcgccggcggcagccttatagcctggaggctggaccgcgctcgctgtgtgatggcgtaggctgcagtagctgcagtgtttgcagctagctagcgcaacggtctcagcgagagctggagcccgcattgctgctggcctggctgcctctctctcgatggctctcgcaccacgtggagttcagtgcgcgacgcagataggataggcagggtttcagtgttccacagacagggacaatgcaagctctctcatgagcatagtagtacgtagtatcaggggcgcggattcaggaaggactaacagaagagaggccgaagaaactatacaaaactatagccctcttttttaatgggtgtatgataaaaaaatttagtgagacttaatggaaactctcatagttttaacgcttgtagtggtgactctacacgccgtcgctcccatggtagatccatcactgctagtatccaactatccatggtggtaatttgcaaatcgcatgcatgctcacgctccgatcgatcccctcgatgaagatgaatctgatcagacatttgctatgatcgctggctggaacactgaagcctgaagttacaactggtttattaacaatgagctaccatatcctgaaaatacaataccttgaaacttggagctatatatacagcctatttttttatataagctctcgtatagctgtaagcctgtaaatgtggacaaagttcagttcttgtattgttgtcctgttagggagcgctgcagatggccactggtttcagcctttcaggggccctccagaaaccacctagccatatttttgcacaaattttatcttgatttctcttatagttaactgcctgacacgtaagaaattgaggatcattccggcaaaagaatctagctctgtagctttagctcactagcttttacagtggatagctgctgttctttgtagatcccttttgtatctcatctgttccatcccctttgcaaaaagaagaagtgatcaactgaaatttagcaactaacaatttgttaacaaccttcttgccgaaaaaaacaggaggaaaatttctttcagactgtcaccaaagtcgagaaaaaccaggatcgatgcagtacttgtttagctgcaatgtcttttatgttttgctgcactagtctgtctgtctgcaggatcggagcacactgaaagcaagcgcagctgttgcacatgctgcatgcacacacactgaagaactgacggctgaaacgatggtccaggtgcataacgaacttggtcttggtgcaggtagagcctgacatagtcatgttactgtcaaaccacaagtcccaaccatcctatgtaatccaaaatggacaatggctcaatgtgagacagctgctacaacatttcacatttcaaggatatcttgaccaaagatacacttttctgacaatttctgtcattttttaattcccagcaaaccgtttaagctaccttaaaatctttgcagaaagattgtaagttgtccacaaggactactgtgatgaacacggcttgtctattcggagataactctataattagttcgcccatcattgtccggtatgggtattacttgttagcttgctgaagtgatcaagcagacctgatcatgtatggatgattgctaattagttttctgctggtcaattgcagtcattagccctcgcgaatgatccgcatttcgtgggatcttacttgacccgactgacacctaatgattgggacgcaatctaggctgctactaaatgaattttaactagttgcgtttgacaaagattaagacgaacagtaaacaccctaaaactctgaaaaatgaaaatccagtcaaaatatctccccttaatttcttctgtcacggcttcagctattcagctgtattttggggagatgcagaaactgaactttcagcgaacagcacgacacgcatcgttcgcatcacatatattcatatgccgtcatgaaacttcaatttgtcccctgcaaatcacggtgaattgcatgagaactgcctgccggtgagagtgcatggcaacacggcatgcagatatgcaatgcaagatgcaactcacctgaggatcatggcagacagaacgcaaaaacacccacatggctgcgattgcgacctgataaaaccggggctaacgatcatatacgagcagaatcagttaagcagattagcattggtccggagacagccactcatgcagcagatgatgctggggataagctagatgatcgccagcgactgcctgtctgcctgtgccggtgatcgcgatgttcttgcagagattgggcagatgtgaattcaattcaggcgaccgatcgatcgacggcagccatccagcactgcatcatctagcatctgagtgagatcgatcgatcgatcgaccagaaaaatccccatgtgacaagaaccaatccagcgattgcgatgtccacagggatgaagacgtcgacgcattatcgtctcctcaaagattcatgcattcatccatccatatgttcgatgaatcgatgtctctcgttcaagattgcatccatccatgcatgctggctctctgtgcagtcattttgcctgcagtgcaggacgcgtttaggagaggaggagatcgacataagctgtctttgagagggacatcttgtgttttcttctcgttgtttagggcgcgaacgcacgatcaagttgtctagctgcgacgtgcctacgaaaaaaaatgtaggttttcaggtgagaagaatgagataatggacggctccggaaattgcggtccgggcatacatatagctgggtttgtagatgatacggagtcggttgttattcaactgccagttgctaagtgactgtaggcccgttgaatggattgaaatagaatcttgattcgttctttgaacacacgcacgtaaaccctacccggcaaatcctgtacctcacaggtacctcactgtcgacgggtacgtcgcctaacactgaaagcacaacaccgttaaatcctagaaaattcgctcccatgtcaacgccgttaaatcttggaaaattcgctcccatggggggtcgaacccaggaccttaggtgctactgagacttttgtaaccactaggctacatgccccttcgctttttcccaattattataactacacgatagcacaaacactgccgcgttttggagcctcataggcatggtttaattattcggtttggccgattctatcataggtcaccaatataccgaaatcttggaaaattttgaacaaatgttggtcaatttttaacaaaatattaccaaattcaaaaaaatgatggccggaataatatcgtattggaggtccgaaatgaccgaaatctccatctggaattttaaaaaccctgcccatcggttgcttattggggaataaaaattaattggtaactaaatttttttacgtcaagtaagtaaaatttttatatatttattcataacgatttaaaagccaacgctaaaacaaaattacgtggaaaatatctaaacatcaactcgaaatcaattttgaaaattttaatttttgcttttgttttggcttattagaccaacccatgagtctcttaattgcagatgttggaaaatgttcgagatttttagtcttgtgtcaagataatttttcaagcttgtttagaacttggaagcgatggatttgacaacagaaaacataaagattctgttctaaaaaaaagacgatataaagattctgcctgaatgtagaattttcctaattttgagtggaaattattgagctgctttgcgtaaattcattacgaatcctactacgacaaggtgacctttcagtaataatcaaatgggccacgaaatataatcttgatctgggcctaaatttctattgtatcaccctcttaaagcccagtttaccaatgttgacgagcccaacaagccataaattaaccatcggaaagtagcccaattaagaaattgcggaaaaaaaggcccatcccagttagcccattctgaaccgcactggtgcccactatataatccccagccacacacttcttccacacttcacgcacctagggtttcgccgccgccgccgccgcttcttcgtccccgccgcgacgatggtacgctcctcgatctcgcgctcttctctcgtcgaatccattccggccgaccgaccgacgtttcgttgatgtgattgcttgcttgtttcgtttcgccgcagccgtcccacaagaccttccgcatcaagaagaagctggcgaagaagatgcgccagaaccgccccatcccctactggatccgcatgcggaccgacaacaccatcaggtgatttattcttcgcgctcagtctttgctcctcccgagttcgattcggcttaggcatatccgctgagatgtcgtggtttggtttgtgttgttcaggtacaacgcgaagcgcaggcactggcgccgcaccaagcttgggttctgagcaggaggtagcaccggttgctgcctgcggaggctagggttactgagttatctgcatcattttgttttatggatgtttcagtgtttatgcaagcttaggatgtgattccaggatgctttttattaaggttttctgaaatgttaagtgtagttgtactctggtttactgaggataccatgctatgctgtgctgagtaaaggaaccattccaatatatgtcttttgaagttatttcacaggcttattctgtttcatttttaaatttgttattgcatagctggaggggtgatttgttctcaatatcgttggaagtatgattgctccattgttattctattgggccgttgttagagtatgattgctccattgttattccatcctaccaaaagcattccgccacaaaatatagcaacctaggattggattagatgcggggtttgtctagatttgttggactaggatgtgtctaatccagttataggttgcaatattttgggatggagtgggatccttaggcaggtcaagctgttgatagtaattcttttgtatgtatggagtttacgtggattacgtggttttgcaatggtccttctaggaaacaaagctaatattgtgcttgtaccaattgtatgtatggggtttatgtggattacgtggttttgcaatggtccttctaggaaacaaagctaatattgtgcctctaccattggtgcaatgctatgcaattgaaactaatgcaacttattttctgactgttataatgttgcaaattgtgattgtctacgaattggcaaccatcactctcagatagttacttgatctctttattgaacagtggcctcatttgggactgtttgaaacagattattcagctgattatctacttgatcatagggatgaatttaatatttttagaaacaaaatgaacaaatagtgtagaacatgagggttacacaatgcagtaagttttttttgagaaagcatatttttagatgtgtggagcaaacactccacggccataatctgcaggagtgtacatttttggtcgtacaacagtagtgttaccttttttttttttgctgtgttctacttctatccatgttaaactgaatgtagtcaattcatgtgcttgttaataccaacatggattctctatcaatcatagaagactttggttatgtttaggctttatatttccatgctgtaatgcttgtgttctgttgtgaactatggttatttgaccgagacacgcactaaaggattgtttatgcttgtttcattggtgttctattctacttgagaatacatggatataatacatggcgatgatgcttttttttggttggatggtctgtctaggttcgtagctcagaagagtgtactagcttaaggatggggtcttgtttgtcacagcagtgcaaggtgtgttttaggtttgggttgactgtatgattcaatgcctaaccttttatgctgaactcgatcatatggtttggctatgtttgtatgagactacatgctagttcattactgtgaattatatgacgtacgaactggtgtaaatgatgtcattattgattcgtctactaagggccaagtttgggacttctgtccatttgtcttacagctcagtttgacatcaatgatctgtccattaggttttatgccaagttacatactaataatcttgcctgagctgtgagcacacttctacatttcggtgccgaatcatttcgttctctctgttgagattgttccgactgatgtttcattccactggcctttgaattagacgccgactgcaaattgatatacacatcttgctgcgtaagacgagtttacgtttgcctttatgagcccaaggtcacgtttgccatagccgcatgggttgtctagccgagcccacgaggaaattttatggccgcgacaaaatctcttgtatgctaagtgtattgccatcaattattgaaagaagtaagtcattgagtgattactcattaatttccctttaaaaggctattacctccgtcctaaaataattgtatttctaagattcaaaattcgtcccaaaataattataattctagagttctaattgtcccatcgatctcattcaaatttctccttattttaccatcaaccatcttctcactctcatataaacactatttaatgagaggtatcatatgctttcttctcaaatatttatatatgctaaataacatagaattacaattattttgggatggacgtagtattttattgtaggatgctaagtgtattgacaccagtcgcttagggtatcgggcgaacgtacgtacccacaagcaaaaaaaatcgcacctacactcgtgtgtgtatccggcggatccatcgacaaaaaatgccatccctatatatcctggtacgtctccttggtgcaaggccgtacgataggaacgagtttggaaaaccgaagacgttggtctgacacgtagacgactccggaacgaatttctccgtgtcgtcccgtcgtccggccgcaacaaaaaaaaaaggtttgaaaaccaaaagacgttgatctgacacggtagacgactcgggacgaacttgtccgtgccgtccggccgcaacgaaaaccaccaaacgtgctgcaatgcatggccattggccagcaatcaagcctatccggtgggtgcggacggacggcaggcgcggcgaacgggaggccagccgcgcgtcgcgcccggggagacacgcatgcaaatccaaagccgctagtggagcgcgcaacgttgccgagtccccgctgcttataagaggcggcgaggcggtgccacggccatctccgtccttccatcccagccgcgcgcgcgcgctcggactgacccccacccccaccgaggcaaagcctcgtactccttccctccaccaccaccgcgcgccgtccgcgcggctgcggctgcggctgagggcgaagccctccccctaccccnnnaccccaccccacctcatcactcaccaccaaactaataaacccgtcctcccctcccccccatggcctccatctccctcgaggacgtccgcaatgagaccgtcgacctcgtacgtaatatatacagtcgtgcaattcttttgtgcgttcgttcttagttttttttcttgttttgtttgtttgtttgcaggagacgatcccggtggaggaggtgttccagcacctgaaatgcagcaagcaggggctgtcggcagcggagggacagaacaggctcaacatcttcgggccaaacaagctggaggagaagacggagagcaagctgctcaagttcttgggtttcatgtggaatcccctctcctgggtcatggaggccgccgccatcatggccatcgtcctcgccaacggcggcgggaggccgcccgactggcaggacttcgtcggcatcgtcgtcctcctcgtcatcaactccaccatcagtttcatcgaggagaacaatgccgggaacgccgccgcggcgctcatggccggcctcgcgcccaagaccaaggtgctcagggacgggaaatggcaggagcaggacgcgtccatcctcgttcccggcgacatcatcagcatcaagctcggcgacatcatccccgccgacgcgcggctgctcgagggcgacccgctcaaggtcgaccaggcggcgctcaccggcgagtcgatgcccgtcaacaagcacgccgggcagggcgtcttctccgggtccaccgtcaagcagggcgagatcgaggccgtcgtcatcgccaccggcgtgcacaccttcttcggcaaggcggcgcacctggtggacagcaccaacaacatcggccacttccagctcgtgctcacggccatcggcaacttctgcatcatctccatcggcgtcggcatgataatcgagatcatcgttatgtacccgatccagcaccgcgcgtaccgcgacggcatcgacaacctgctcgtcctgctcatcggcggcatccccatcgccatgcccaccgtgctgtccgtcaccatggccatcggctcccaccggctgtcgcagcagggcgccatcaccaagcggatgaccgccatcgaggagatggccggcatggacgtgctctgcagcgacaagaccgggacgctgacgctcaacaagctcaccgtcgacaagacgctgatcgaggtgtacgggcgggggctggacaaggactcggtgctcctgtacgcggcgagggcgtcccgcgtcgagaaccaggacgccattgacacatgcatcgtgggcatgctcgccgaccccaaggaggcccgcgccggcatcaaggaggtccacttcctcccgttcaaccccgtcgagaagcgcacggccatcacctacatcgacggcaatggcgaatggcacaggatcagcaagggcgcgccggagcagatcatcgagctgtgcaagatgagcaaggacgccgagaagaaggtgcacacgctgatcgaccagtacgcggaccgcggcctccggtcgctgggcgtgtcgtaccagaaggtgccggagaagagcaaggagagcgagggcgagccatggcagttcgtcggcctcctgccgctgttcgacccgccgaggcacgacagcgcggagaccatccgccgcgcgctgcacctcggcgtgaacgtgaagatgatcaccggcgaccagctcgccatcgggaaggagacggcgcggcggctcgggatgggcaccaacatgtacccgtcgacgacgctgctgggcgacaagagcagcgagatgagcggcctccccatcgacgagctgatcgagaaggccgacggcttcgccggcgtgttcccggagcacaagtacgagatcgtgaagcgcctccaggaccggaagcacatctgcggcatgaccggcgacggcgtgaacgacgcgccggcgctgaagaaggccgacatcggcatcgccgtcgacgacgccacggacgccgcccggagcgcgtcggacatcgtgctcacggagccggggctcagcgtcatcgtcagcgccgtgctcacctcccgcgccatcttccagcggatgaagaactacaccatctacgccgtctccatcaccatccgcatcgtcctcggcttcatgctcgtcgccctcctctggaagttcgacttcgccccattcatggtgctcatcatcgccatcctcaacgacggcaccatcatgacaatctccaaggaccgtgtcaagccgtccccgaccccggactcgtggaagctcaaggagatcttcgccacgggcatcgtgctcggcacgtacatggcgctcatcaccgccctcttcttctacctcgcgcacgacaccgacttcttcacagtattacaaaacacatagtacattttatacgttctcttagagcagagcctctttgattcctttgtatcctcctattataaaatgactggaaaaaaaaacgcaggagacgttcggggtgaggtcgatcaagacgaacgagaaggagatgatggcggcgctgtacctgcaggtgagcataatcacctgggagagtggtgggctctgcccccttcccgctgtttggagtcgtagtatccgagtcttttttttttcccttggtttttttgtttccctcctcttttgatataagtcggtctggtttagtgcgttgagtaacatatattcttttcttctgatatattgacgtgcaatctttttacgtgttcgagaaacaaaggtgagcataatcagccaggcgctcatcttcgtgacgaggtcgcggagctggtcgttcgtggagaggccaggggcgctgctggtgatcgcgttcctggcggcgcagctggtggcgacgtgcatcgcggtgtacgcggagtgggagttctgcaagatgcaggggatcgggtgggggtggggaggggcgatctgggcgttcagcgtggtgacctacttcccgctggacgtgctcaagttcatcatccggtacgcgctgagcgggcgggcgtggaacaacatcaacaacaagacggcgttcgtgaacaagaacgactacgggaagggggagcgggaggcgcagtgggcgacggcgcagaggacgctgcacgggctcaaccagtcgtccaccagctccgacctcttcaacgacaagaccggctaccgcgagctctccgagatcgccgagcaggccgcaaagcgagccgaggtcgccaggtaaaaacttgctctatcccatgatataataatggcaacatatcctatgcacacaggccctcacgtgtacacacgtgcacaccaactaaaaaatgtcaccaaaaaatctagaaaaaatcatacacatactttcaattgtattacacctaagattaaaatcttaacgtcaaattcattatattttagccgtaacaaaaaaaacaaagaatctgacagttttaaggttgcaattttgttagaattttatcttttttgttattctctatgtagaataaatttgaagatgcgactttgcacgtagatgtaatactattgaaagtacatgtatgaatttttctaaaattttttgtgataatttttagttggtgtacacggtgcgtacacgcgagggcctgtgtgcataggatacgctccctataataatacagtactccctatgactcccttaacttttttatcaacgtttgatcatttgtcttatttaaaatatttatgtaattatcatttattttattgtgacttgatttatcatcaaataatctttaaggcatgacataaatatttttatatttgcacagaaaatttgaataagacgaatggacaaacgttgtttaaaaaattaacagcattatacattgaaatacggaggtagtacatagataagacattatctagattactactagtagaatgtcttgtccggtactacgcttctatattacgggaccgatgtagtacattctctgtactgcaaccaaccaatgttcaactttctagctagcacactgcttgatttctcatctccatggacagactgagggagttgcacacgctcaaggggcacgtagagtcggtggtgaagctcaaggggctcgacatcgacacaatccaacagagctacaccgtgtaacatacagcatgccatcgatgtgttgttgttgttgttcatacctgtgttttactcctccccatctgcaagttatttggagatgggggtttcgacttgtgttttgacatagatgtttcttcccttctttgtattttgttaacagggaatagttcccgatacaacaggtggtgcacttttgagtatagtcaagttatttgtaagattttggctttaagccggtttttttggcaatgttattgttcccattgcagatttgcagtctatcaactttgcctcaactcagtctgtatactactgtttagtcaatcatcatcagttttgacccagcaaaaacatgccctgattactcagctgaattctgctcctttaaattcttgtctgggcactgcagaatattagccatttatatccatgaattaatactgtagtttaatacattagccatttcagaaccctggttacatggtttcactacagttacatctttaatactgtagtttaactacagtttcatcaaggacggagtgcatttcttctactcttgcagattacaatggtcatgtcagtgatcaaccgaaactcaaacatgtccttgtcttctcccagagattacagtttcagtgaactcatagccttatacagtctgaatagaagttgtcctcgatttataaatactccacagttcacctcaagccttccggacaatgacatggcgctctctcttgtactccacttcatccctttggtgcatgatcagaagggctcttcgcacctgaagcagccgaatggtagcataagaaaaatgatactaaatcaattaattaaatagcaaatagtatgacaggttcctcacaatggattcattcatccccatcctatttagttcatcgatcaggcgtcgctcggatatgtggcttccaattcccatccttctctttatttgtgcctcagcttgctgttggaacaaaatgggcaacaaaattcagaaaacaaagttgacaagttggcagttcacttttggatgggaagattaaccttgatctcatttgcaatatctggtgataggttcaaatgctcattgattccagatcttgcggcatcaacagtggagacattgaacagcctaaatgcctcttcaacatgctctggtgtagccacacttgtcctgataattattcaaagtgccaattaggaacattataaaacatgtaagttatgacccactggaaataaaagccaatatgtgaaaaatgtaagatataaatatactgctagttgagctactcgcaaaaagaaatgtcaaatgtatagtaatgctatattctcacaatctcatctttgcaagagattcactcaaacgtataatggcttcaagctgccgcacagtgatgggtatagctgcagccctccctgtttcatgagcttgttgtctcattttctgcacaatgaaaaaaataaataagtagaacagtcttaataacagttagactaagtgaaaaatctttagcacgtgcctgtctaatctccacatatttgttctgaagcatctctgctgccttttctgagagtcgtggtttacaagtaacacggcaatactcaatgtacctacacatgtgaggattatgcatttacaatccaagaacatcatatcaaaactgtgtagtatgtatatcagaacatagaaggccaaccacacctttttagccaattctctccttcactagcatctgtattcttggatgaagcagcagcaccactggcatgcaccttaatgatgtggcttgcaattcgctgcaattggaagtttatttagtctctgaagcacatcaatgagctggacaaagaataatgcgtcataccttgtcttgatcatacattctgacatctttaacaataaagattagatcaaatctagaaaggatggttgtctgcagatcaatgttatcttgtgcagtctgaggagtagcaatagaaaatgtgtcaaactgattgccttgcatataaggctagaactgttaatacattttcaaaatatgaaaatagtacaagtcaataataaaaactttgactgaccttaagatcatcgtagcgccctgcaattggattggcagctgctagtaccgaggtccttgaattgagtactgttgtaatgccagctttggcaatcgagatggtctgctgttccattgcttcgtgaattgcaactctggaatcacagcataaaggtaactcaatatggtttcaactttgaagagtaaggaaaaattacatgtgcaatgcttattttagtttctagaaagaagactatagatcaatgcttaccggtcctcaggcctcattttgtcaaactcatcaatacaaacaactccaccatcagccaaaaccatggcccctccttccaaataaaactctcgctgtacagggaaaataagtcttttagttctaggaaacagaactttgagtaaacacaataatccttgcagggaagacaagcttacagagctaccgtcccgaattactgacgctgtgagaccagctgctgatgaacctttcccagatgtatagacagcaatcggcgctgtcttctccacaaacttgaggaactgttggaatgtacagtttcatgtcactggactagagataattcatttctaatagcgaaaaaacacttgcctgtgattttgctgttgatggatcacccagcagcaagacatgaatgtcccctctcaaacggacaccatccggtagcctctgccatagaagaaagtttagttacagctcattccaactagccactggatccaacacaactttgtattttcacatattagccactgataagatcaaaaatataccttctttgagccaccaaacagcaagcatgcaatagctttcttgacatcagaatggccataaattgaagggccaatcattgagcaaatcttgacatatgcatctggcctctgtgcaaattctttgaattccatttcctacaaaccaacaagaaaattaacattgtaaatatgctgtaacactcttaaaaaagaaacttggaattttggcaaagcaatctacctcatcaagtgtaaaatttgagggaccattcgagttggcatctcgggactgctccaaccccacaactctaatgtaaggctgtttgactccaacagcacccttttggctgcaaaatgaatatttgagcgtcatcagctatgcaagtagtctagctcaacaaaatggaaacaaactgagcagatgttttagatccaacatactttgcagatgcttggtagacactgtagataccaattacagttaatctagttccaggaacaatggtctgaacaagatgcctgtctacggacagcagcatattcctcgggagctcaccagttggaacatcctgttaaccaagtaatatacagcttggtgattgctaaatcctaaggacatataaccaataaacctagaaaaccatagcatcgcagcgaggacatataatgcagtaacaaacctcaggattttcctgcaatttgagggtctggagatccacatacttgctcttatctggaactgcaatccaggggtccaaggggcaaggctcttctccaggctgaaaaatggtaaagaaaactcactcatatacatcagaattaaaacacaaacaagacaataacccaattatgtttagccggagttagacctgaggaacatggtcgcacgatcgtgggacaatagccccaccaaggccaggcctacacggcaccgttttcacacttctgcagttcttgcagagcagcgtgacatgagtggccttagctttcaccctcgacgcggcgattgtgatcccggcaatcttcaccagcttggacatgtaatccgcctggaatttggaatacagttgtgtcaatttgaaattcttcacaaggctactaacaaaatcgtttcagaactgaccccaatagacctcatggacaggcagttctcctttgaggacaagaagatctgcacgtcgccggtggcgggctcctccatctcgccggtctctccagcgaccttggaccgaaggctcgcgaggacctcggacgcagccgtctcaaactacacaaaaccctaaatcttaacacaaaaaattgacatcaacagaacccagagccaacaaaaattcagaaagaaccagcacacaccagcggtaggtaatcagcgggagacttccggatcttgtcggacagctcggcgtcgaaggcgtcgaggtcctcgatggcgacggtgacatggtcgcggttgtgcaccaggctctcgctgcaaccatcaaacaaaaacacactggattggtcagagcgaattcgaccatccgacgaggcaccagatctgggagggagggggggcgcaccggtaggggaagtcgccggttgggccggtgaagccgcggaggaactccttgaacttgcggagggcggagtggcgggtgaggtcggcggaggggtcgccgccggggccgccgcgcgggaactgcgcctggtcgctgtagaagacggcgccctcgtcccaacccgacatggctggatggctggctggctgcggcggcggcggcggcggagagagagggagagagacgcgtgggtgcgcgggcggcggggaaaggggggaagacgccggagaagtggcgggaagagggtaatagaggaggagatttggcgggaaactgggggagatttggcgggaaactggggaggtagggtagggtaggagaccggagaggcagctaggcaggccggtttttgtgggcctgggctctcatagcagggtgctaaaggagtagaatgtgccattttggcccaaaagcatggcgatttgccgatttttagagtaaaaagtatagttggggtctctcatttttttgtcgcggagttataaaaccgtcgttgaaccgtaaaaccacacacagtatatcatataacttataaaaccagcgaaaataagatcccttgacggtattgtccgtagttttgattgatgtgatgcctacgttgctcctttaactaggtttttgtctcacgtgatattgacgtgacgcttatatgataatttgatcccgaaaaaaaaataaaaagatatgacttgaaaaaaaataaaacataatatgcggagccatatatcagtcaaacaaaaaagataaaaaatagtgggacccactaacccacttcctccacctctatctcctctcttcgccgacgagccaaagctatccggagttagtgcggaggcctgccaaggggacggagagcccagtgagtgtgcacggagagagaggaagcaaagaggccggtgagggggcaaaattcaaatccatcgtcgcccaacactacatccaccacacggatatggaggcggcgaggaggctcctccaatgaagagtggcaagtccaaattcgccgttgccaacatcacctcaactgcatggagagggagaaggcagggaggccaacgagctcctccaagtctaaatatgccgtcgacgacaccacctccaccacagtcgtcgctgccaccaagcacaggagagaagcaagatggcaactctgatgttgagggcaatctcgaagctgtctcaccgcttgctcagacgacgcatgccaccggcttcggtgccaagatcaacgacaacgacggccaccccgctgcatctagagaaggagaggggagaaggggaagaaggccaccggtcgcatctgcgagggaggctgccatcctcaaaaccaaatggttttcgtgaaaacattagatcttggtttgtaaaaaaaaagagtcggttgatattagccaatttttatataacgtgcgtaagggctggtttagatggcaaaattttttattttggggtgtcacatcgaatatacgaacacacattcgaagtactaaaacgttgtctaataacaaaccaaattatagattccgcatggaaactgcgagataaatttattaagtctaactaatccatcattagtgaatgtttactatagcaccatattattaaatcatggtacaattattaggtttaaaaaattatcttgtaatttacacatgtaattgattttttattaaaccacgtgatgggtgtaaagttttttttgttctggtaaaaaaaccaacaagcccccacatcccaccgattctgaattttcccaggaatctgagcggccgcaaggcgtcacgcgaaacccgtccaacccaactccactccatcctctgcagccgcagttgtgacggagactccaaggccatcaccatccacccgctctcctcctcctcctcctccgcttgatccctccatctcctcgatcgatctccacactccactgcgcactgcaccagcaacgcccccccctgatccctctccacggctgcaccggagatggcttccgcccccttcgccgtctcctcctcaccggcggcttccgccgtggccgcgcgctccaaggcacgggacactcgtcttactcatcttctgtgtttggtttccttgatttggatttggattttttttttaattaactcatgccgcggttcgttggtgctcgcaggtgttgcgaggagggaggagcgaggcgaggactggatgccgcctggggatcacgaggaaggtggtcgcctgtttggattatgatttctgcctctagcttgtttagttgatggtttgttttggatggacatgggttctatcgtctatcttatctgtgatttaatagtgatactgattgcttcctccctcgattagaaattatggtttgtttggtttcactatgaatgactacctgtcagttggcactgtgatctcttttacgacaataatagtaattcacgattcaggagtttatctgctttttgggtatgatatctctgctaatttaatgctcctggagctcttctaatcagggatgggtggctcttaattaaggttttgaatccatactgtcatatgttgacacctaaaagctctttgatgtagaaaataaaatcgaaatgatatatagaaatcggttgagacttgagaacacgcagctgctgaagcatgactaattatcaagctgctaataaaatttggcgatggccttcattggaaaggcatggtgttttgatcctgtaacggaattctgatattttatgtttgttaggaactctcaactcttgagaaatataaaattgactgtatcgagatttattccatgtcaagcttcagcatatggttgtgctttggattaacatcctttcattgctattctgttgcagaattttggacgtgtcatgatggcccttgcagtagatgtctctcgttttgaaggagtgccgatggcccctccagacccaattctcggggtttcagaagcatttaaggcagatcaaaatgatctgaagctcaaccttggtgttggtgcctatagaacagaagagttacagccttatgtcctcaatgtggtcaagaaggtaagtctaataatacctatcatttccttaatataactcagttcttgttgtgacacactattcttacacgtggtaggctgaaactcttatgttggagaaaggagaaaacaaggaggtatggtgtattttccttcaaattcaagtagctggattataaggaattatttctggagttttctgtatttctgtttctgaaggttgatgacaaaattatgttttttttggtgcagtatctgccaattgaaggcttagctgcatttaacaaagcaactgcagaactattgtttggagctgataatccagtactcaagcaaggacgtgtatgtgctgtggcctatgcagctcttgctgtacttattttgtaaatactaagattttctggaatgctgctacagcgaagcatgtccttatatttagtaaacattatttaatgataattccttctgtaggttgctactcttcagtctctctcaggaaccgggtcgctgcgccttgctgcagcatttatacaaagatatttccctgaagcaaaagtactgatatcatctcccacttggggtatgtatgtgaattaatgtgcttaatctttgagcattcaacttcatttttcatagcagagtgtctcattggcaaactttgaactccaatctatattcttacaggcaatcacaagaacattttcaatgatgcaaaggtaccttggtcagagtaccgttattacgaccccaagactgttggcttggattttgagggaatgatagctgacatacaggtcgtgttttctaactcatttatattcaatactactatctgtgttttctattttaaacttgatgagcattgtttagcataactttgtcgttcaaattggcatgtatccatcatagaaatttacacctgtcacttgtctgtttactattgttaattgtcaattttctgtttactattgttaatttctatgtgttgagtattggtttgtgatattgatttgtgtgtccaataggctgccccagatggatcttttgttctgctgcatggttgcgctcacaacccaactggaatagacccaactccggaacaatgggagaaaattgcagatgtcattcaagagaagaaacacatgcctttctttgatgttgcatatcaggtgaaatgttctcactttattatttcgtttttctctgcatgaaaacaaatatcttactgactagcaaatatttctctgcagggttttgccagtggaagccttgatgaagatgcatcttctgtcaggctttttgttcaacggggactggaagtgtttgttgcgcagtcttatagcaaaaaccttggtttatatgcagaaagaattggagcaataaatgttgtctgctcaacacctgaagtcgcaaacaggtgatactttaatctgaatgattgccttcgtagtcaaattgttcgtttctatccagttattgcagcgaatgttaataatagattattctgtttagtgggtaatatggaccaacctcttattgatgtgcaaagcaacttgatttttcatggtaggttaacaagacttctaagcaaatttcatccaggcaaaaaatgttgtaaattcttggaaattagtgttatgtacagattaatagacactagtttttactccagaaaagaaaccaccagcaacaataattggtctcaacccaaacaagcaaagcactgaatttgatgttaaccataaacaaaactccacagacaagatgtatacttcaaattttctcttaaatcaacatgtggcataagaaccacagttcttgatccacttcagtggtatacaacatatccagtgtggaaaatctcatgaatactggtacatggcatttactttgctttttatataagcctgcacacacacgagagtcctaggaccacacaaggacaacttaagatttgtaacgtgagctcagatttgactagcgctagttcatctagcccgtgtgattttacaaactcggtaagaaaattaaactatataactccagtttggacaaagacaccaaaccaactcatcatagttgattttcctggttggtaacttccctccttgatcctctcttgcttatcgtgcataccatacaggcatacacagcttccatgcaaagtacatgccatgtgcaaaaatgccatcctaatgtttgcaacagttgctttgtatgaatcaatacaaaatagtactcttactgtgacactgcaaagcttatttttaactgaaattcctttccttgcagggtgaagagccagctgaaacgattggcacggcccatgtattcgaatccccctattcatggtgctaggatagttgccaacgttgttggggatccaaccatgtttggtgaatggaaacaggagatggaagaaatggcagggcgtatcaagaatgtaagacagaagctttatgatagtttgtctgcaaaggacgacagtggcaaggactggtctttcattctgaggcagataggcatgttctcctacacgggcttgaacaaaactcaggtgacatatgctttaaattttcacagataacacttccattcttctatcgactggtgatttctccatatataatgtgactgcaaacactgcaattcacacaatacactaagtattcttaatttgattcgtttgtatttgcagagtgataatatgaccgacaaatggcacatatacatgacaaaggatgggagaatttcgttggctggattgtccctggctaaatgcgagtacctagctgacgccatcatcgactccttccataacgttagctagacgaggattcaggtcactgctattgtggttaatccttcaatatgctgggatttttggttccttccagcttgagttcttagccaggattgtatatccggcgctacgtaatttggagataataatgaattttgtctgtgcaacaaactttgcatatgctttgtcgaatgtacactggcactatgttagaagcttgaaatatcgaattgaataataatgagactagcaataagccaaactaattccaattttacctggtctgcatggttcattcttttatgctcattgctgacaaacaaaactggcccaagccgtgccatataatgggtctggttagggagctttgtcagctgcagtttcttacagaattaaaagctccctaaacagtttttccagaattaaaagctctcctatatagtttagttttccattcagattataacttcagattttaagaagttatagttatagaatctaaattgctgtaaatgaattaagaagtcagaagccgaaaaactcataatattctcataagctagctgcttctcgaaattaattttaagcaaagtaagtaaacccaatatcactgaccagcctaccaagcactcaagcagtacacaagcgcatgggaagcccaaagctggcccagccgcgacgtgctgtcctagtcaacacgactttgacccgttccattcttctcttccatgtgacatgcgaggatttcacttgacaaaaaataaactgaagggaaaaatcgaggaaacagggaaaaaatgttgggctgtaaatacaacagtatgtgtgtgttttatgtgctggcccatctgctagagggcccatctagtcatgtatatgtaaataaggatagcaatacagagaaggtgaagcttccagagaaaattggctgccaaaaaacttcatggtatcagagccgaccggccggcggcaggcgacggttgaaccctagctggccggaggcgtggaggcttgagcagggtagagagtgcgcatcagcagcggcgcggaagagcggggccagcgcggcgcgtcgaggaggaagaagccgagcagctgcaggtgcggagctgctgctgctgcttggggctgagctcgcaggtgcatagctgctttgggctgaggcaagaaagaaagtgctggtaaacagctggtgttggtgctcctcaggaagaagtggctcttgctctgtagtggcggggtcacagcacagtgaagactttgcatctcttgtgggtgtgtgattggcaaggaaaccgaggtaaaagcacagctactgcttttgtgatattgactatttgagcaatctataggaagggaaaggtagaacagggggctcagatctgctagttgggtttctactggtttgcagtttcagaatttgcattatggcagaaaatcaaggaatagaacaagtgatgggtaaattggtggacatgctagcgaaaaaatttagtgaggcctcaactacaagcaatgcaattatccctcatactgaatcaatactgaagattgagttaatgcaaaacgaaatcaagttggagggtgtcaaaaattatttgagttggtcaaggagggcattactaatactaaaaacaaaggggttagaaggatatgtcacaggagaagtgaaggagcctgagaacacatcaagtgtagaatggaagacttggagcactaccaactctttagtggtggcatggttgttgacttcattaatcccagctattgctacaactgttgagactatctctagtgcgagggagatgtggaaaactcttactaaactatactcaggagaaggtaatgtgatgctaatggtggaggcacaagagaagataagtgctttgagacagggggagcgctctgtggcagaatatgtcgtagagttgaagagtttgtggtccgatttagatcattatgatcctcttggattagagcactctgattgcatagcaaaaatgaagaaatgggttgagcgtagaagggttattgagttcttgaagggtctaaatccagagttcgaaggaagaagagatgcaatgtttcaccaaaccactcttcctaccttagatgaggccattgcagctatggcacaggaggagcttaagaagaaagtattgcctagtgccgcaccatgttcaccaagtcccacctatgcaattgtacaaggtaaagagactagagagtgcttcaattgtggtgaaatgggacaccttatgcgtgattgtcatgctccacgcaagcctacttatgggagaggaagaggtgttgatagaggtggaacaagaggtggaagaggctatgctggtaggagcaatagaggaagaggttatggatatagaggtgattacaaggctaatgcagttactctagaagagggttcttccgggactacacctgacaatgttgccaactttgctcattctacttcaggtagttttaatcaagcatttatgtctatgaacacttctcattcaagttggatattagactcaggtgcatccaggcatgtcactggcatgagtggagaatttacatcatataaaccatattcatttgcacacaaagagaccattcaaactgctgatggcacatcatgtcaggttaagggggagggcatagtgcaatgtactccatccattactttgtcatcagtgttatatgtcccttcttttccagtgaatttaatttcaataagttctcttgttgataatatggattgtcgggtttcccttgatcgtgagaattgtttaattcaggagagaagaacagggaagaaacttgggattagtatcaggcgtgatggactttggtacttggacaaaagaaggacaaatgaggatgtgtgtgcactaatggcttcaacaagtaaagaagtgactgaggtattacttttgcattgtcgactaggacatatatcttttaaaattatgagtaaaatgttcccggtagagtttagtaaagtggataaacatatgctgatatgtgatgcatgtgagtatgggaagcatactagaacatcatatgtgagtagaggacttcgcagtattttgccctttatgctaatccactcagatgtgtggacgtcgcctgtggtttctatgagtggaatgaaatattttgtcacctttattgattgctattcccgcatgacatggttatatctcatgagacataaggatgaagtgcttaaatgcttccaaaacttttatgcatatattaaaaatcattttaatgctcgggttcagtttattagaactgataatggaggggagtatatgaatagtgaattcggtcactttctttctttagaaggaatattacatcagacttcttgtcctgatactcctccacagaatggagtggctgaaagaaaaaatcgccatcttttggagatagctcggtcactaatgtatactatgaatgtacctaaatttctatggagtgaggcagtaatgacggcagcttatctcatcaaccgcacaccatcaagaatacttggaatgaagacaccatatgagatgatatttgggaagaatgaatttgtggttccaccgagggtgtttggctgcacttgttttgttagagatcatagaccatctattggaaaacttgatcctcgagctgttaaatgcatctttataggctattcatccaaccagaaggggtataagtgttggagtccatcagaacggcggacatttgtaagtatggatgttacgtttagggaatctgttccattctatggtgagaaaacagatataagctctttatttgttgatcttgatgatttaactagaggtgaccatgatcaacaaaaggaaggtgaaatcttgggtctcaaggagaatgaacaatcaaagggaaagattatggttggtgaaattccatgtgctataggtgatcctgtacaagaacaagaatggagaaagccacatgaagaggaaaatcttcaagtttacacaaggagaatgagacttccaacaactcaacaagttgaagttgatgatcaagtatcagatgatcttactcatgtgcaagtgtcttcggagtcagggggagaacaaatagaaattagagaagaagaatcaaacttgccaattgccataagaaaggggatgagaagcaatgcaggcaaacctccacaaagatatggttttgaaattggagatgaaagtggtgatgagaatgatatagccaattatgtatcttacacttccttgtcatcgacatacaaggcctttgtggcatctctaaattcagctataattcctaaggattggaaagaggcaaagcaagacccaaggtggcatcaagcaatgctagatgaactagaagctcttgagaagaacaaaacatgggatcttgtatcctatcccaatggaaagaaagtggtaaactgtaagtgggtatatgcagtgaaacaaaatccggatggaaaagtggagaggtacaaagcaagacttgtggctaaggaatatagccagacatatggaattgattatgatgaaacgtttgcaccggttgcaaaaatgagtacggtaagaactataatatcttgtgcagttaactttgattggccattacatcaattggatgtcaagaatgcttttctacatggcgatcttcaagaggaggtatatatggaaattccacctggatttgctactttgcaaactaaaggtaaagtattgagattgaagaaatccttatatggtctcaaacagtcgccaagagcatggtttgatcgatttaggcgtgcaatgtgtgctatgggctataaacaatgtaatggagatcacacagttttctatcatcatagtggagatcatataaccattcttgctgtttatgttgatgatatgattatcactggaaatgattgctcggagataactaggctgaaacaaaatctaagcaaagaatttgaagttaaggacctaggccagttgaaatattttctgggtattgaaattgcaagatctcctagagggatagttctttcacagcggaaatatgcattggacttgctcagtgacacaggtatgcttggatgtcgcccagcctctacaccagttgatcaaaatcataagttatgtgcagagtctggaaatccagtgaataaggaaagataccaaaggctggttgggagactgatatatttatgtcatacacgacctgacataacttatgctgtcagtatggtgagtcgatatatgcatgatccaaggagtgggcatatggatgctgtctataggatcttgagatatttgaaaggaagcccaggtaaaggcctatggtttaagaaaaatggacacttggaggttgaaggctattgtgatgcagattgggcaagttgtcctgatgatagaagatcaacttcaggctattgtgtgtttgttggtggtaatctagtatcttggaggagcaagaagcaaccggtggtgtctcgctcaaccgctgaggcagaatatcgggcaatgtcagtgagtttaagtgagttgttatggctaaggaatcttctttctgagttgatgttgccggtggatactccaatgaaattgtggtgtgacaacaagtcagcaatcagcattgctaacaacccagttcaacatgatcgaacaaagcatgtggagttggatcgtttctttatcaaggaaaaactggatgagggagttttggaattagaatttgtaatgtctggtggacaagttgctgattgtttcacaaagggtttaggtgttaaaaagtgtaatagttcatgtgacaagatgggtatgatagatatctatcacccatcttgagagggagtgttgggctgtaaatacaacagtatgtgtgtgttttatgtgctggcccatctgctagagggcccatctagtcatgtatatgtaaataaggatagcaatacagagaaggtgaagcttccagagaaaattggctgccaaaaaacttcaaaaaaaagtcgtcctccatctcaaacacgtttggtgggtcagcgtagcaaagcagtacaaccactgggttcgtagaatcgcgtacgtacatcatgcggtgcacgtgaggagaggaggcagggccgctctcaagtcggcatcgccctttcaattatcacacccttacgtgtcgctgccttttctttattttttttctcaccaaaagctgatgatgaaacgatacctctcccctccctcctgtcctctcctttcgcacccatcaccaccaccatacaccccaatgacatgtgggccatggagttaacgccgggtcccaccacgctgcaaaggttgggggccaaaggtgagagaggaaaaaaaaaagcctctccaccttctgtcgcctcgggggagggtactgacaggtgggccctacggcccgcgtataccgacgggttgttgtgcagcatccgagaagagagatcacgaatattggaaattattttttttggcatcgaccccggattatgcgagtgctttaggggtaagggcggaattaatttggtgggtggagtgattaatgataaggacgcgcccggggggtggggcccacgctggggaaaccgccttgtgttgcaggccgccggaacggcaacacacagctgtcgtttaggcccaccacccaccccacttacgcggctcccacggcacctatttttttcttttttttctctcgaattttatataattattttatttgctccttcaaaataatttatgcccctatttttccaaataactcaaaagaaaaagaaggtatactctgcgatggcaagggcgtgaaattataccaaaaaaggagggcaggagcctaatattgacaataattgagccgcccatgtcggtcatcacccaaaccgggccactcagcggtgcagcgcggggcccacctcccctccgagtagaccccacaacaacatccatccgtccgtgtaaagcaattcctgcatccgacggcgctcgtgcggccacgcacaacaaaaagatctcctcccccaacacccgacaagcccagtgtttttcctttctttcataaaaataaaacaaattattttattttattttaataaaaaggaaactgaaccacgtcgtgtggcactcgtactcatccatctccgattataaaagacgcctcttagccaagcgtttctcccccattgtgttctctccccccacccttccaatcccaatctcttctcttcccctctcgttagggttaggtttttattttctctctctcgatttctctcttcgcttccacttcccaaaattctcgagtcaaacctcgtggcgttcggccatggcgacggcggcggtgctcggatcccacgacgccctcgacaaccggatgcatctgggggccttcgccgtgtccccggcgtcgaagccgaggcggaggcggcacagcaaggcggcgtcgccgccccccaaggtggcggcggtgagctcgccgccggtggttaagtcggcggcgagggtggcgtcgcctcctcccaaggctgcggcggcggcggcggtgcctcaggggcgtcgctcgccggtggcgaggaagcaagggtcgccgacgaaggagttgccgaagcagaggctcgtgatgggggagatccggatcctcaagcgcggcgaggagccgccggtttcctcgccgtcgcctgctccggttgcggcgcaggccgcggcggttgaccagcgggcgccccgtgttccggctgtggcgcaagccgcgccgactgaccagaaggcgcctcgccccgccagatcgaagcagcagcagcacacggccgctgtgccgacgaagatcaagtccgtcgccgacgcgccagtctacgccggcccggccttctcctcggcttcgcctgagccgagctccctccccttcccggccttcatccgtcgcgccgaggccgaggcgacccgcggcctccgctgcctcctccgcatcggcgagctcccttgacggcctctctcaccgccgtcttccccggagccgtgagccgtgcacgctcctctcctcgtttctcctcctcttctctgatggatggattgcttggtggtttcgatccgatcgaaagcttgtccggatcagatcccggctgcgttccgatcaaactctcccggtattttttcagaggacgagtttgggggaacgcatctgccggtggttggatttggtagtggttaggttttcaaaagtttcgtggtggaattatgttgggggtttgcttctacgaagaacaacactaggttgattagttctttgtcttttgagtttggtttttaggtggtgtcttggttgggaaaaattggggttagtttggtggaaatttaggctggcttggtgttgctgatctgttagtacagcagtagtggtaataatagtagaggtttggttagatgaataattcgtcggtagtgattgtgatttgtggtttggtgagcgtgagttcaatgtcaggtgaagaatagtagcactaaattcgtgttaggtattatgtccagtgtcaaaggcaagacatatatagttcttattatcagtaattaagttatgttaggtgttatctttctgttcgtctgtaagatatatatagatcttatcgggtaatcaaatcaactatgtatcagatcctcgcagtggtgaatttcattcaacacatcagtggatgtttggttatcttcttttttttctcatgctgattagctgtggatttgtgttcttactttgtgcaagtaataagtagactacccttggattctcaacgaggttgcttcacaatcatcatatgcataccaagatttaattaagaactgccacttgttatacccgcagtttccgcttaagttccgctgtgtatttgttcttattcggatgataaactttgcttgttgatgtggtaatcgccaaattgcttaaattagtttgtgtacgcaaccgggtaggcggattgctggcgtctaatctaatatttcaacttgcaaattgaggtgcatcttgctttaatccaagtcctcttgctgaacaatttgctcagtatgatcgatcccagtagtagaggtgattatccccacctgatgttttgggtacgtttcagatgggttggggcgatataggttctcattgcgtatttgcaaacgataaataatttgtaattaaaacttctaaataatttgtaattaaaaatttatatacgtcgtcttagttttagcgatctaaaaatagaaaataaatttagataaaaaaaaccttaaaatcaactttaaccataaacttaaaatcaacttttaacctaaaatttaaattttggctgctaatcataaacggaaagttggtgctgataatttctgagagttcaatacgaaattgatcgctcaacttgatagggtcaggtcggcgacccaccggaagccgctggtagttgagatagctgaggtcaatctctctcctggcagcgtgtggtggcagactcgcccgaggcatggccaggaagctgcatagcctacgtcgtttcgacgtggcactcgccctcgcacgcgatgcagccacagcctcttgagtttcggagccacacaagcgatgagccgatgagcatgtgagagctgatgagttaaatttgactccgttcctattactgccaaaaacaaccttaccaaaaatttgtgaatgtcaaattttaattaagttggcagaattaccaaatttagtaggatggaattatgttgtgccaaaaaattttatatgttaccaatactagtatttaagtaacaaactaaatgtatctatatatttaaattttatcaaacaatgatatgatttaaaatgaaaccaatctaaaccggccctttacctaaagttgggtctactttgacggagttcttctgcacacggtaaaatacggtggcttcaagccttggacgtgtaccagccaactactagtccaaccacgactgacggcacacggcacggcatggatccgtgctttggtcaaaaagccgagtcaacgcccaagacaaa

SEQ ID NO: 4184 - DNA, 684 bp, Oryza sativa
ctattatcataataatggagtgtgattttttttatcaattcagtttgcttacttggtttatcattgccttgtttggtttttctacttagtttgagaggactgaaagtttttaatagcttctttgggttttaggctcaacaaagcttagcaaaaacttttaagaaatcaaaaactttgcaagaatcatcaagcacagcataaatacaccagtattgtacaaattgagcctccatgtattacatccaaactcagtcagagtcagtcctttcatcatcagagtcatcattactcggctggaggtcgttgttgcgaaattgctccacaacatcactcgctattttgtcagccgcagtttgcgcactactgataagatcaagggcagcttcttcacttgtcccgtctgcaaatccatcaatggtgtcgacttcaattctcgggtacaaagattttgtcatcgccaaggccatgccagctcccatacttccagctttcttgatatttttgaaatatacttccggagcaacactcagcttgtcaaatatttcggttgcgtcgagtgcactcggaccaccgttattgaggaacatggcttggataattggtgcagcggcattggcgacatcatcccttgctccttcaagcctcttgatcttaccaaccaggacgtcaaactgagcttgagat

SEQ ID NO: 4185 - DNA, 10040 bp, Oryza sativa
aaagtaggcaatttgataggatgtcttatgttgtatgtaatagatagagtggttacacaagttaactatttcggattatccggcaaatggcctaacagataatccgataaaaaaatgttggataatccgcacccgtcggattttagaggtactacatccgcatcaaactttatccacatccgctagatttctataaacccatactatatatatcctcattttggatggattccaagcggaccggattggatatatattatccgattcgctttcaccccctaatgctttattgccaaagttttaatttggaccacccctatattactttagactaggtaatatgccattgttgtaatttgagccacaccaaaccactttgttcagcgctataacgacctcgaacacgttgactctagcacactgatgaacgctcccatgcatgcacatgtgttgatggttcttaaatcataatatcgaaccgtcaatgcctacatataatgaaatgaaatatgatatccaacttagtagtagggattattactaatcattttcactagtgttggtaaaatatgtgtatgccggtattttctgaagaaaacacacccgtcatgcgataaaatacacctctggacaatcaggacgcgattgcgcagattggatggctcacatgtcaaacaaaaccacctagaattgtgccgaaccaaggtacaacatgttgggagcccaccaggcagccccctgccaaaggagtggtcaggaggcggcccagaagttcggtcgaacaccaaggttggccgaatcgacatcggcgcctctcgccatctgcttccacgtatacgctcctgatggcaccccaatgacggttacatcgggttccacgacagttactgccattacaaccatcatatggccctataaaaggagcacaagtcactctcaacacacacacacaaatacaactatttggagtacactcttcttcctatctagacttagttacttcttcttactagaaaataggtagagagtgaggggaaactgtagaggagtgcccgaaagtttggcactctctccgactttgcagctttctaggaggaattctggagaagtacaggagctgtcggtacactctactccgggttcggagaaacttcttctataaagttaatatttgggatcctttcttatgtaatttaattatttagtccaaatgagatagatttccatctttgcgggtttattgtttagtattcgtactaagtgttctagtactaggactttagggcctgttcactttgatgccaaaaaaaaccttaccaaaatttggcattgccaaaattttggcatagacttaccaaaattttggcaggatttcttatatagttaccaaaatttggcagcaaactaaatgtagccacttttttggtaactttaccaaaatttggtaaggttgaaaatggcatcaaagtgaacaagcccttatataaacaaggaaattcctgcgcaagtattagagtagtaattagtaacttaggcatggtgtctagattagagattacctttgtttgttgtgtatcctacgaatttgtcagaggtagacaacaggtggtgatagccctgaatctcgtcctagcaatcctccacgttcggatacatcatagagctatagccggaaccacactggcagatccgcaagggtcaatgcctgaagcaacatataggaaattacctttaacttagcttagataaataaaacacataaaagtcctctctaaactagctagcctaccaatagttgttgttcttggatatagtctagattacacatccctgagttcgatatccttttggggtcacccgaaggtgaaggtcgtaagaaataccaacaacatacaatacttttgatgaaagagcagtgagacatggcttaaagaaaacagagttgggacaaatcaaatggcaacaaatgtaaagttggcaccaaattgagaaggtaagccataggatagtccaaattaaatgaagctttagcgataaaagttggcccaaacaaccattcactcaatcactaataccctggcccacctcattatctcacagagcttctatgagcccatactacagatcgatagcccgcttcttctctcttcccctccaactcaacacaaacctaatgtggcaacgcttatagcatgtttataccatcttattatacttacttgctctaatggtggcaacgtcgaactaggttgctggtgaatatggtgagaatctcaaggtagaaaaaaatacattatgcgaatcgtatggctatatggggagcaattttgattctacgtggggaacttctagtagctgcatcttaaatagttaagatacacacctagattctatgaagttgtaaatatagaagccagaaaatgaattggaagtttgaaactaggaaactcactttctggatcctcggaagttggctaccaaccaattgtttctcggaattgtagcttctccaaacttgtaaatgtatacaaagattccagatggtttattaagcttggtcagggtttttccaaagaaaaacaagctcctatcactgttggggaagtggttttcagtcccggtttgcaacccctttagtcccgagttgcaaaccgggaccccaaatccaggactaaagatgggtatctttagtcccggttaaaataaccgagactaaagatccatctttagtccctccattggtgttaccaaccaggaaagtttttttttctttttttcattgtttttagctgcttgcatattgtttttttttcatagtttttcttcaacgtgacagatcgaatgcaacaacatcaaaattatttttccaacaccacaggtcgaatagaacaacatcaaaattaacatcacaaatcaaatacaacaacaaaatcatccacaaaatctacgacaaacatctaaaaaatctacaacaaaatcatccacatttttttctttattctcttctctccttgctcttgcttctcatcctcctcgccggcggcaatgggagagaggaggagggggttcggcggctcggcgagccgtgcgccgccgcctcgggcgccagccacccaccgcccactcctgccgcccgccgtcgccatcatctctgccgacggagaggggaaggggaggaggggaagcaagcaaagcaagccgggaggaggagtggaggaagagctacgaaggaataaggaagaggaggaggcgtgcgaaggagtcaaagagataagatgaggcaggaaggcgtgcggcttggcgtgattttttttttatgttttgtcccggttggtataactaaccaggactaaagataatggagacctgacacgctacatcttatagcctgacgtcttttttaaccaggatcctatttgaaccaggattaatgtggtttctacatgacccacgaaagatcagttttccagtagtatataagcaagtgcaactttatattagaagtaactttatactaacgggatatcaaagaaatcttccttgcttaatattagttgtaccgatcacttctccacactactacacaagcgatttttgcgtgcagctaatttgatttttgcgtgcgggtgggcggcccgcacgcagcttcgggtctaggaaaatcacaattttcgcgtgcgggtgcctcacccgcatgagaaaataaaaaattgaaacaaaaaaaagaaaaagaaaaccctaactctaatccgccgccgccgctatcgatccgccacccgctaccgtcaccggtgccagatccgtagtcgctggccgaagacgccgggaagggagccgagggagagggaggggaggagaataaactcacccgacgccggccggccgccgctgatgccaccacacctccagatccgcctccgtcccaccgccgccgaatccgcaaggggaggtaggggaggggccgcgcgtcgtcgtggtcacttgccgccgccactgtcgccgcccttctccccgcccgcagccgagggagaacgagggggagggaggggccgccgccgccggatccgctgctcacatgtcgcgcgccgtcgccgctgtcgccgcctgtctccccgcccgcagccaagggagagggaggggtcgctgctgccgcacccatgccgcgcgcctccggatccacgcgccgccgtggtcgcccaccgccgccgctgtcgccgcccttctccccgcccacaaccgagggagagcgagggagagggagggaggggccgccgctggctagccgggagaggagaggagtgggaggagagtggagtgggagagagccagagagggagagagtgaggtgagagagaaggcagtgggtggaggggcgcgcgcgcgaggatatcagcggattggctattttcgtgtgcgggtctattaggtgacccgcacacgaaaatgattttcctatgcgggcgatggactgcgccggtttctctatttttctgtgcagtttcacttacggaccgcacgaaaacaaaatgagggggcgtccaggaaaatcaatgatgtagtaatgccagtacatataagggcatgatcgactgcatagaccaatgtagttggtccatgaaggccagtggaccatatatgaccatgtaacccatgtttgagacatttgccagctgccaagagcccaagactgcttgtggccacgtacgtggcttgtgtaaaactctcgatggtatctctataatgctattgttaaacctgtatttctcagatatcgccataaaatatgagtgatactaatcctataagatatatcctcgatgatacaaagtgtgaactcttaaggctgcatgtatggtacaaccataaaatttaatgaaaaccatgatattacaatatgtttggcagagctctctagatctatccatggtatatttgatgtttatatgttaaattatagtggtttaaaattttaaatttcatctaaaataaaaataattgatttattcaaatgttatatatgtaatcatagatccagatagatggatttgtggagctaggaatactcagctccattaaatcttggatatgaaggtgtgccaaagaaggcctatatctcaattatgtctactacgtgagtgtggttgaggtcgcgtaaacatgtgagacctagtaagcgattggaccggggctcatcggtgattgtttaacttgccgaagaaaaagatgaatctgatctccatcgtcacagctcgaatcaattggtggctttctccgggcttccggatccttttagggtgcgatcgtttcagcttttcatgattagattctccttattttcagttagcatgttttttaaactgctaaacggtatatttcgtgcaaaaactttctataaaaatattgttaaaaaatccaacaaatttattcattaaaaaaattatatattaatacttaattaattatatgttaattgtatttttcgttttacgtgcagctaacagtccaccggcaccgctgaaacgatcgcacccaagcggctctcttgcagtcaaactcgcgcgagagggaaatccaaggcccgcgcgcacaccccctgggctagtgggctggaaccaaggagagctctcggcccggtgtgtgatctgggccggcctgcctatgcccaccacttgccactggttaattaaccggaaaaagtacaccgaagatccctcaacttgtccaaccgagttgcaaaatcgtccttaaaccgtaaaaccggatacaatgtatccctcaacttacaaaaccagtgcaaactaggtccctcggtggttttgacttcggttttgtcctatgtgacagctgactcagtgtggaacccacgtgggctctacacatcagcctcttcttcccctcctctcttcacctctcttcctctctcctctcctctccacggtgcgacgggctcgaccggcgagggaggagctatacgtcggcggcacaaagcttgaccggcgtcgcaaagagaggggtcggagccatgctagccatgggaggactgaggaacacgatggctgccatagagactcgccgccgccccgtccatatcctcttcgttctgccacctctgcctcagcctaagtcgagttgtcgagttcccccagcttccaaacccttcgctctatcgccgctgtgtgaagggatgcagccgtcgtcactgctcttcccctccactcccctccctctctgccttgagttcgacgtggagcgccgtttccatccaagtcgccacctaggtgccacaagcccgacacggagcgtcgcatccatcagcatgttgtcatcatcgtcgtcgtcattgccgccacatccatccatctctctctcgccaccatcatccgcccgcacccatctcgctctccgaaatcacactatacatgtcgttggtgagggcagcgtcacctcaccacccgtgggcctccttcactcctgccgctcctacctctctccgctggcagtcgccgtcgccggtgagctcacaggagctcggggcgtctggcggtggtggcttgctgtggcggcgttggcatggggagggccatgaagcggcgcaactcgcggttcttccgctggctggagttgtagctggcgtggggagtccccttctcccccgtcgccaccgccagacctcctcctctgccgcctcgccccgctgacctcctccccatccggcggcctgccacgctcagcttcttcctcgccggtcgccgcccatggagaggggaggagagagaggaagagaggtggagagggagaagggaagaagaggccgacgcgtgcagggccggtcctgagttttcagggcccggtgtgaaactaaacgtaggagtttttaacattactactatataataataatcaataggacattgtttatgttacctaaaaaatttcttctaacgaagtcattgataagggtaccaatatcaatttcatccaaaaattcctcgatgacatggcctaataattgaaaaaaacaatattattatagtggcttaactcataaaaattacactataaaattacaaatctaaatttaaaatcttaccaattggttgatcgcaagcgtttaaaagcaggggctgcggcgtgttcacacttcagaaataattcacgctgcatatacattcgacgaaggagagatgaggacgattcgatatttcgatggatcaaacagaagccatcattcaatcaaacaaggcaacaagttagctaacttgataatacacagaatgagtgatgagtgactagttgactacctgcttgttagttgttctgttcgcagggctccctgcctccctggggattacgtcaagcgccgtaccacgaatctagccgacgactcgctctggcctgttaatacatcgccttacgccgtacatgcccagccactggcgccaccgcgacgccgcgacggccgacgggcgttaggcacagcaggtggcgccgcggcggcacgacgggagcagcagcagagcgggctgctggtgcggcaactggcggcctggcgcgacgggtgacggctgagggctgagggcatgtacaatggttgtcaataatggtctcttagcattactaattaggaatacttgttaacatggtagaaagagaaagagtagagacaaaacatcgttgttatgcttaacaacgactattaatcactataatatggaccccgcaaaaaaaatcactataatatggaaatatggttgcatgaggataaagaaatggaaagaatattaacaaaaggaatattttttgagttaatgattagagcctttgtcgtctcaactattggaaagacacgtctctaaataatcttttattgtttaagagatcatactcgtctctatcaatgaacattccctgagaggtgcgacactgtgacgagtgcggcggcaatcacgcattcacgcgtttctttctttctcttctgtttctgatcgcgattcacgcgtttgccgcttcgccttccgcatggatgctttgccttctgttcttgggccaggcctcacgcctgggtacaggagaggtgggaggggggctgggggccatgagattttgggggcccagagcggctgcaccgctcgcccccctctaggtctggccctggacgcgtgggtcttacgctgacacagccgccatgtcggacaaaaccgaggtaaaacccaccgaatgacctcaaatgaatggtttttgtaagttgagggatatcatatatctggttttgcggttgggagacgattttgtaacttgatgacaagttgagggaccttcgatgtacattttcctaattaacctagtccgcgtcgcatgcttgaccctttgagctggcatgtccggtagagactgacggcatggtcagatttatattattttaaaccatatcattatttgttaaaattgataatcatatgactacatttagtttgttgtcaaatattggtaaatctatgtaattttagtaacattatattgagcctattctatcacaatttgacaatgttgttaatttgctaaaattttgatattgccaaattttaaaaatatttattttggcattaatctgaagagaccctgagaccgacgtagagctttgcatattattgagggagagatttggcttctgccgctttttaattccttgcaactagtggtttcttgggagtatatctagaggaattttcgtgcaattgttgggagacgccaagaagcttggctaggcgaaggtgaacgttgttgatggctcgtacgttccgtcatgaaacgggcgaagctgcaggctggtattggaggagctgtcatttgtgctttcttcttgacgagcagtccagtgtggagcaatagcagaggccctcacatcgcgtgcatgttgggagggctcggcgccagccagcgtccgaatggactagagaaatgcctgtgtgtttattgcatcaaactgctcgatagtgcttcatttgcttgctacaacacaggaaaaccgatccaggtggtgcggtgctatagcagaaaaccaaatatcattgccaaattggaagagggtgtgataaagtttgctcgtgagttggctaattttgttagctacaaagatttaggttgtgtacagtgtgagagatttcagcctatatggtatttgacagaaaacacattataaatcatgtaaattctagaacgttggattgttttaagattcgtgcaattatacctctaaccctcacggcctcacccgtcctctctcctctcgtcattcctagcaccccgccatttgcgagtcgtgagctagcatgtgtctacgcgatgctttcaccgcccggtctcgctggctagatggaaggagtcaacggcaccggtgaggcccctcgcctgcttcttccccgtccctttttctcttccacaagccggtggcaggatcccgtcgtcttctccatcttcagtggttgcacgccagcggatctacctcctaaccacaagcttcgattcgcctccactgccaatgttggtcgaccgctctcctgcatcccagtggctctgactgttggaattaatgaatgggccttagcccactcgaagattaattctttggaaaatcacaaaaagcccacctcatgggatggcatgcatgtggagtttagtaccaccttgcttattctaggagagggggacctccttaaaagggaggatgccctcctagccacttgaaacatgtgtggtggagagaagaggggaaacacacgtgcgcgctcgctcgcctggcctggcagggcagggcagggcaggcggcgcgcgtgcacgacgtacgcgtcgaatggtccgaaaaattggctcctcacccttgcgcagatgcagcctccttttgcagttttgtttgctgcaaattcggattcgtttttgttttggaaacgttccgaaaaatccggtgcgtgcaaacggcgtggagtccgataagttacgcgcgacttatccggttcggttacgcgcagtagagggccggcagg

SEQ ID NO: 4186 - DNA, 6347 bp, Oryza sativa
atgtttcgtgccttcgtagacacctgcgaaaagtttcgaccaagcagccggtcttttcgtcacctcggtacgtgttcaatatgttgcgcatatttgatctgttcatgttattctgcgtagtttacatgtgtagatctaatgatgcgttcatgctagttttcatctgtaatgtcatgatttatttatggaataaattaaatcattatatgcccataatctcaacaatccaaaaaccttattataggcactgtgattttactatggctggttttgccgatgcactgaggccggataaattcaccggtgtgcattttaagagatggcagatcagggtcactctgtggctgacagctatgaaatgcttctgggtgagtactggcaaacctgaaggagttcttactgctgaacagcagaagcaattcgaggaagccactactctctttgtgggatgcattcttagcgttcttggcgatcgtctggtcgaggtgtatatgcatatgaccgacgctaaggagttgtgggatgcactgaatactaaattcggtgctactgatgctagcaatgatctgtatatcatggagcagtttcatgactacaagatggctgacaaccgttctgtagtcgaacaggctcatgagatacaaaccatggctaaggaactcgaactccttaagtgtgtcttacccgacaaatttgtggctgggtgcattattgcgaaactacctccatcttggagaagtttcggtactgcactcaaacacaagagacaggaatactccgttgaggggttgatagcgtctcttgatgttgaggagaaagctcgggaaaaagatgccgcgtctaagggcgatggtgggcagtccagcgccaatgttgtgcacaaggcccagaacaagagcaaggggaaatacaaagctcagcagaccaccaacttcaagaagcagaagaagaacaacaacaatcctaatcaggatgagaggacttgctttgtgtgtggccaagttggtcatctggctaggaagtgtccacagcgcaaggggatgaaggcacctgcagggcagacttctaagtctgctaatgtgaccattggcaacactggagatggaagcgggtatggtaatttacctactgttttttcagttaatcaatctactaattggtgggttgatactggggccaatgtacatgtttgtgctgacatctcattgttttcttcttatcaggtcgcacggggttccaccgtcctaatggggaatgggtcacatgcttctgttcatggtgttggcacggtagatctgaagtttacttcgggaaagatcgtgcagctgaagaacgtgcagcatgtcccttctatcgacaggaatcttgttagtggctcccgtctgactagagacggatttaagttggtttttgagtctaataaagtagtcgtgtctaaacatggatattttattggtaaaggttatgagtgcggaggcctgttccgcttttccctttctgatttctgcaataagtctgtgaaccatatttgtggcagtgtggatgatgaggctaatgtttggcattcacgtttatgtcatattaattttggcttgatgtctcggctttccagcatgtgtttaattcctaagttttccattgtcaaaggttctaagtgccatagttgtgtgcaatcgaagcaacctcgcaagcctcacaaggctgccgaggagagaaacttggcaccactagaactcctacattcagatctttgtgaaatgaatggggtgttgacgaagggtggaaaacgatatttcatgacattcattgatgatgctactagattttgctatgtgtacttgttgaaaacgaaagacgaggctctagactattttaaaatttataaggcagaagttgaaaatcaacttgacagaaagataaaaaggcttaggtctgatcgtggtggagagtttttctcgaacgagtttgacttattctgtaaggaacatggcatcatacatgagaggacgcctccctattctcccgagtctaatgggattgctgaaaggaagaaccgcacactgactgacttggtgaatgccatgttggacaccgcgggactgcctaaggcatggtggggggaggcattgttgacctcaaatcatgtgttaaacagagttcctaacagaaataaggacaaaacaccatatgagatatggattggtagaaaaccatcactttcttatttgcgcacatgggggtgcttggcgaaagtcaatgtaccaataacgaagaagcgcaaacttggacctaagactgtggactgtgtctttctgggatatgctcatcatagcattgcctatagatttttaatagttaaatccgaggtactggacatgcatgttggtacaattatggagtctcgtgatgctaccttctttgagagctttttcccaatgaaggatacacatagtggttcgaaccaaccctctgaaataattcccagttcaatcacaccaccagaacaaattgaacatacacatgaacttgtctctgaggaggatgtcagtgaagctcctcgaaggagtaagagacaaaggacggctaagtcttttggtgatgattttactgtgtacctcgtggatgacactcctaagtcaatttcagaagcatatgcatctcctgatgcagactactggaaggaggctgtccgtagtgaaatggattccattatcgctaacgggacttgggaggtgacagagcaaccctatgggtgtaaacctgtggggtgcaagtgggtgttcaagaagaagcttaggcctgacggtactattgaaaagtacaaggctcggcttgttgctaagggctatactcagaaagaaggcgaagatttctttgacacttactcacctgttgctagattgaccacaattcgtgtgctactttccctagcagcctcacatggtcttctcgttcatcaaatggacgttaagacagcttttcttaatggagagctggatgaggagatctatatggatcaacctgatgggtttgtagttgaaggtcaagaaggcaaagtgtgcaaattgttgaagtctttgtatggtctgaaacaagctcctaagcaatggcatgagaaatttgacaaaacattgacatctgcaggctttggagtcaatgaggcgaataaatgtgtgtactatcgccatggtgggggtgagggagttattttgtgcttgtatgttgacgacatactgatatttgggacaaaccttgaggtgataaatgaggttaaatcattcttgtctcaaaattttgatatgaaagatttgggagtagctgatgttatcttaaacattaagctaattagaggtgagaataggattacactcttgcagtcccattatgtggagaagatcttgaatcgctttggctacattgatagtaagccttctccaacaccttatgatcttagcttgttgcttcgcaagaacaagagaattgctatgaatcaactggaatactcccaaatcattggctcgttgatgtacctggctagtgcaactaggcctgatatctcctttgctgagaacaagttgagccgatttacctctaatccgggagatgatcactggcgtgcgcttgagcgagtaatgcgctatctgaaaggtactgtggaattggggcttcactatactgggtatcctgcggtactggaaggtatagtgattctaactggatctctgatgtggatgagatcaaagccactagtggatatgttttcacactgggtggtggtgctgtttcatggagggcttgcaaacagacaattttgacgaggtcaaccatggaagcagagctaacggcactggatactgctactgttgaggcagaatggctgcgtgatctattaatggatctgcctattgttgaaaaaccggtgccggctatccttatgaactgtgacaatcaaacggtaattgtcaaagtgaatagttctaaggataatatgaaatcgtctagacatgtgaaaagacgattgaagtctatcaggaaattaagaaactccggagttataacgttggattacatccaaacagcgagaaacctggcagatcccttcacgaagggactatcacgaaatgtgatagacaatgcatcgaaggagatgggtttgagacccatgtgagttatactatggtggtaacctagtctatgtgatcggagatcccgtgaattagatcctgggaagaacaaaccattaataaactataggagagtaccaatatatataccctctccaagtgaagatgcatatactctcgtgagctgcaaggcaggttggctatgccttaatgagttctgttggctttaattagcaaagatgttgtcctgcagagcattcttgaaagaactcacctttgtgagcttgactgttggtcgcagtctatgaagattttgggtgaatcttctaggaagcttactaaagacctaggagtatgacttatacgctccacccgaggggtagtctacagacggtctagtaccagataagactttgagtgaaacttgcttgcacaagacttgcaattcaaggcgtagtccattgttcaagttgtgagtaagtgtagcttggagttctaggtggatgttcaaccttaattggtctccatcgaaccgctggtatataaacagtacattggaaaaggcaaatctcagtgggattttgagatttggtgggggattgttggaattaatgaatgggccttagcccactcgaagatcaattctttggaaaatcacaaaaagcccacctcatgggatggcatgcatgtggagtttagtaccaccttgcttattctaggagagggggacctccttaaaagggaggatgccctcctagccacttgaagcatgtgtggtggagagaagaggggaaacacgcgcgcgctcgctcgcctcgcctggcctggcagggcagggcaggcggcgcgcgtgcacgacgtacgcgtcgaatggtccgaaaaattggctcctcacccttgcgcagatgcagcctccttttgcagttttgttttgctgcaaattcggattcgtttttgttttggaaacgttccgaaaaatccggtgcgtgcaaacggcgtggagtccggataagttacgcgcgacttatccggttcggttacgcgcagtagagatcgtgcgggcgccctgatcaagcgacccttctctatataaaccgacccgccgtcttcacgcaggatatgcgaaaatcaatctagggtttacctcctactctgtactgcgccgtcgctcgtagactactccatcccgctcgccggcgtgcaccagcgatcgggagagcaggtctccggaacctctgcctttgacgtcctgcactgggagaaggcggcaataaggtttttgggaagtgcttcgtgcgactgctccctgttcgttcgcgacgactcgccttcctcttcgctcgcatgtttcgtgccttcgtagacacctgcgaaaagtttcgaccaagcagccggtcttttcgtcacctcggtacgtgttcaatatgttgcgcatatttgatctgttcatgttattctgcgtagtttacatgtgtagatctaatgatgcgttcatgctagttttcatctgtaatgtcatgatttatttatggaataaattaaatcattatatgcccataatctcaacactgagatcgcctcccgcctatgcccacaatccaccgccaggaggctgtctcccaaaccatccctctaagtcccccctcccacccctacccctcgagccaccgccagtcgctatcgagcttgaggagaactgatcgccgaagttgaaagagaaaaagctaagtggccgaagcacgaatataatcataacgtgaatcctaaggttagaaacttacaaaagattttgatctcaatttctattaatagccatttagcggttccgtttttatgatcgagaacagttgtaatcattgccaactcaatttctcttccaggcaacattcaatgaccggatttggttcctgtgcagtccttactatgactgcaacttaggcagttataccataactgtaggatgcaaatccaaaggcccaaatttgataggacactgttcattcaaataatccaacaaaaaatattatatcaaggctattgtagcatttaatttagaccttccattgaaaaatcgaatggataaaatcttgtgcagttcctaacgtgcagttatagttgggactacacctgatcccaatcctcaatgaccactagtcaagactcaagagagcaccagcagctcaccactactcctactacaacccgtacgatcataaccagtca

SEQ ID NO: 4187 - DNA, 1484 bp, Oryza sativa
ttccctaaaccctagtattaacgaataggagtagtaaatgaacagacgcgtgtgcctcatgatttctcctcatgcgtgctatggagtacggaggacagtgcacatgcatgagcatgatagtaccctttttagggcgacctggtcctgaaggggaacacagccccacggctgttctggttcaagtacaccaagggaccatgctttgcatgcttgcagctcctccatgcccctacccagatccacaacaataaattccagtgaaactgttcgcaacaaccagagagagagagatggatgttaactccactagaattgatgtagatggaaacagaattccacatcatgtgctgctagtgaaaaatgcaacaacttcacaaggaaaattcaaggtatctgaattctgaacaggttcttgaaggaaaaacaacctgatccctacagtaacatattgtgactgcctcttatcaaccaggaaggtatatgtattctagtactaaaaatcaatgatgccacatcgcttttgctgaaagggcccatgtaaaaatttctaaggccaaatagaagtacaccacatgtacagcacaaagtaaaaccactctagcacttggccatattctattccatctaacggtgagagtactgtccatgctttcaggactccaagcttaaatatgcagttcttaatcatggccctaacatgcttccatggtaaaaaaaaattgataccaattaagtagtacaaggagagggggttttaactatttgccacttttagatttggcaaataactatttgccacccctatctcaatgacatccgtggctctgttctccaaacaaagtgctccatataatcctatcagttcttgttcattcagactatcagagagcaagctgcaagcatacacagttaaattcacccattcccatgacttataggcaagcacaatagtcataactcatgatagcaagctaacagaaaaaggctatctaacatgttaagagcggagcagaatctgagggtcctgcgaaaatgacaattttacatagcgaactgatgaagcttgagtcacctaagcttccttgccttccttgagctgtacaaccatcaaatgctctaaaaaatgaccgccttccatgatactacttttctagcctgaaccattgaggtgatccagggtttctgcgacatgcctcatagagggccttcgctctggattggcctgaacgcaagcgagagcaactttcagtgctgcgatcatctcatcttcccgttcagagtctctggcgagagaaggatcgagcacatcggcagatggtttcttttcttcaatacagaactgcacccattgcacaaggtccatctgcatagtctccaagagaacaaccggcgatctgccggtgatctttccagcaagatcacaccataggagtatacatcccatttctgagatggtttcagtgttttcagtgcttctggtgctt

SEQ ID NO: 4188 - DNA, 2126 bp, Oryza sativa
ttcctgcagcccttctaactaggcagattaagtatccatttccaagtttggaggattgtgacgttgaacagaaccacatcctattagaaaaaaatagcattatttataacaccaaattagtttagttaaatctaatattaaatatattttgataatatgtttgttttttttgtggggataatgtgtttgtttttttattgaaaactagaaaggtagcccgcgcgaatgcgtgtgcatacatcttaagttgaattagaaactatttgggaaaaatatcaattgatttattcgtgttgcgataaaaaatatgattgtcggtccactcttcgaagatgctcataggggtagggtttgcgtttgtgtgttcatagggatgagtatgcgtgctttgtgattgtctgtgttgtactatataattctaaaaaaaatgatttcctgacaacattcttcaccgatattgcttaaattttcttccaaattatttgttttctctatattatataatatttaatttatccctataagcttaatcaaatttaaaagaagaatatatgcttagcttgttttcaaaacaggtttcacaaattaagtataaattaaaatcaaggtgttttttataattgatttattaggggctttattttctaacaaatcttaaaaccattattgtttaatagacatgttttatttgtacaatcaagctattgccctctatttggttcgtgcatgcttacaacatacttaagcactaaaaaattatgcaatgtttatggtaatgggtattctagtttaagtgaaagctaagaacctattgttctctaagaatattctaagtttttctgtaattagttcacttttctcccttttgtattttttattttattttatacaatcttatttttaagttcatattttgtgagataacaaaatagtgatagagcgttacaccttatttgtcaaccatattaaaaaaacgaatatatttttaataaatatctaagactaaaataggttgatggattaggatgattcaagactgttaaatacacatacttgtagagtccaatttatattgcacagtgtaggagacaacccatatatgattattttttgcacgtatgcgaagctctacatagcttagcaagaacatgaatataactatgaaggcattattattttttcaatatgattttttatgattgtttccatgattaaattttatatgaatttataattaaatatttatatgaatttataattaaatattagaaattatgtacttgaagccaacctctctacaaatattttgtttagctagactacagtggacataaattaagtacaatgagattatataatcatacatatgatgcttataatgcctatccacttgtcacaattatcactgttttcattctacattagttagaaaccatagtttgtacatagctaatttttatcggtttaagtcattggattatttatagtttatagttaaagacccatattaactatattttgactttaaaagaaatatgttattttgaattttattgtgaattttttatatcatttaaaaatattaaaaatatgaaaaaaaatgatatagattttaccggctgaaaaattacatgtcaaatatcaactgccatattgtattatgcactaaaatatagccaacataagtcatgaatgtaaaatcacaacaaaataaacgataattacatattttcttttaatcaaaggaatgataaaacatactgtcaacgggggatacccgtagaccggatatagagagtattggggtatgctggtacgaggatctatgtagtacgacatcaagcaaacaagaaacatggttatactggttcaggccccttggtaggtaatagctctaatccagttaatatgggattatatgatggaaatcacagattacaaaaggaatagtggaactcgatgataccgacgagatcgtagtcgagttgattcaactagatcacccgacgacttggctcttgtaggctccggcttcgtaggctatggtggttgtcttggctatgagatttgatgcctttaggtcctcccggggggtcccttttataccgcaggtcagttggtctccc

SEQ ID NO: 4189 - DNA, 2028 bp, Oryza sativa
aaccggtccttaattgtcatgagcacgaccatcaaaaccatgtgctcacaacccaccattatcaagttttaattggcaaattaattaattaactaatcacgattaaccatcatgagctatcattaagtcatcattaaataatagtgaatcataagttatcccaattatatgagctagtgtctctaagcatggctaagcatcctattcactttagctaaaaccatataatgttctagctaatccaattattaaccaagtgacaaggaatagataatcaacatcaaagggctataacaaaggcaattggttattcccacccaatgacattcaaaaataaatgcagtagttgaatagaaacaatagctttaaacgggatcaacatgctcaaagggttgtttgggatctgtgtgacttgccttgctggccttggaactcttcaaattcttctcctgcaaaatcggactttccgggaacgtcggaatctaagtataaaagagcaaaatcaccaaaacagcacataaacaatcatgaatagtacatgtggatatttttaacatgtagatctcaattttagaaaaatttagagacttgaaccaactaaatccgagctaagatgaattagttatgaatttttaaagattaaatcggattaaatcatttatatagattttaattgaattatgacgcaatatagaattatttttgaaaaggaaaaaggaattattgcgtcagcaggctcgggctcacggtggaccgggtgcacggcgacagtctacggaacggacggccgagatcaaatcgatctaccgccggtccatagctgacgtcgacgatgacgtcggcgatgacgtcaccaccggcggcggctcggccacgcatgctcgccggcgaacgacggtgcggcggcgcaaacggagggcatctacacatagcgggcgacgcggcgaactcaccgatgacacagacgacggcggacggtcaacggacggcaacggcggcaaggtttaaccaggtttgtagtagccaccagggtccacctgctccaactactgagccgactgctatcttagccgatgcattgctcaacatctggtatagatagccgaggagaattttgcccaaggggaattgtttctttgtttctagagcttcagccagaaattgccagttggttgtggggccgcaacttgatccacagaaaagaaatttttctagacacattaatagaaaggccacgtgttctcgcggggtgaccgaaccctggcccatgtatgctgccacatagcctgaccaaccccctatgcttttggttttgaagtcatattggttctttgtgttcaaacccatagggttggccgatgaggtggcatccagaccggtgatcatactgatatctatgagggttggagtcatcggcccttaattgaacagaaaggcattagtagtgtttgaccagaagtaagaagcggctgccattaggggttcatctttggctgagtttgctatagtaaggtcaagtgcttggccgattccaatttcatcccagtgaaccctcttgctggctgatacacgtttgaaccatgtggtccagctcttttctagtggaactttctctagagatggccaagacttgaaagtattcttctagtgacctagatctgggttggttaatctaaaggggattctattggtttcaccaacaatgaactcggtggggtcaggattaccgattgggccgagaaagtagtggttttcatgcgtcagactgggaattgcgacttggtgagaaagatgctacaaattcgaagcgaccaaaagagggaaagcaatatgagataagagaagatcgatctgctgctaaagaaggggatttagccgatgagaacttacctcggcgtattcggctgatggtgcaccagatgggctggcggaagacgacattggtgcgggcggagatctcgtcggggaggaagtcgcctaggaatcacctttgcgccggaggaatcgccagagaagagagagaaaagg

SEQ ID NO: 4190 - DNA, 3721 bp, Oryza sativa
  unsure (1)..(3721): unsure at all n locations
agccctatgtaattttagaacacacacgttcaatacaatctcggcgcatcgccacccttttgctttagttttgtttcgacgaattcttgctttcgggttgagctgcatcaattttgatcttcaacaagaggtaaaattcgttatgacggattacgttcttaggattagtgcttccatcttcatgacactctaatcttgtttatataattcgtcgagttatcatatatcttacataatctctagcaatatcgccacctaatttactatcgaccaatatctgtttgcagaaagcagccgattaggttagatctcgacgttgatctagattatataagatatctaccattctatgaaacttctagcggcttgattgtctagatatcgctcttcttttcatacttaatactgcattagttgagtttgatctattaagtcgtgcttagaatatcgatctctagcctgccttctagttgccgattagaatagcattggagtttcagccgatcgtatatgatttaactatatttgttttatatgctttactgatatgttaaatctgcactttatatcaagatattgttgtatctaagtatgttaggcttttgtttgatatattatacttgctttaatatcctgatataaagtagtatcggagtattagccgatacacgctagatctatctgatcggctacgctacaaacatatatagtcttgttattgatatatatttcgatctaagtgatttataatgtctcggcatggtgaccgatctatcccaatcacttgatttaagtatatatcgatataaggagtatatatcgttaatatcttcagccgatcgagtagatttagttcttctttacttattcatgactgccgatcgatacacggatgacatcggcccaaagataaatgatatgtcatcggcatctagccgatcggctatcatttatagatttaaccacggtttctttgcttctatttcttgttgattacaagatcaaatcaactggcacgctaatacacccgaagacgagctttggacctgcactagagttaagcagatctcccaggccacgtgttttctgtcaacagaaaggtcaaaaggtgatcgataaaagagatcggcaaagatgttttctagcaggaacagaagtaggttgaatggtgattgataaaggataaccaaaaacatgctctacatcacacaaggaagactcctgacagtaatcgccctgcaacagtcaccttgtcattgagaaaaaaatgtgagtaagcaagataacctaggtaaaagtgtttctatgaaggcaaggagtgaaatcttcaactcggtatcagatgctacacggagtgaaaagtgcaggcaccggttaccaggtaatgccatgtcttgagagatgatccaatgggaaggaactcatcaaggtcgaaggtgtaaaggaatacgttgaatgctaaatgatgacaacatgaagagaatagtgggaagtaaactgaatgtaaagaaagtgaatccgagttgtctgttcgtgggagctattcccagttatgaaccaagtgatatgttcgaagatagtctacagaggtcagattaaaatcacatctaacaacgaagcttcagatttggcaggataacgatcagacaataacaagtccagcagtaaagccatttaggaagacgtcaaagcatgtcaagtgggataagttggttctgttgagaaacataattcaaaggcaaagttatcgacccttgcatcgaatagcacaagtagctagcacccagagtccaggaaagctaatatgaggcagttggtggcaagttagaagtaaatgacaagcatggtattctcatgatgacaagcatggtattctagtaatgacaagctgatatcgacgcataacgtgaagtgggtaacttgcatgagattgacacccaaggtatgaactatgagaagttctggaactgaagccccatcttcaagtgccgcaacctagtcgaagtcagctagaggtgtaaccagggacaagtcaagtgaagagaagattccatctgcaacaggagatcaagccaaacagttccgagtggggaagttttgctggacaagtttgttatacaagacgcaacagaagaagtcaggcaagaagagaagaccgcccaacctatcttcttgctagcctcctcgaatctcggggacgagattcctgtaaggggggtggatttgtcacgtcctgataaattcatcccgaaataaaaatcattctctaaaaggaataatagaattaattaaaatgcgaaaagaaattggcaaacactaaaatacgtacaagaaaaattcgaatgtggcccggagaatttttgttaaattctccttggtctaaaaagagctctcaaattttacttgaattttcagaacaccggaaataattattaagcaacaacaacaattaacaaagtttattaaaaagaaaaactaaaaataatcctccttcctcctttgggccaagtctgacccaaagtctctcctccctccctctcttttccttccgtccctccttcccggccggcccactgngnnctntcctcctcccgcctgggcctgccccggcccaagccgagcggctgcctccctccagcgcccctcacgcgcgccgcacgcgcgctgaccgcgcgcctaaccggtgggtcccacccacccggtcgtctccttcctcccgcacggcctcctctctcacccgtgaaccctagcgccgattcctcctccaagtccaccccattcaagccggctctttccaaattaattgcggggttttaatccccattggttcctctttgatttcccccgttttcccccttgatttgtgcccccaatcgccgggaacggacgtgccaaacccggccgctttccatggccgccggccgccattcccgcctccgtttcgacctcccccgtggccgactccctcccctcatctataaaatggaaccccctcggtccgttctccagttttagccccctcccgcgctctcccgtggccgccccgcctctccccgccttctccttctctctctccggtgccggccgacctccagccgcacctcccgccacgaccgtgcgccgtccggttgcgccgtcgccaccctcggcctcgcaggtgcatcctcttccccggcgtcgcctccgtttcacggggaaaccatgggagacgcgtcctcaccggtaaacagtggcgttgctaccactgcaccacctccggcagccccttccgtcgtgcccgagcaccgaccgacgtcgccgcctcctccgtcgacgtcgcagcgtcgtcctcttctctggctgctcctctgtttcgcccagaaaaccgctgcaagtcgccgccaacccctccaccctcctcgccgaagtcccttcggccgccccttcctcctcgcccgtgcaacagtcggccgcacctccaccaccttcagcatcacagcggcaaggtcgtcctcggcctcgcctcccctccatccgaaccccgccggtctttgtcgtcgtcctctcgtcgttcccggttgcgctcgtcgtcggccctcccttcgtcaagccgtgctcgttcgtcgtctgcgtccgtcaagtaagccgctgcagccccgtcgtcgtcttcgtcctcggctccgcgtcgtcaagccttgtgccggcctcgtctcgtcttcgtccaaggatcgccgccgaagta

SEQ ID NO: 4191 - DNA, 1193 bp, Oryza sativa
aagtctcctaatgtttgttataaccaaaagaaccttgtgattttctttttatgtattgttattgcttccttataggcttgtagctttgcttgtgtgcttcgtgtagcttctgttgttctggaggttcctaaagcgtggttcgcggtcgtcgccgaaggttcggaaggccgttctctcttagcaaggcaagtcgcatcatccttgagcatattgaatcccagtttataaaattattctgatttgaattattgcattactgctttatttaaattcccgcgttatcactgtttattcagcattacctattaatccttgttatagccttatcaccttgcttaccctaggcaaacaaaaccccaactagtgggtactctattcatggttccactagtatgaatttaggtagatgcttcgctgattaattaggcaacattaggtggttttataactttagactttgggaattctcatatcacttggacacgatggaatggttggcttatggtggaattggacatacacctctcttcctctttcaaaacccctaaaacctgttttccgatggggtttgggtgcatgccagttgtgggaagtagcaccccggccaatataaggattaagctcgagcctctgttgcaaagcactaccgtactaaccacatgtctaatgggtaaggcttaactcggtgctcagtctagtcctgaacaaaaggacacgtatagagatggatgaagtcattgcgacgatggatatctatgaggcaaatgaaggctacgcgagctgcggctcggtaatcgatatgtctaggcaaatgaagcctacacgggccggtgtccattagtcgagatgccatggcactggactagtacgcgggtggtctcacccctatgtgtgtggcgcacccggtctagatcctgttgctagggtctcaatcctggcctgcctgtccgggataccggccataggcagggttgggtcggtacttttgttcacggctaggatgggtaaagggttatgtcacgttttttatgatgggttccaattgcaatggaatgcagagtaaaggcgtgttttatgggtaaagatgtacaactctgattagagtataatctattcgaatagccgtgccctcggatatgggcaagcctagcaatgtacccaagttagtggtttaattcttaaaatttgcttaa

SEQ ID NO: 4192 - DNA, 10282 bp, Oryza sativa
acgcttaggaggtactatggccagtaattggattatcgccctaagaccaaaaaacatgttctatgcttttagattcacgttgttcatcaaaaaggcaggggggcatgtgtttacacccaaatttggcacctaggattaaaataggaaaagactgccaagatttggaagtctaccggtttcctccgagtgggctggtctgaccgtcgtgtgttgggcggtcaaaccgccggttgagggccagtcagaccgacggtgtgtggccggtctaaccggcagggtccgagtccgattgcgtttcgtcgggtttcgaggtttccttgcctgggaaggcatgtttcgggtttcctttggtttctatcccgagttggacgtggaggagagcctgtagaaggcaagaccaacccctatataagggacatggccggttccactgtaaaaaaaaatcaatctacaatcaatcaatcgaatcgtttttcatattgcttttagttttctcttagtttgtccatctttgtcgatttgcaccgtaaatcgtccgccgccgctgcgagagtgcaacacctcttcgtaggtttgtcctgaaaaccttccgttttgcccacgagacgggtagttatctagaaatcggcttcgctagcctgtttagttatcaaaacccatcttggtctagtttcttctagattgaggtggttggcgactctaggatcatcgcaaggcgttaggtgttgcgatcgtggttgtcaacttgtcacaaaaagttgccaacactatgttgatgacattgtcgtgaaaatttgtaaggcattcgaccatgtgtcagacttgcaagagactctcgacaacctccgcgcggccggcatgaagttaaacccagaaaagtgtgtgttcggtgttcgcgcgggtaagttattgggattccttgtgtccgaaacggggatcgaagcgaaccccgaaaaaatcgatgacattcagcaaatgaagccaccatcgaacgtacgacaagtacaaaagctcgcggggcgaattgcggcactcaatcgattcttatcaaaggcggctgaaaggggtttgccattcttcaagacccttcaaggggcaggaaagttcagctggacgcctgagtgccaatcagctttcgataagcttaagcgatatctgcaaagcccactagccttggtcagcccaacaaggggaagcgaactgtggctttatctagcagctttgcccatcgcagttggcgctgctctagtgcaagagaccgaagctggtcagaaaaaagtgtacttcgtgtccgaagctctctaaggggcgaaagtcagatacattgcgatcgaaaagcttgcttatgctctagtaatggcttcaagaaagctcaaacactacttccaagcccacaaaagcatagtaccctcgcagtaccctttgggcgaaatgcttcaaggaaaagaaatcacaaggcggctaagcaaatgggctgccgaactataacctttcgacctacactttgtcgctcgcaccgcaatcaagtcccaaatcctcgctgattgcgtggccgaatggacaccagcgtccgccccaaagcccgaaccagtcgaacaaccatgggtcacgcattccgatgggtcgtggtctcacaagggggcgggtgttgccatgatcctaacctcgccaggaggagtgccgatacattacgctgcaagattgtagtttagtacaaccaataacacagccgaatacgaagcagtattaatgggcctgagaaaggcgaaagcactaggcgttcggcgtctgataatcagaacggactcaaagcttgtcgccagccaggttgacaaatgtaacatcccggcctagggcttaataggattaatagaatactcatatcaacaagttgcaacttctttttcggaagccaatctccaaagaactccagggttaagcgtgcttggcctggagcaatttgggatgggtgaccgaccgggaaattcttcccgggtgcacacgagtgaggacaaagtgtgcagaaaagacatgtgttggtctgtgagggcagtctatgaggcgcgtgtgtcgcagttgtgcaggcatggtacgcatgtctggtgtagaccggaagtggttacacagcatggcacatgcgctggcactggacacatggacgtggccaagagaggacgttcctggctatcagatgtaagtgggcccggcctaggggaaggcgggacgttacaaaatggtatcagagccgactctcgcggtttcatgggcgcgtgtgtcgcagttgcgcaggcatggtgcgcatggctggtgtagaccggaagtggttacacagcatggcacatgcgctggcactggacacatggacgtagccaagagaggacgttcctggcctggggttgatcgacgggggcgtcgatctctcttaagggggtgagggtgtaacatcccggtctagggcttaataggattaatagaatactcatattaacaagttgcaacttcttttccggaagccaatctccaaacaactccagggttaagcgtgcttggcttggagcaatttgggatgggtgaccgaccgggaaattcttcccgggtgcacacgagtgagaacaaagtgtgcagaaaagacatgtgttggtctgtgagagcagtctatgacctatgaaagctatcagatgtaagtaggcccggcctgggggaaggcgggacgttacaacaaatccttcgaggcgaaggaagaggggataaggaaatatctagaatactcatattaacaagttgcaacttcttttccggaagccaatctccaaacaactccagggttaagcgtgcttggcttggagcaatttgggatgggtgaccgaccgggaaattcttcccgggtgcacacgagtgagaacaaagtgtgcagaaaagacatctgttggtctgtgagggcagtctatgacctatgaaagctatcagatgtaagtaagcccggcctgggggaaggcgggacgttacaacaaatccttcgaggcgaaggaagaggggataaggaaatatctagaagctgttcggtctatggagaaaagcttcgctggcataacggtcgaacacctaccccgaggccagaacaaagaagccgatgcgttggcaaagtcagccgcttgtttggggccgcattcgctaggggtcttctttgaagtcctgtatacaccaagtgtgtcaatagatagcctagagatcatggcaatcgaccaagtcaaattgggcgaagcctcgaaggaagaggggataaggaaatatctagaagctgttcggtctatggagaaaagcttcgctagcataacggtcgaacacctaccccgaggccagaacaaagaagccgatgcgttggcaaagtcagccgcttgtttggggccgcattcgctaggggtcttctttgaagtcctgtatacaccaagtgtgtcaatagatagcctagagatcatggcaatcgaccaagtcaaattgggcgaagaccaggacgactggcgaacgccattcgtcaagcatcttaatgggggatggctgccagacaacgaagcaaaggcgaaacaattacagctcagagctgcaaggtacaagttagtctccggacaattgtacctaattggggtactgcagcccatgcttcgctatgtctctttctccaaaggtaaggaaatggtaaaggaaatacaccaggggatgtgtggagcacaccaggcggcaaggaccgtcgcatcaaaagttttttgccaagacatatactggccaaccgtacttaaagtatgcgttaagcagattaagaagtgtgaaagctgtcagcggcacggccgaaaccaaacagcaccacagtatgagctacaaccaatcgcaccaatctggccattcgcaagatggggtttagacatcatcgacccattcacggtggcgcgaaatggttacaggttcgccatcgtagccatcgaatacttctctcgctggatcgaggccaaacccctcggcacaataaccgcagctgcggttcagaagttcgtacggaagaacatcatttgctggttcagggtgccaaaatagttcatcgctgacaatggcaagtagttcgattccgagaaattcagagaaatgtgcgaagggttaaacctggagatcaggttcgcatcggtggcgcacccacaatcaaacggggcggccgaacgcgcaaatggtaaaattctcgaggctcttaaaaagagacttgagggagcgacgaaggggaaatggccagacgaaatgttgtctgttctctgggcccttcggaccacccccacaaggccagccaagttcagccctttcatgcttctctatggtgacgaagcaatgacgccagccgaactaggggctaattcgccaagggtgatgttctctggaggcaaagatgggcgtgaagtgtcgctcgaactcctggaaggggtaagagtcgaagcgctagaacatatgcgcaaatatgcagcaagcactttggcgacctacaacagaaaggttttaccgacagagattttgcctagtcatcttgtgctaaggaagaaggcgaaacctgtggcggtctgaaaactagaatccaaatgggaaggaccaaatctgatcaagcatagttctcgagcgggctcctttcggctggcgaccttggagggtgaagagttcgaccactcctggaacgctgcctctcttaagcgtttctatgtgtaaaatgggtggcgcttgattcgccaattgtaaaaatgtacatattatgtaagccgttcggcacaaaaacaacaaaaaaggggggaaaatcgaaaaagaaaaaaaatactggacgtagggctattatccacctcggaggcccgaacctgtataaaaatgccagtttcctttcgccttatttattatttctgtggatgatgttctcgtggaaaaaccccaaggcaaacgcttgatcagtgaaaatgccagggggacgaaacgaatcggtcgaagcatagctcaccgaacgttgaaaccgtgacagctcgattttgacaaaaaataaccaagctccgttgaattcagcttacgcacagacttaaacgcttctagttgtgtttgccacgagccgaaaacggaagaggagagctgagaaatgaacgttcttttctgctaaaccacgcaaagaggccgacacgtttccacctaacggaagcacgaaagtgactatgcgaacattagcacaaagaaatgttaaaacatacataaacctcaatgggcgaaaacacatattctcatattaataaacacaacattcacaataaaattacatcttcgcccgcgcactcgtgtccgtctacgctacaagccagcgaacaaggttcgtcgtcactactaatattgtacacaacccttaagagggatggaggccaagcacaaacttaactataacggtgacgggcgatcgcctcttggcgactcgaccttttaaaatttcgccaaaagttagtgctatctttgcgatgtgcgacatggtagcggtcataatcttccaaggttcgacccggatgtgcacgcatccaccctgaaacctttataaccaccacgaacttctcgtttttatttcgccaattcccaaaggggggctgaacgcacgactttcggctaaaaccttgccaacaaggcataaagtatagcaaaaaaatgaagacgctaacgaaatcgattacccatcacagcgaaagcgcataattggcgaaatagtaacttttcattaataaacataaggccagaacggctacatgatggtgacggccattagccgaacatgcaaaatatttacatataaacaagctacgactctaagtccagaaagcgaaaaacgcgagggcgaaaggcctcacacctcagggtggtcttggctttcgttgcctttgccctcctgctcagccgctatctccaacggccctagctcttcagaagtattggtggcagcggcgccttcggctttctccatcttctccagttgctcacgaagccgggtcttcgcgccagacctcccaccactctccaagaagccctttaggaaggcctttggagccgccgaagcagactgggagctttcgggtcagtccttcttcacagttcgaggaaaatcctcgacatggtcacaaccatgttcatggagcaagctgagcacgaaccccacggcaactcgcgcacaacagtcgccgtacgcgccagccacttcgacgactgagccggccgcatcttgcgtccactcagtaaagtcaaaagcggacctgtcatcacccggagcgccctccgcacgtgctgcaaggtcagtgagggccagccgaagggtgtagcaagcatgtctggcggactccgtcgctggcaccaaagcttcagcagcggcttccaccgagccaagccgggcttcaagggatttgatcttttcttcggccgctgcaagctgcccttcctgttcagcatccctctgattcgccttctccaagttggcacggagagatttattttctcccaccagggatttattctccgcgttcgccttctttagggcatccgagctgtcaccatcagctgcctacctctactgtcccgcagcatatatgcccaaataatgatacttaaaaatctaatcaccacgcttacattattaaatattactgtatatcctctagaatgacatagagcaatcattcacattaacattaaacccccaacattgcacctctttggtaagctagtcacacaactatatcgagacaaatataaaataaagccggtactctaatgaagtaaagtaccgaagatatataaagaagaatattctattaattcgataagtcttacaaaagaagggaggaaagctgctagatacccgaaatatcctgaagatttgaggactaagaaaactattctattctactccactagcactagagtactaaactaaacttgagagagagatcaagtgcttctttcttgagtgtgggaaagagtggagaaggtgacccctttatatagccttgtaatgatgattatgatagttggaaaggtcgaaaacaccctccaactgtcatttggagtgaatcctggatgtccacgccaaaccacaggatgaacggccatgatgggggttcggccgaaccctggcctagcccaaacagcccaatttttggcaggcgtcctctccaatggttcctcaatccagtggtaaggtgttttgggaccttttagttcatttctttggatttataggcccattcacccataagtctacacttgacggactccgattgattcttcatttgttttccgtctactctccttctctttatgtagcaatctctgaaatcaaatagaatccaagtacaagtggaaatagattattctaaaacaaatatgcattgcaagtatagctagttcttctttattttagttacattgaccatcgaaattggtctataatgaccgtcaacaacaactagaggatatcctagtggtagtcggctgcgtgtccaaatagatagtagcaatgccgtgtagggctgcagatgccaaacatgctaagaagatgttctcggaaatcatcttcccccgctttggtaccccaagaatggtcataagtgatgggggatcacacttcatcgataaaaccttccaagacctcttgcgtgagatgggcaccaaacagaatgttgccacaccctaccatcctgaaacaagtggacaagcagaaacattgaacaaacagatcaagaacattctgtaaaacacgatccacaaaatgggaacatgatggaaggacaagttactcgacgctctatgggcataccgaacagcccataagacaccaattggaatgtccctgtattagatagtctacgggaagtcatgctgactccctatagaacttgaacaccagacatactgggcaatccagaactggaatatggattttgagggagccgaagagtggagaaagatacagatattagagttggaagaatggagggataaagcatatcacaactccaagatttacaaggaaagaacaaaacgctggcacgataagcggatcaagatcaagaaattcaagacaggagataaggtactgatgtttaattccagagttaagctattcgggcatgggaagttacgaagcaaatgggaagggccgtttgacattatcaacacctcgtcacacggagcaatcacatttcgtaacaactcaggtaacatcttcaaggtaaacggccaacgtttaaagattttccttgagccgaatgaaaatttagatgaagaagtggatgtgattaaattaattgattttgaaccataatgatctcatctaaaagttgcttaattctataaaattgtgagttttcctatttgaattagcttaagttagacatgtgaaaattttggaggccgaccgagcccaccagtggttcggccgaaccatggcggcacccgatcgcccccatatttgaaagttatatctccccgcttaattgcccgttagaaacttggtcgttcatgcgattcgggcgttagatcaatctgagctacttaaattcctctccttcctctccagctcctccacatttaatccatttcttccctcaacttaactccactcattccaaactccaatccacgaccaaaatcacccaatggctaggaaatccttgatcccctacggtgccactcgttcaaacaagtttgatcttaatggtgagccctgttcggcaaaccaattggtgccagtgaacgatatggcgctggaggaggcaaacgcaatcttcatggaccccttggagactatcccagctgactcagcaagcaagaggccgatcggtgttgccgccagttcggccgaacccagcctcgatcagcccccctattcggccgcttgtcccctctcgcctcaccgcaacgcgctgaccgaagtacagggtgtttcccctgtacagaggcctacatcaggcgaattggggccattaaagatggcgcgatggctttttcaagagtaggagaaggctgcatctcccgccgatgaatgctatgttggtaatcttgagaccaaggcaagggatgtggtattccaccagtaccaagcccccatcccactccggtgacaacgcaaaagaggttccgcgtttttggtgtgcgaacccccggtggtggctatgggaaggggctacaccggtccttaacaactcatgagaaggaagaggtggtagagtcggttgattcctcaccttacaaggttaggcgtcaattgtctccacctcccattaggagggaggccgggaaatttgaggggagtgactctccccaaccctccatatcgaaacttgcaaagaagatcaagaaactccgcaaagagaacaaggagcttcgaacccacgatgcggaatgtagggaagaaattgctaatcttgggcacgaatttgatgtgcttaggctccgttcggtagtacaagttcccaactcctcgtttttcgcgcgcacgcttttcaaactgctaaacggtgcgttttttgcaaaaaagtttctatacgaaagttgcttaaaaaaattatattaattcatttttaaaaaaaaatagctaaaacttaattaatcacgtgctaaaacgctgcttcgttttacgtgccggggccgaacagagccttagtcgtggattatgtgctaagattaagcgtgcattcaaggagatggggaaagaagaccgttattatgccaattagaggccttcccctctcattttaataagttaggtgctttagttttatttcatttcatttatttcattccaatgtaatcagcacctatatcattttgattgaataaagcggttcgttggtagttaatccaacggaagcttttttatttccatattgtgtttaataaagtctaggttcaaaataagtgtgggggagatacttcggactcctgacgtgcaaactctaaaaacacatcatatttctgaatgtctgacgatttctgaacttcactgaaaattgcagagtatttggacgtcagaggggtttggtcgaacccaaactggccccaaataccccccaattttgtctagtgagaatggtttgcacgtccacttcctcattctttcccatttttatcagtatatgagcagatgttgactgaaaaatcaactcaaagctaaaagtgaaaatgataatctctcaactaattaaatttccctgtcacattttattcttgactatgcttgtca

SEQ ID NO: 4193 - DNA, 5065 bp, Oryza sativa
aaatttatgcataaaaatattatatataaaaaatatttgaattcaaattcaaatttgaatcggatatataaacttttgacttataaactttgggcacatataaactttatgtatagaaatactatatataaaaatatttgaattcaaattctaatttgaatcagatatataaacgtttgacttataaactttgggtctataaactttaggtgtataaactttagatatataaactttagatgtgtaaacttgaggtatacaaactttaggtgtataaatttactaaaatagaaaagtaatgcggtgccataaaaaggaaacaatgtaaggaaggggcttaggaaaaagaaaaagaaaaaaagaagcgctaacttggctccatgaaagtcggtaatagtaataaaaaaagataaaaacagctttaaaaattaggagcaatttctaacagaaaaaggtaagaaaaaaaaagaggacctgatcgcgtgggtacacagacggcgatcgtccgctcgttagcaatttcggtttattctctaagaggtattttgaggagataagaagaaatgaaatatggagaatgagacacaaggacgaagctatagcttcatgtgttctaatatatggtaagatgtttatgcttggccaaactttttttaagttcgatgaaatttatagaaaaatatagcaatatattttcaacacaaaacaaatatactatccatgtattcaaatactcaattgtggatcaaactaagttgcttctaaccataaaaaaataaaactaacttggttcagatttccataaatttggtcagatttatagaagttagattcagaacaaaatcaaaacaacttacaatattgaacggagtagaagtgatcagatcagtatgacacacacttctatgttttagtattgtttactaaaatttccagatagccgcatcaaataccacacaggatgaaaccaccctggttgaatacccacctagcattggcgcattgcacatagtattattttacatgagagtccatgaacatatttgttatccttaagagtggtggctcctaagggagcctctcattattataaaaaagattttaagataagcaaggtaacttcagatggcaagtcgttgataaacttgacacatggttggcctctcttgcggcgatggaagtaggcagtcaaacgccacggagagacacctattcacgtcgtctgcttcatcatctgcaggtactggaagacgtttatccaagatttcatcaagaaaatcatcatatttagaagtagtaatagaactttggatatctccaggatgtttgcccatcagcacctcaagcaccacaacaccgaagctatatacgtcacatttctccgtgactaaggaggtgtaggacaattctacaaccaacatggaaacatatataaaagtcaggaatatatgtttgtgcaaagcaatattatattgttaacaagttttagtatatatggaatattgtactgtactgtatacacataccaggtgctatatagccataggtcccagctaatgcactccaatttgatgaatccggttttagaattcttgcaatgccaaaatccgagacatatgctctataatcaacatccagtaagatgtttccgctcgtaatgtcacgatgaattatgggaggctgacaatcatgaagataagtaattgcttgagctacatctcttatgagggttgtccttctcatccaatagaactcgatggctacttcttcattatttaagatagaagctaggtttcctctctctatgtattgacaaacgagaaacctgtaccttggatgacaacagaatccatacaacttcactatgctacgatgtcggatttttgccaacatttcaatctcaatctgaaatctctcttcatcgtgtacagtatcttcatcatctggatggagtttcttcaccgcaaacacttgcttatcttcaagttctgctttgtatacacgaccatatgctccctctccaatgcaatgcttctcatcaaaattgtcggttgcgctaattatatcatcaaatgccattttaccatcaaaactccatacagagaaaatatcattttttttcaccacattattattttcttgggagagtttttttcggcaaactgaaagaagaaaaacagttgccacaatagaaataatagctaagaatacaggagcactgacttcaactatcaactttagtctggtttttctgtggtaaggaggcaaataacaatgtgataggccagcaagttctccacaaagacctttgttgtggacaaaccattttgccgatgcattgtggagcggtctaggaataggaccttcgaggacattgtatgacacatcaaacactgatagactttgcatacttgcaattgagccagggatagcaccactaaattgattgtgtgacaagtttacatacatgagcatctcgagcatgccaagttcggatggtattggtccactaagattgttctggctaagatcaagcatgctttgtagagaaagaaaatggcccaatgtacttggtatactcccattcaagctgttgttgctcattttcaaagactgcagcttaaaacaattaccaaggtcatctggtatagctccactcagctgattgcttgagaaatcaagaatctcaaggcttttaagttggccaatttgatttgggaccttcccagaaagttgattgtttcttaaatctatcaaatttagattgactaacttgccaatttcaggtggtatctccccagtcaacctattagtggacagactgagctttacaagattttttagattcccaagctcagaaggtataccgccttttatcatattgtctgcaaaactaagtgctgtcaaattctgacatgatcacaaatttggtgaaagccggccaaccaatttgtttgacgctaaacgtaaccgccatagatgggggtacactcctaatgcatcagttatgtctccatccattttgttgtagctaatgccgagggatcgcagggaaatgcaatccctcaaagtctttggcatcgaaccattcaaattgttatgagaaagatgtaaaatctctagctttttaccccgacacaaatcaggcaacgggccaaccaagtagttcttgtctaattcgatgtcaattaaattagtgaggttgaagagtgctggaggcaattgacctgatagctggttgctgaacagtagaatttcgctcacgctctccaattttcccaaactcggagggattggaccagacaattggttttcataggatgcaaatgatatcaaacttgccagattcccaaactcttctgggattggtgcagagagattattgctatttattaatatatagttgagggaagacatgttccctatagttgatggcactggtccagttatgaaatttactgagaggtcgagctgttggagattcacaagatttccaatctcctgagggattgacccagttatgtgattaccccaaagagaaaagtagactgacgaagtaagatttccaacacttgagggaattgagccggtcaaatggttctcggacaagtccaactcaaccaaacttgacagcatcccaaacacttgagggatagtaccagtatgttggttcagatatatgtacaagatcttgagcattgtaagatttcccaaggtggatgtaattgagccgttcaagttgttttgctgcagatctagatattgaagcgtttgtatttcacctagctcgtcaggtataggtccagatagatgattaccgacgaggaacaaagaggtgagttttgtgaggtttccaaatagagaaagtatcggcccaacaagaagattgaggctcaaatctataaacgagatgtcatgaagcttcccaagctgccatgggatgttaccggacagcttattgccaaggagagaaagataagtaagctttgtaaggttacccaacgcaggagggatttccccagtcagattattgtacgacagatcaattgaggaaatcctcccaaggtcaccaatggatggaggtatatttccggtaagctgattgctggacaggttgagactggaaagcattaacagagaacttatgccaggagggatcgtacccgacagatggccattgtcgctgaggtcgaggctggccagataagggaaggacctgaagctcagggtgtccagccctcccacaagatgggcacccgggagggcgatccccgtgatggcatttcttgccgtggttcttccatgtcgtcgctggcgccatggaacgtcgccgcaggtgatgccagtccagttgcacgggtggatatcgtgcctccatgttcccagctggtgttgtgagaagcccttcaaggtggacttccagtggagaagggccgccacttgagctcgcagcgatgtgccacgccgcggcagtggcgccgccgatctggccccatggcctagcgtgagagcgaagaggagcagtagaagcattagctttaggtgcttcgacactagtatgtgcagagtgaggtttctagcgctggcctgggagttgatcaggagggatgatatgtcaccttgcccttttctgattcgtttttaggcctggtttagttggggaaagtttttgggtttggttgttacgtacttacataggatatacggacagacatttaaagtattaaacgtagtccaataacaaaaactaattatagattctgccagaaaactacgagtcaaatttattaagcctaattaatccatcattagcaaatgtttactgtagcaccacattgtcaaatcatggcgcaattagacttaaaaaattcgtctcgcaatttacacataatttgtgtaattattttttttctacatttaatacttaatgcacgtatcaaacattcgatgtgacaacgtgaaaattttagttttgggaactttgcgggacaggatcacacggaagctagctggccaagtccatgccgtgtggaaaatgggagaaggatagcaacggaaacgatgc

SEQ ID NO: 4194 - DNA, 5146 bp, Oryza sativa
ctatctctccctctcctctctttgttatttgtaattgtttgtgtgattttttcatgtgagatgtgttcttgttgatatgagatgtgttgatgtgtgttcttgtgagatgtgttcttgtgagatgattcatttgcgccggcgacgggagcgagcggcggatccgtagccggcgaccgcgagggcgacggcggcgggcctcggctaggcggcggcggactagggttagggttagggtttcttttttccttttttttttctttttttttctccgtgcgggcgcccgcacacaaaaatcggttttcgcgtgcgagtgcgccaccgcacgcgaaaatcacgattttcccagacgactggtgtgtgcgggtggtggcccacccgcacgcaaaaattggatagcccgtctggaaaaatcggtgctttagtagtgacggtagtacgtgaaccagtgacggtacctgtgtacgtacggtacctgtgtacgtacgtggttcatgtacacgtgacggagaggagagggagagattaaattctgtttttaatctaaatcaaatctaatggtctaaattaatggaccccaccaaattaaataaaaatcaatggctagatatttctaatctattagaacgccacgtggtaatttaggagcgtttataggaatgccacatagcgttatgagagcgtttatagggtgtttcatggacttttagtatataatagaagatattagcatactccctctggttctatattaattgacgttttggataaggttgaggttaaactttataactttgaccatcaataactttaaaaatatttagtttaaagaaactagaaaaatgtatatagatttgtctttcaaaacactataataaaagtaaacatgcatttatttattgtatatattataatagaaaaataaggtcaaaggtatatcttgtagagcgtgtcattgtccaaagcgtcaattaaaatgaaaccggagggattatatttctacaaacttgatcaaactttaaaaaaactttgattaagaaaaaaatcaaataatttataatatgaaacgaatagagtagtagtgagataagcttttaaatagtatagtgaaatgttagatccttttgttgggttgttctaagataatataaggggaaaaaaagaaaacaacgtggcttgcattatcaacaatgttggtggcggcatgcttactaggcgaacatacgataattctaaatttgcaatggttccaattaacctccacccgaattaacaatgaatatggttccgatgggaaaatgttacccagcaaacgtaggggttggccagcaagcgaacgcttattggaagttggtttggaatttcggatatccttggcctggagggttggaagtaatgccaatgctatatggtaggaaaatgacatggtatcggcagattatctgcacaagatcatgaagggaaaaaagaaaggaatttgctgcttgattggcgcgcggaaggtaaagtgaggcttctactactagatgtgaattaatgcatgggaaaggtagctactacacacaagttggagtatatacgagtatcatattaaaaatgaagtccaaggttgcctgcctaatcttcagtatctagcgctggctgagttcagccccgagagtgacaggatcctacacttggacatactccaatcgcagcatctgtgagcgagcaggactagtagtactcctagacgttaggcgagatctgtcgcaggcgtggaagctacgatccacacagccaggcagatagtcgaccgtacgtgcgcgcgtcctccacaaggtcgttatatcggccgtggagccccccgcgcgcgcgcccacaaggagagacgacgcggcacggtagtagggtcacccacgccacgattggtgccaagggagcaaaggctcactagtgcacatgcggcgggcgcgcgcagaaaccatatacgactactcgcctcgtcgcttagctttcgctaacaacggctacctttccggttcggctggcgtccacctcgcgcgtggaattggcgtcgtcacgttcacgtggctgcatctgcatctgcatctgcgtgcgctccagatcaatcacactacggcccagtttagttccaaaatttttctttaaatttttaacttttcaatcacattaaaatttttctacatatacaaacttttaacttttttatcacatcgtttcaatttcaaccaaaattttaattttgatatgaaagaattaaaaggagttccggcccccggtcgctcgtcactgcgcccgtcgcgcaacaggaagagggcaaggggacggggagggtccgggccccgggccgcccgcggcagcggtcctcgtacatggagtactgtcctcctgtataaacaaagaactaggctagctactttattcctttgtctaactcactctggttactaattgtttggctgtttgctactaccttcgttctattttaagtgtagccgtctgtcttatttagacaaattatactttttttttaaaaagtcacacgtaatattttataataacgaacaaagtaataatcataattttgttaaaaataaaacaaacgatcaaatattggacaaaaacagaattattagggcatgtacaatggtttttattaacggtctctctttattgtcatgcaaacatatttggtgatatggaagagagagaaagaagaaaagagaaagatggttgctacgcatgacaatagcatagagtcgactcttagcatttattaggaaattttttattgcattgagtctaataaaggaaagatgactagtaagaaagtatttggtacattaatgatcagagaccgtattgtcttaactattgtatcgtgatagcctctaattaacatagagaccatatcggtctctacctttgtacttgcccttacaactacttagggaatgtttggttaatgggttataggatctatcttgattttcggtggtacaacacagggtctaccttttcgattccgaagtaaaaaccgctcctcaccagtttaccaaaatcagaccgaaaaccggcaaaaactatcgaatttcagtcaataccatacggaaaccggctaataccgattggtttttacaaaacgagacctagcgattttatgaaaaccgaccagttttcgtgaaattccatcggtttttctagaatgtttactcgagtttactgttttaactttaaatttcttgaaaacgatttggattttcctttgaaatctgattaggtcccgcatcctcaaacctcgatgtctcgtggttctaacgggtgcttgactgcttggagcctatacaggtaagtagagatcaggcaaaagtactactgctggtagctgatagtactactactgagtacattatttctgttccttgagcttaattgccatacaatgccgttgcaaaagtgcaaacccgcccattaatttattatttttagataatgcatgcccattaattagtatagcaccgtacgtacttgatctagccgatatgtggtgtcgatgatcatgattacagccacggctgcacgctttgcttgctaattaattttagggtattcgctcgttggtaccaactcgtccagtacttttgcgagatagagataaagtgtacgtcgatctgttgctagagtcgtcgcggccgcgcccctgcgcgcggaggcagtgtagagtgtggacacatgtagatcgatcgcccttgggccttgacatttctcactgtacgaatcagcgtgcagcagtgcaagctagctgcggagtggtcttggggttgagtcacatgccagttaggccaatctatcccaacatgtaagcagcattttttaacttctcttggctactaaaagtatgactgtcgccgtgtttagttctaaaatctttcttccaacttttaacttttccatcacatcgttctaatttcaataaaatttttaattttagtgtgaactaaacacagcctatataggtcttgtttagttcccacataaaaaatttacaccctatcacatcgaacgtttgaacacttatatgaagtattaaatataggctaaaaaataactaattatacagattgtgtgtaaattgcaagacgaatcttttaagcccaattgttctatgatttgacaatatggtgctacagtaaatatttgctaatgacggattaattaggcttaataaatttgtctcacagtttacatgcggattctgtaatttgttttgttattagattacgtttaatacttcaaatgtgtgtccgtatatccgatgtgacacggtaaaaattttcatccctggatgtaaacacaaccatacatattgttagggcccctttaaatcgcatgattgagaaaacgtaggaataggaaaaatataggattttgatatgaatgtaagtgtaaaacagaggattgcaaaacgtagaaaaaacacaggaatggatgtttgattgaactgcaggaaaaacacaggaattggatgagagaggtagacttaacggatccgttaccaagaggttgaagctcttgctaaatttcctacaaaatctctataggattgtccattccacaggaatttcaaaggattaaataggattcaatcttttgtatcaaaaggcttcataggaaatttttctataggattgaaatcctccaaaattcctatatttttcttctaaatcaaaggggcccttactacaaaacatctctacaaacattatgtttctccttttttccccccttctgcagggactataaagggctttcttaagaagatcgcacatgcaaactaactaattaagttaatcctgactaatataatggactgtttcccataaatcagaaaaaccttttcctaaattagactacaataatttgtttcatgattgctagcaggaatgaattggttttcttttaatttggtagagtttcaaagatttcattcctgaataaataaatgtttttgttaaacataaaacaatttagtaagttactaaaagggagtgtctagatttctaagcacgtgaagttttccaaaaaaaaaaccaatcacttttcttatccctttgacattaatacaatgattttcgtcactccatta

SEQ ID NO: 4195 - DNA, 660 bp, Oryza sativa
ttcgcatgtcttaaaataaaattttgccgcagatattctgaagtgcaaccaacgacaaaagaagcttaagcacccaaactgttatgctcagctgttatttacagcagttggcatgtagtcgattatgagtgtcttctccattgcaagcaagatttcctttgcaaattcaagatgtgctgggtgttcaatgtactccttgactccttctgtgctttcaaaagtgcactcgaatacgtgtgtgaatccatggtgcatgttctctatgctcacgtcagttcccctgcaaattaaaccgcacatttagaaactgatggtttgagaaatagatcatcaatgtagctaaatttgcaccagggaaaatgaattcacaaatgtcacacatttgggatatcggaactttaggagaaaatctactctatgccaccgagattgcattggttcaacaattcaccattgacattttcattttataaatcactgagtttatcaatgtttttttttaaaaaaaatgcccaaaatgcccttagagacatatgacaattgatttatcacattaaaaataagtaattacaaaatattatgtatagcctcgtttcacaacatagaagttttaaaatttttgcattgctattttttttataaaatattttatatgttaca

SEQ ID NO: 4196 - DNA, 669 bp, Oryza sativa
agggggagcgcaagaagaagcggccccgtaagatgggggagacagaaccatctcggggaaacctcatttcccctccaaagtggtcgtttaaccgaccccctcgcaggttcgtctctcacccatcgtggctgtattcattctctcaacgcgagttttcactcacccatcttgttcgtcttctggttttttcttttgtttcagcgagatcccgtcgcgtccctcccgccattccaagtccggccagtctgaggccgaggatccggcggccgcagaggccctcaggcgggaatctgaccggcgagaggccgcggatcgcctacgggaagccgaggaggccgcccaggaggccgcccgggctcgccaggccgaggaaaccgctcgggaggaggccggatttcgccaggacgaggcgatggcgacttccgaggcagctcgcgacgaggccgcgggcgcgtcgcttgggcccactccctcaggcgacactcaggcgacaacttccggggcagctggcgacgaggccgcgggcgcgtcgcttgggcctactccctcgggcgacgctcaggaccaaccgggtccgggggacatccccgagtccggcacttccatcggcggcccgagccgcgtggcatcctctccaaggcggctcttccccacgccttctatcgccct

SEQ ID NO: 4197 - DNA, 612 bp, Oryza sativa
tgagtatgagatgaggatgatctgtgccgtggtccttttgtgtcttagcttgaataagggcttgtgcccaggttctggtcctcaaaaggcgcgggtcggggctagtgcctggggagatccacatgtcgagactggccaggccgggaacgtggtgaccgagggttatgggtgacccgattgtgggtttttgccgattcccccccggagttcaccacgcctcgaggcacggctcggttctgggccccgtttggcgattttagccgacccgagcccccgagggcaggattgagcacgagtgacctatttcaagtcaagattcttcaaaaggaaaaaacagcacagatacagcctttaggaaattgaaactgcttttatagaaattcagatataagagaaataagaatatgcatatgttgtagcccccggccaaccctgcacgcccgaggggggtgcggggttggcccgagcccgaaacttgacacccgacccccccctcaggggtagaagcgacgaaggtgttcgatgttccacgggttaggcagctcagtgccgtcgcccgtggccagccgtatggagcccggccgggggacgccgaccactcgatacggacgg

SEQ ID NO: 4198 - DNA, 615 bp, Oryza sativa
ccctgtgacgcactagtcttcttcccactcgcggtcgcggcgggtacgacgtgaccgaatggtgctccgcctgctgctcctgctcgcgctcccggcggcggcgggcgggctggcggcggacgggcaggcgctgctggccttcaaggcggccgtgctgcgggaccccgagggcgcgctcgccgactgggacgcctccaccgccgccgacccctgcgcctggaacggcgtctcctgcggcgccgggtccggggccgggggcgccgaccgccgcgtcgtggcgctgtccctcccgaggaagggcctcgtgggctccctcccggcgtcgccgctcccggcctcgctccgccacctcaacctccgcagcaaccgcctcttcggcgagctccccgcgccgctcctctccgctgcggcggggctgcagagcgtcgtgctgtacgggaacgagctgtacgggccgatcccgccggagctcggcgacctcccctacctccaaatcctcgacctctcctccaactccctcaacggcacgctcccgcccgcgatcctgagatgccgccgcctccgctccctcgcgctcggctggaacaacctcaccggcgcgctgccgcaggggtt

SEQ ID NO: 4199 - DNA, 1003 bp, Oryza sativa
tcggcaacccgggcctctgcgggccgccgctcaagaacccgtgctcgccggacgccatgccgtcgtccaatccgtttgtgcccaaggatgggggctccggcgcccccggtgctgggaagaacaaggggttggggaaggttgccattgtagccattgtgctcagtgatgtggtggggattctgatcattgcactggtgttcttctactgctattggagggctgtttcctccaaggagaaggggaatggtggggctgctggttctaaggggtccaggtgtggcaaggattgtgggtgttttagccgggacgaatccgccacgccgtcggagcacaccgagcagtatgacctcgtgccgttggaccagcaagtgaggttcgatctcgatgagctgctcaaggcatcagcatttgtgcttgggaagagcggcatcgggatcgtgtataaggtggttcttgaggacgggcttacgatggccgtcaggcggctaggagaagggggactgcagaggtttaaggagttccagactgaggttgaggccattggcaaggtccgccatcccagcattgttaccttgagggcttattactggtcttatgatgagaagttgttgatatatgattacatccctaatggcagcctctctgcagcaatccatggtatgcattacttatttgctgagtttcacatgactggtcaattggcataagaaaagtgccacagtagaatcacatctttgcatatattatgattttggtttgttaatttattacactaggactcaaggacactaattaggtatgcttttggccaataactcttccctctgctctagaaattagtactaggaattcaatttggatgaacttcgttattttgctaggcgttttttatgctaccagcttatgcaaattcagttcattcattctgaaatagacttttgccagttggctgattcttattttctaggattagtgccatgagcactctctctgttctaaaaaa

SEQ ID NO: 4200 - DNA, 1700 bp, Oryza sativa
tgtccttgattctttgctttaattgggagagcaaatgcattcaagattgggatgggaatggtaaagagttttgattgtttcgttttatgggttttttgtagtgtgaaatcgatttgatgagagatgtgtaacatcctgtaaatattgacacaggtagccgatatctgtaacatcatatagtggcagtggattttctgaaatccacatagattgatttgttctttggcacttctcgctccaggcaggttgcaggcagaactagtttttctttcttgtgtagcaggctatcttgtagaactaggtaggctgataattttaggaacaaagtgactaacagtttttattttgacaaaaataaaaagcagaaatcttttttttgctacaataattgcatttaatcgataatatagatagttgatgtctattaattaatgatttgggtaggtctagatcctcacttgaccatgatgacattgacgaagtgcatgtttgaggaaatggctttttgtaacatttggtttcttttacagaacagaagtgtgctccaggtgcaggtatgttttagaactgggaagcataaactgcaagcaagcaagcccactatacaatgatcagtaaccactccggcaaaactgtttagagcaaatctgaaacctgtatagagcaaagcagttgccagttactccctccgggctgataatacttgtcgttttagacaagggtgaggtcaaactttagaatctttgattgtgaatcaaatttgaaatatttatctttcaaatatagtgactacacgtatagattagtcttaaaaagtactttaataaaagcatttatttgttaacatttttatacatattataataaaaaataatggtcaaagttgttttttgaagaccgtatccttgtctaaaatgacaagtattatcaacccggaggaagaactagtcaggttgactccttgggaagcagagcagtagaaaacttttttactcttatcacttggcttggaagcatcatctccatttgcttggagttcgctaatcacgtgcaatgatggcaaagcaaagtcatcaaacatagtccatcgctgcctcggggctcctcaactccttgtcctgcgtatcgtccgacttgtttggcttggaagaacgcatgtgccagaggagatatacagagatatctgtcatcttcacggacataaaagttgcaaaacggatcgaacattacacataatgccatcctgttgtttctgtgattactatcagaacatatttcaatctgtgcaatatcacagattcacaaagttgcattagatatgttaggctgatgctgtcgaaaacaacgattgccatttttgactttgaccactaatttttactacatccgtcccaaaaacttgaccatgcaattgacaataccattgcccattaacttgaccactaattactgaggcttgagtaaatttcagataattaaattatcgctgtcggtcactcaagtaaaataaattctaggacttttgactctgccactgatcctgacagcgatcgaaatgttgctttctgcaatgttgttggagcttgaggatcgcataattaaacagcccatccatttggaaggtgtgatttgtaacatcacgggggaacaggttaggacacgttaattagctacgtggtgcgtgacagcgtgagtgagtg

SEQ ID NO: 4201 - DNA, 6630 bp, Oryza sativa
tatcctggctctgccactgagctcacctctaggaagctcggacccaccttcgtcgggtctgcagcacaggccaacgccatctcctgcgaagctagagcattctcttcctcagccaccaccaccattgtctcaccaacaaagctccccatgaccggaaggattggccatagcagggaggagctccatggagaggaaataggggtgacgttggctagcgatgacgtcgtgctcaacatcccggccatcaccgttgcccgccgtcaatgtttgtcgtcgatgtagttggacatcgccaactaccatgcccaccaacctccgccgcttgcctctcctactgacatgtcattggccacgctggactttcccgatgtcgtgccatcagccatgtctgtctctcccgcctccggtgaccgtgccaccccgttgttgttgccctggccatctccagccatgttggcctcctgcgtccgctcgaccccgggccaggcctgacatggaggcgccatatctggccgtgtggacgctacatccggtcatggtagcataggatctgcggcttccctcaccatgacgcgctaccaccttgtcggggtgcgttgtcaccttgctacgcgttgcgcctcctcctccacgttagagtcgatgtgttgtcgggattaggccccgccaccaccatcctggtcgcatggttgctcggcggcaagacggagggagggggaagggcgggctggcagtggtggctagggttttgcccctgagctgcccacgcagggacgggcaccctcctccttgttagtatttacttcgtgtccccaggtcaagcgtgcaattatgttttaaaatctctaagattgataaactaaggccttgtttagttcccaaaaacgtcacatcgaatctttggacacatgcataaaatattaaatatagataaaatgaaaaactaattgcacagtttgcatggaaatcgcgagacgaatcttttgagcctaattagtccaggattagccataagtgctacagtaacccatatgtgcttaacacggattaattaggcttaataaattcatttcgcggtttccaggtgagttatcaaattagatttttcattagtgtccgaaaacctcttccgacatccagtcaaacgtatgatgtgatacccaaaaattttcttttcgcgaactaaacaaggcctaagtctcatatgcaaatgatggaagctactgaattgggaaaggattgcggcaaaacattgtaaaaagtaaatacattaaagagactatgctccacaatgtgaaacctggacggtgtgaatgtgtgtgcaccaatattgtttcttgggacctgtagatgcacttataactatcataatgttctcatagcaactctggactcccctggcctaggaaggaaggtttcttctctttcttattctacaaacctgtttgtgtaacaaaatatggtttccattgggaaacatgaggcccctgatcataggatattttccatttcttttacacagtgcaaaaacaatctcatgggtcacgaacatattaaagatccacaggaagccaattgtcctagtggcgacataagtcatatccatgatgccatgctgttttgttacactacattaacaagatctcactattagaaaaatcatttttcccgacgtggaggtcctttttttcgcaggcggacatgatccttggaaccaaatgaccgtctacgaaaatataaattggggtgaagttcgctgaccacttaagtggcgcattttcgcaggcggactacttaagcggcgcctgcgaaaatctattttcgcagacgaaccttatatggtccgcctgcaaaaatcgtacctatcaaaaaaaaattaagtacttatcttctcctccacccctccccaccactcatttccctctcaactctctctcgctccctcaacacttctcccaccgggccatccccctccgctctcctcccctccctccctccccgccggagggggagcgaccgcggcagcacggacggcgtggacgtggtgatagcggcagcatggacggcgacgtcggcttctcccgacgcgctctcccccagatccggccggagggaggccgggggagggctccgatggtgaggcgcgtggccggcggggtgtggggtggtgacaacaacgcgcggggcggcggcggcggctcccggcacggctcccatcccctcccctcccctcccagtccggccggagggaggccaggggagggcggcgatggcgaggcgcgtggccggcgggatggcgggcggcggtggctcccgacacagctcccctcccctcccctcccagatctgaccagagggaggccgggggatggcagcggcggcgaggcgcatggctggcagggcgcgggacggaggcggcggctcccggcgcggtttccctccccttccctcctagatccggccggaggtaggccgggggaaggtggcggcggcgaggcgtgtggccagccacgacgcggggcggcgacgatgacggctcccggcgcggctcccctcccctcccagatccggccataggaggccgggggacggcggcggtggcgaggtgcgtggccggcggggcacgttttattttttgttcgtccataggattttcgcaggcgggccattgcaccgtctgcgaaagtcattggtatacaggtggtccccccctccgcctggaaaaactatttttggccgcatgcaaaaatgtttttttaagtagtgtctaacaagtctctaaatatatagtggatagctaaccacctgcactgtgcaataaacagcggtgcacttactagctgaaaagactatggatggcgcaatacgatatatgatatacgttcagtattttacaactcgccgtgctcctgaaccagcggccctgtatgagattattagcgagctaactgaacccgaagcaggcatgcaattcgtcgagcgcacctgccgcgcgtcacagaggcgacagacacgggacacccgcagagccaccgaacggagggggcgcaaccgctgaagcggcaagcaggtgaacgaggagaagcacgcggacgcgggtgggaattggaaggcaaggatacgaaccagttgaaggccttcatggaagggacgaggtttacgaggccgccgaagccacggatgaggtggtccagtcgctccggcgtcacctcctccttgaaccgcgccagcacaatgtgcttcagcacgccactcctccctgccgccggggtctccgctgccatcgccctgtggcttcttgctgcagtctcgctagcttctctgcgcgctctccctcttccctctgttctcgactcgactcgatcttctgcttgccatggtttagaacttagaagtagaagcagtgggtggctacaacctagaaagtggttgggccgttggggttggtgtgtagtagtattgtgtatccccacaaaatgggcaccttggtaagagcaagtttatggtctagtcactgatacaaaattatcatattatctatagctaatatacggctccatcatttcgcttattcgtagaacactgttacacaaaccctttgtagccccggtttacaactcctttagtccactgctgcacaaaccctttgtagccctagtttacaacccctttagtcccgggtagcaaatcggagctacgaatccgggactaaagatatatatttttttttgttatttgcatgtgcctcctccttcctccttttttttttttgctttttctcttcctggcgcgctcctctactttttttcttttattcgtttttttctctctcatctgccatttttccttctattttatagaaaaattaaaaatacatcgatgaattcaaggctacaacccatgatctcatggttcagaacaaactctcctaaccaattcacccatatgacgctatttgatttgagttcattatttgctttctctatatagctgttcaaattttgtaaacacaaactcgttatgttaatgtaggaatcatatcttggtactatgattcggtagtaacattatcgcagaagtgcagtaacacgatacgttactgcgaaatgtataggtataggtcgttgctgcgaaatttataggttgttattgcactctttacagtaacatcatgataaaattgcagtaacagagaacatatagtagtaacggtactactacagtaccaccgcttgtgcatagctaaatttttaaatctcaatcttgtgcaaaatacaagtgcaaaaaagtacttctctttgtctattcaaagatacatagcagcaagcttagtacaagtaaacttttagaattctaatctttaaacaataatatctctcacatcgcatattatttttagaaccgttttcaccataatgattagatccgtcatgattattttataacgttgttactgtggaaagtagtcgtgttactgcacattgaccgtcgtgttactacgctgttccagcaagacaagaactaaaaaaaaaagtaaatctcaatctttagagagcaatatctctcacgttatatagtatttttttaatccgtccacaccatgatgttcgtaaaaaagtacttaataaaactagatacatcatgaccatttttcgatgttgttactgtgagaaagttatcctgttactacacgatgaccgttatattactgcggaattcctgtgagacgtgaacaacaaagtggtgggtaggggagggagtcaatgggcgggtttgaccggtgttgatgttcgttagtgatcagtttcgaccgtcaatattaccaaaatagaggagaactagttatgcttgcaatgtgtatccattttagaataataatattccactagtatttggttcactaaccttttgtagagaataaccataaagtggaggagaatcgacatcgaatcagacgataaatcaatcggacgatgtcgagaatcagacttatgcatgaatgggcaaagaactcagaattgacacgatgaattgggccaaaattcacaagtctgcacaaaggagcaacagaggaggccacctaccgagtttgggccaggagggcatcggatagagggtattagctagtatgtcatataactaggatgtatgtataccatgtatatagattctctttctattttctatccacttagcttatatactttcatatgagaatgagtattcccttgcttgtgtgtcactctaccctttgatttatcttaacccctgcttggactatgattattataagtaacatataaattattagtcaggttctctctattatgatctttccatgggattaaataaatacgatacccttggaatactctcgggtgaaatgctacaatggtatatccatgcgcttgcggatgaactctgtaaccataatataccaggagtatttctgcgccattgctgggaattatatttctagtaatgtcgttaagaaataccaacaaccgacgagaggtggctttgaccagcctttgactgaggtgggaggggggatttgggccctaggaagggtggggaaggtggaattggcccatgggagggggaggagtgtagaatagatttgctatatatatatttagcaagattgagatttaaaaatttagcaatgcacaagcagtggtactgtagtagtaccgttactaccatatgttctctgttattagaatttcaccatgatgttactgcattactgcacttctgcgataatgttactaccgaaatatagtaacaaggtatgattccaacagtaacataactgattttgtttcacacaatttgagcagtcatacaaagcatacaaataatgttctctattcatataatatcatatggtgaattggttaggagagcttgcctgtcacgcccggaatttctatccaaaattccaaacgcttacatgtgtgtaaaccctcgtccaggaatcagccgaggcacacaataacaaattgataatagagtataattattactctaattaataagcgaatataatgtcattacagaggtagatagttcctctcaaacaataaagatctaagcagcggaaaataagataaacggcgcagacgactccatcccacaagcagctcgaccagggctatgcctaatcatccacaccttcggcatcactgtagaactcctcctctgatgaatgattgaaaggtgagtatatgacatactcagcaagccacgcagcaaatatgcaagtgcaagggataacaaaggatggcataacatagtctcatttgcataaatagcatttaataaatatttcagaatttaataaaacagtaaggtattaattaaacaatattaatccaacgctatacaacatacccgttgcataggcccaaccattctgaacaaccattcccggctgcacagttctatctccaaaccaggaatataccattccaaactaggagctaaacaaattattaccaattacagcatcatttattatggtgagaggtgtgaaactaatcacgaaagacattgttaggccgcccataaccgcgggcacggctattcgaatagttttactctggccagaggtggaccactgtaccc

SEQ ID NO: 4202 - DNA, 517 bp, Oryza sativa
tattgatctttgggaccagccttaatgtgattgaggaggtcaaggactatctgtccaagagttttgaaatgaaggatttgggagaggctgatgttattcttaacatcaaactacaaagaggagatgagggtgggattacacttgtgcaatcccactatgtggacaaggttttgagttggtttggatatagtgaccgcaagccagctcctactccttatgatcccagcgtgctattaaggaaaaaccgaaaaatagcaagggatcaactgagatactctcaaatcattggttcattgatgtacttggctagtgcaatgaggcctgacatctcatttgctgtaagcaagctgagccggtttgtcttaaatccgggagatgatcattggcaggctctggaaagagtaatgcgctatataaagggcactatgagctatggaattcactataccgggtatccaaaagtactagaagggtatagtgactcaaactggatatctgatgctgatgagataaaagc

SEQ ID NO: 4203 - DNA, 684 bp, Oryza sativa
gatcgaggccgccaggggtgacgacagggtcatggcgaatttcttccccatggccctgagaggacaggcgcggggttggctaatgaacttgccacccgcgtcggtccactcttgggaggatttgtgccagcagttcaccatgaacttccagggcacatatccgcgcccaggtgaagaagcggacttgcacgcggtacagcgaggggacgatgagtctcttcgctcgtacattcagcggttttgtcaagtccgcaacaccataccatgtatccctgcacacgcggtgatctacgcgttcagggggggcgtgcggcacaaccgcatgctcgagaagatcgcctccaaggagccccagaccactgcggagctttttcagctcgcggaccgtgtggctcgcaaggaggaggcatggacctggaactccaccggttccggtgtggcagcttcagccgcccccggatccgccgctcggtcagggcggcgggacgggaggaggaagaagaggtcggcccattccgacgacgagggtcacgtcctcgccatcgagggcgcttcgcgggccacccgaaaggggaggcctgcgagcgacaaaaagaaggaggccggcgctcccagcagggagcgcccgaccggcaagtggtgcaccgtgcacaacacctccctccacgacctcgtggactgccg

SEQ ID NO: 4204 - DNA, 13607 bp, Oryza sativa
caaccacatgagacaatggtacagtactacagttgttcaccttgctagcagacatcaatttgaacacaagcatatgctacattttggctctggttaggtctatgaaaatttatgaccacaagccttgtttgggtgcatttagacatgaaatttggggttctctagagctatgaccataaatgtgcagttttttttctcgaaaatgcaagagaactgcgtttcatttcattaaggggaagaaaacaaagcgaagataaatgtgtggttttaagcgatgtattaataagaaatcatggaagtatgcatgaggtgatgactgcaagaaatcagagtcaggttttatcatttgtgtttagaagtaatatccttgacaagtttatggtgtccagccaaaattttcctagggaagatccagtttgttcgcacttgtttccttctccttaagtcattgtatgtatagtgaataataagataagtctttataagtacatcaacatagcatactgacattcttatttgatgatctacagtgaggataagaggattaggaaaacatgtcaaaaaatctgctccctagccagatggcaaaaaaacatattctacaatgttttttttttaagagcaagggttttcaagattctatatttgaatcaggtatataacacataaaaaaaagcatctattctacaaggaagaaagatgtcatttatgccttgaattggacctttttaaaaaggcaaaaaatcagacaggatttctggtttttctctactttcttaaacctagtctgcaatatttcatttttttttgaggcagaaaacacttctcaacaaattgcacgcaagtgtgtgtgtgtgtgtgtatgtatatgtgtatgtatatgtatatgtatatgtatatgtatatgtatatgtatatgtatatgtatatgtatatgtatatgtatatgtatatgtatatgtatatgtatatgtatatgtatatgtatatgtatatgtatatgtatatgtatatgtatatgtatatgtatatgtatatgtatatgtatgtataaccgcagttaaatgccaatgtggttatcataactcataaagccatcagccatgctagaaaacagatgagaggatatttgtttacaagagccatcacaagatgacacttagattgagactggagactttcttttcaatgaatctctgcatctaacatccggtttgtggtgcctttccaaatagatccggagggttaataggtatatagttacgcatttatatacaactcactatcaacatatatctggattcaagtatacctcaacaagcttttccacctttgtaaaatgccgaccaaacgaactgtagcgagtaccataaatgaaaggtgatatatatactctgagcttactctggaaggacaaacaatcaaaagttggtaaaaattagtcaaataccattacattgcaaggtataagggaaaattttccacccaactaaacatcataactccaaagtaattacatattggagaaaattagtgctcattcatgcaaacacatagtgaaaaacatataagattgcaacttttcacagaaaaaaaatgtactcaagtcaagaatagtagatgttttggacatgatttcagacaccatttggaagcagcgaaatggacccatttttgataatgttccccctctgtcctctcttggatggcattctttaagaatgacttatcccttctttttcgtttaggtatagatgagagatcaactctttcctcctggttgagtcgtttgtaatttactttattttattataatatatttactgtgggtgcttcccctacagtgttttccctaaaaaatcagataccaatgctggggtggtattatttacccctgttaactccaaacagagcatacccacattagtgcaggtactgtaactccgatgcacattctcttccaaccttcctactattgccatacaatacacttttttttaatgaaaactagtattacactattactagtagttgctgaatcctgtcctccagccagcctgtaggtcacctggtcactgctgttgcctccatgactgtgtctagagggagtgagggactcattgtaccaaggctgtcactgcctctttgtgactgttatgcactgagtcactcataagggttgcaagcgtcccacccctactagacaacccaagtgccggacataccctcccaatggccaagcctaaacaccaggattaccttcagcacccacattggtctggcttgggagctacccaatttgagcttaggaacagatattttgtatgtaatgcgtggtgagctcagccaccaaatcaagagctcagcaaattagtgatagatcgccccaagttgcttctgtggtcttcttttgctttaaacaatgaaggtagtgttaggagatagcctagttgtagtagtatgtgcgcattcaaagaacaacttttatggcaaccgcaagataattaaaatcaattaagggcataaggggcaacactagactaagtccccccccccctcgcagggaaaaggacaggtatacttggatttttccaaataaatccaaatgacagctattcctgaccagacccatcggaagcagatagtgctaaaacctccataatatagctataagttagtggaggagcacaaatttgcactccaaagcccaaatggtataagacatcattcaagtaaaagagattacttagtaatgccagtattaatggaaaacacaagtaccagttaaaacataagaagagtaccatacatatttcacactagatgttaggaatggcactattaatggaaaacacacaagtaccagttgaaacataaaaaatatgtataatacatatttcacactagaaagcaaatacgcatcacatctagatccaggagagggcctgtgcagtaaaaatctcaaagcaggaataatatataaagattctataaaataatgcaatgaaaacatagattaatatatgtctagtatttacatacatgccatcttgtaagctgcttcaagacttcaggttcacagactgctttagcatcattaacattgcctccattttccagcatttttaaagctgcccctacagcctacaaatgccatcattaagaaaacagagtccaaataataaatagtgtgaactgggtatcaattcatgttagaactaatgacctgaacagaacgctcaagcttgccagtcgcaataatcctgtcaacctgcctgcccgagtatgcatgagttgaaggcatcaagcactttcttgaaatatcctttaatgtcaaataagaggcttctctttccaccaaggccattaccctataagacaaaaaaaatctgtttcagctccatgaggattcttaaatataaacactacatactgtctcataatcatttactctgcacatgacaagatagaacaaaacaatttaaaaagaacagaatatgaaagaaaactgtagcaatataaatataaatgactaaaaaactaaaaatgcctaggtacaaatagttgtgacctcgatccccagtaattatgtagaagcgactcacctcttctctgtttcgctatccactctaggaaatgaactttggggtatcttcgtagaagtagatgatgaaggcatagttaccaacagttttccctgctcttttgcaggttttgtaatgcctgtagaagcatccttgagcagacatggatcaggctgtggtgtatctttcaagaacctggcttttttcttatcgggtttgacaacaaattgctcagatgaactcctagcactaatctttctggctcgatcactttcttgaatgcaaaccatatctggcagttttcgaagttctgttgaaagttgatcaggaactgactcactaaaaggcctttttttcttaaccactttggttgacttctttagaagtcttgcaggtttttctatgtttggagtacgagggaactttatatggtctctgatcggtgtgtcaatgtcagtatctatctcatggtccctgtaacagtttgcaaaaaatcattgatatgaacaatgttgacaaagcaagtagcaagactgtggataagtcacatacaagcaatagatcaaaattcttttcgaaagttcccaagcacgtgtaatagcatcctcattttcactatcttcaaaggaaatttctctgaaagaatttcaatttccatgagataaatagaagatattataaatgaaatggaacttgaaaagacaaaccacttgtttcataacagcacctaggcaaacactttctgtgatacgactttgggcagcgtctgcaaacagcaaactgtaattcctcttgagttctgtcctccaaacctttgcaatgaaaacaccaatggctggggcatgtaaatgaatgtccatttgctatcttcatttccagttctgaggcttcatttttgtttttagaatgaagttgtcgcgcaacacattttgggtggtaaaagtgcccacacgtggcattattacaaagaaacacctaaaagaaagatgacaaaattaacaaaacataactagaacaaagccctgaaaaagcatcccacacttagaatttatgatacggacttccaaactgctgaactatatagcgttacttcctcttgagtgaatctaaaataatcaggtgttaccatggcggcattaaattggcccgactgataattgctacatcgttacacaacttctgtcattagggcccatatagaagcagtcaacaaatccagggccagcggtactgtacatgaatagtgcccacgtgatactgttcaagcaagttgtgtacattagatcgatttgttagctatttccatcagtaccatcacctcagcaccatagcgcgaggcactacaacgctacatgaggtggctgaggcatgattagtggaaaatattggataagcaagagaaaagggaaaattgaataaaggcccactaaaacttccgctagagattcaaaagctgcagcaatctgctagatctgatagtagtggcgtggaatctgcgacagcaggccagctgtggcaaggaagaaggtgactgcacacttaaatcaacaacccgctgctttctgtcccctttttccttggagctctaacccttccttctcctgtaagacaaggcaccaacaccttacttcctctgtgtgttttgctgctgtagcgacaccttaaccatgataaagttccttaagggtcaagtcatcccagctatataaggatgaggtcgtatctcaattcattattcaaaaaaataaacaagtctttgcatctccctcttctccacagccattgtgatgcggctgccctcatggcaccatcgcacccgctgcatggacagctcaaacaggcctatggggcccttatcccaaacatgccattagaactttggagcttacaagtagaatgctatagcactatgccactatggccatattcaacaataaaattcactgtatcataaaaaaaagaataataaagaaacagtttttttatctaattagaagtgagcaatgacagtataccttagcagctggtccatctgaaggttctaaagctccacatataaaacactgatgttgcttatgctcacaatttttgcacaagaaagttttcattgcctaaaaatcagtagaataagataactcaataaaataaaaaaggtgtagatttagagctctctttatcactcaaaatgttcaagggctacctgaacttctgcctcagtgtacccaagtgtatcacaataggaatcttcaccagtaccgatttttgcatggaaggacctcatacatggaccatcacagctacagtaggataatatgtaaggattaagaattggtattataggcctgacaaaactactccacagtatttacagggaatttcatatggcaatgatgaaaccagaagcaaaatatcaatgaaagcaaagtatgcaatgttgttttaagcaaagtaaaaatcagtaagaggaactaaagaaaaacaaaattgtaccattgtactatcatttttgttgaacaatggataacaccatagcagacagggttcagtcatgatcacatattccatgtagactaattatgtgagcgctaaaacagttagaaatcaactaatttaagtgcagactgaatggacaatctttctaacattgcatggggcagaatcactagatggttcattacttcatttggtaaacaactagtgtttcctgataaaaacaaaatggtctgaacaatttgctagaagaacatgcagaggaaagttccaataacatttgaaattatcatctacaggcaaaatatgttattaataaaagtaagaaaatgatggagcagctgtacaaaaatgctcaaattcttgaatgtagcagccttgattggatctgttttgggggaacccaaaacctacttaaattcatttgcattcttagtttcttgtagattgttttttttggaaaaagtccaaatacccacctaaaatttggatggaaatccatctagcaccctgaactttaaaaccggacatccaaccccctaaactttgaaataccgttcatattaccccctaaggtggttttagatggtggttttgcatattttggaagattaaacgaacaactttgaataactaatataacatatgtgcatatcgtcagttgcaagccattaaatttatatttatacagtgataccatactatattatgttggtacttgtttgtaagtgagagctaacaaggggtaaagagaaagatttaggtgatcttaatatacaagcaaaatcttcaagctcccttcaccaacccgctcaccctatagaggaagcaaaaccagattgctcggccagccacagcagcctccttcctcacctgacctgacatgacaagccacctttaccacacaaaaatatgccccctcggcccaccgggcagcgatcccccggtgaccctgtccccacccacgtgaccccaagctccaagctcccttcaccaacccactctccctatagagcaagcaaaaccagattgctcgcctagccacaaccagcctccttcctcaccttatgtgcgagccacctttaccacacaaaacacgccccctcggtccaccgggcagcgactccatccccacccacgtgactgccccagtgacatacattaatgtgtgtgtgtccaatcaataaatcgtgttcaaaaatagacatggtattgagcgttgacatgtaatttcgtgtgtttagagtggaaaggttaacaaagttttgttttggatagctttatcagtgtcccatttctaaaccttcgaatgaaccatgccattatacatatggtaaacatgaattcatggtcaagctcttacgttattgatgtacattgccttgcatcgtagaataaatatattaccaggaaagatgttttttattacttttcttggatggttttaaaaactaaagagtgaacgtgcttgatatatgagttgagagtcagattttaaacatataagatagttgataggagcatagacttattccttccgttttaagtatatgattagttggcaccctgtgccttgctgcaggatttgttagttttatcgtcaaagaaaatcaatgttttaaatgattaggtgcaactctgtgcatataaaaaataggtgataatgtggcttcataccctatgttattacgatacaatttatgctttacttttcaaagctttattgtgtattgttatttccatgtgtaatgtggatgtagtaccaattagattgtttggacctctctgcttcatctcaagtttgttctgaacatgggtttagtatgctatctaattgttcctaataaacaaagctcgcatctaagccaataatttatgttgtattcaggaaaaaagatatgtttgcgttatctttgaggactttgggaggaaaaaacatggtgttaagtgtagaatggataacactgtcgtaggtgactgtgaggtgaatggataactaatcaatgattgagttagatgaataaggctgtgttcgttctgttgagttgggaactcattccctccgtacggaaaacggagcaacatattttcttatgtttaattaagtatttactttttttgaaaaatggattaatatgattttttgaagcaactttcatatagaaactttttgcaaaaaacgcaccgtttagcagtttgaaaagtgtgcgcatgaaacacgagagatgagttgggaaaaccgggggaagaacacaacctaagtaccttgttgatccaacagttgtatctttgtaccaatgcgatctaatggcttaaaattagtgatgacatggcttcttgcgtgtcttgctttataggagtaagtgctacttagtgggtaccaattatatggtaagatacgatatgtccagtgtgtatgtcatgcgatcaaactcatccaacttatatacaaattagataaaaaacactctgcaaaccaccttgaggatttatataaacggcattgtaaagtttaggggggttgaatgtctagtttcaatgttcagggtattagacggaccttcatccaaagtttagggggggggtagactttttcctctttttttcaaaaaaaaaaaaaccctatgtagagggacttttaatttcccttgaataatttaaatacctaagggcctgcatggacaggagtgattcagattttaatcaaactatttaaccaggaattagtgataccatcacctgagtagctactttatagaatccaatttctcaaaatctaatcccaaagaccaagaagtcaggcatgatctcattgtacatgagacacaggcttcaataggcgaggacatgttgttgttggacagctagaaaattcagacattgctaagcagttaaacctgatagctgacaaagtctttagaaaatgggagcaaaactttcgccaggtaatatggaccttcctgagcttgacatcgcaaataattcctatttctaaaagcaagtatctgtgccaataatgaactctccccgtgtatgttcaactgactaattagactagaagtcgcgtacattctgaagcaatgggaaaggattttggatgatatatcatctgtataaatatcaaacttaccataacagatctcctccattgtcacatatgctacagattgaatcaaataaatcttcctcctcttcttcatcagattcaatattgttatccacgtcagccatctcctctatgtcctcatcatcagcaatgaatggaactttgatttccactttatctgaaccaacctagacgtaattataataagggtaataattaatatcatagatcagtttttcaaaattttctagagaaggcacagtcccaacgtacctcactaaactttttcctagaagtttcttgagtgaagccttgcaaaatctgtaaaaaaaaacatgataagatgtcaccgtaaacagcaatcaagcacattgaagagttgttacaatcaccagagttaaattacactatactggtgttattatccatatcaataatcagatggtgcgtacctctgatttagccaaggtcgagtctttctcagcaaaatgcttaattagtaaacggtgatttcttaagtcatcctctgagggtctaacctcaaatttgctgcaaaatgaaaatgtttcaacaaatctgagtttttgtcatcaggcgaagaatggacagatagtgaatgaaggagtactcgaaaattttacgaagatgactccacaggttcttttcaggctcctcaggcttctttttgaggaagtgaagcatctgcacggtgatcagtattgtccgaatcttctcctcatagctgttcttgggttttgtaaggctaatccagctgccttctgctgaaagaacagaaatctccggctgcttgccttgaaggcctagcttccaagcgatcactttcctgtatactttgatgccaggatcagcagttccccacaagaagacatccttcttgcattcaggaacctcatcggtgtctttgaactgaaatggcaagactgataaacagacaggcacctcccgtgcatcaagaaggtagtaattatccaccgcattcaactgaggctcatcgtcatcatcgtcgaacatcatcctggataccggattcttcgccattgattctcaccggatgagttggacctagcgtggggcatgtgggttcagttgaaccccaatttttttctgggaacaattgaactgtttattagtactagggttaaggcaaattagggggaaaagcagcttccagatcttaggggagaagctagggctaacgcaaattcgagaagtagcatgggtgggtaacggatggatgctcaccagcgacagcgagctaggatgcggcggaagcagcagcgacggcggcgccgctcctcgtcgcgggatggagatcgacgcaggcgggcggtgggcgaaatccgaggaaacggccggccaccgaggggacggggagattgacaggctcttgtcttgcacgggcgcaccgccgcagcccgcaaggagtcgtggcttttcctctttttttccttttttttcttaaggaatcagaggagtcgggagtcgggactcgggagaggagagacgagtaagggctatgagattagtacatgataattgtgaagcgagtatgggctatgggattagtacatgataattatgcacgtgcaatgcacgttgtggtcaatatttaaactaaaccaaacatattgcacctaaagatttttttattgatatatattaagagcaggtacaatagcagtctataagctagcaataaatataatttaaagagataaaggaagagagagaagagcagcggtctacatatctgtagtcagctgtagcacggactacaagatataatatgtgtatgacaggtgggaccatgtattaatagtatagtaagtaattattgtatgaattagctattacaaaggctatagatgatttgaagctagtagtaggctatactattaaacttgctctaaattattttaaggctactatgtttgcgcataacatagtgcttactattgctttagaaaatgaaaagataagaaagatctatagcttcttttctatactttatactctatcattgacccaaccaactaattttattttcaaacctaaaagttcaaataacaaaactaaaagagggcaagatgcatatcatatggaaagatggcaaatgccacaagaccaaacctgtgcaccaaaatttgatcatattggtcatgtgtagttgccaactgatatatatgtgattgtcataaggacaccagtttctcttacataccaatttacacataatctcataagacttgaatcctggatactccaattaattaactttgcataaataattttgtaactccataggatctaacaataaagaaataaaaagccattgttctttgcataaataatccaaatgttcattgttctcataagctccaggtcctgccattctgccccaaaggatttgattacaccaacttgaacttttaaccatgttcaatgctgtctacttcgaacaatagagctgcttctccataatatctgattcgagatgtcaacttgcctctcacatgaaagtatagaaccaaggttataggaataatatataatttctgaaataacgacaaacctgaaaaattttgtagtccacctgttgcttcattccgttggcctttaccaaatttagaagttagacacaactgagctcagaaggttcaaactacactcttttcccttacttgaccacaacaccaacatcaaagattcctggcgtaagatcagattagagaagaggcaattgcttaagaaaattctattatttaacaacaatatcttctacatcactattttttatttttgtggagcatggtataaagaagaaatggaaaccattattcatatttgtctatacatatcatgacactacttagtgtgttcaactgaatattcactaaataaatttgtaatcgtgttgtttatgtgttgtgagctgagtcaagtagagtagcatacatatattcataagaaaattcgctgcatgagattggcactggatcaataaaagaacatgttgaactattgatcgatgcaatagtttgacacacatagaccaccacatggcccctcatgggtgaaaaacataatatagaacaattggattatgcctgacaattacggggtcatgttctttcttgacctgggaagaaagatttcagctcttgcagtttaatcttgcatcatgtgcagatgtaaaagaaattaacagctacatctataatttcttttagaatttatcatgttaatttagaacgaaagtgaaacagtacctcatagttaagtaatgtcaccatgtgcaagcttcattttcaaatcttcctctgaagtatatcttcaagcagcataattttgctgagaaatcaacctgagataacagcttggttgagcatatttcgttggacattatcctataatagagaacttttacggtgtttgcattccaaaaagggtaaagatccaacgctcctcaatcacaggtactatgttaaaggtatttaagtattgatataggtatttaggtactaagggtaaaaatataattttgctagtagagtgaaaagggtagaattgtcctccaaattataataggtaccgcataggtacgctctacacggtatcagcgtatcttacacagtatcagcgtatcttttacgtggtttcttgaagatttacgttgtattcgagttaagccaccgtagtgttctttgatgttctcttttgcgtagatttctctagatttacattgtattgttataatacattagtagcctaattatgtgaattttttctacatttacattttgttccaacgaacacatgaaaactcataccttaattctgttaaaaattatagtttgtttctagcaagatatttatattgtgtttcagaaacatgaccagttaaaatatcacccaaggttagcatcaatttaaattatacatttcatcaatttatgatacttgcttccaattgaacatgctatgtcaagttaaccaacaacatacgaacacaagtagtctgactcatggtgagcatgctcacaaacaccaatatcatatccgctagataaatatgttatacaaacttcatcaacaacagcctttttacaacaaaaggtcataggttcaacaacaggctaactctaatattagttcaacgcatagcattctgtaccattagcctatttacattccaacattcgcacatatacaaccaaaaggatgcttctgggacatggcggttaaaaaggtgcttagcagccattcatagcccttaacagtttcctctgcaattatgccacaaccaaacacaacagtgctccggtgctgattcaatcccacaaaaggaataaatggcagtttatacctgttggtcatgtatgtactgtcaaatacaacaacatcac

SEQ ID NO: 4205 - DNA, 4617 bp, Oryza sativa
acgcttacgttgcatcagaagtcaagagacaattcaagccttgaagtccagaaaagaagattcctatagaccccagtgccaggaacttcttcaggggtatgtctgcatctgtcaaggaggccatcaagctatcggactatgagcgaacgctgaagaaagcatcttctggaaagtccaaaccagtccctcagcttggagagcaaccaaaccaggagatcgagccgttggtgaccggtaaagaaatgacgatagaacaatttattactgacaccggtctaactacggatcaattgctaggagtcgcaccaatcgaaaaggtggaagtgaaatacatgtacgaactcggtaaaccgcttgtcaagcctgagctgctgcagtccctacccacacaaatgtacaagttccatcagctgtacacggagatgagcgccaccggtagagagatgatcggagcgaggatcagggacacagacttcttgcaaggagatgacattctctggatcaatttcaggggaatctacgaactataccagctggacgccctcgacgtctctattatgagttgctggattttgtaagtatatcgttcagttagatttcttactatacgtctcctttaattaattaggtccttgcatataagtagactatagaaaaaaatatactcccttttatcgttgtagaatggagattcaaagggcccgacggcggagggttttcgatactggattcatcgaccctcggaaagtaaacgtcgcaatgctcgaccaatatccacaagaaacagaggacaatctcgtccatcctctgaaggcgcagcattacaagacgttcatactgttgccatacaacacagagttagtttaattttactgtcttcctacataccaaatttcattcccgtacgaacttgctaagtgtttcatatgtaatgcatcccacgcacattgcagattccactgggtgcttttactcttcgacctagaggcctgcaccgtcaacgtatatgactcaatggataaaaaagagtctacgtttgacaaggttttcgaacttatagacaggtaccgtcataagttcctttgttaattaagaaaatcttgttatgttaattgctactacgaatcatagctttaaactccatgtagggcttggtatcggttccgtcatttggtccgcggcaaatggagagaaagacttaggcggaagttcaaatttcctgtgagtacacatgctctacatttatatttctccgattcaaatacatacaagtgtatattaattagatctctcgttgtttgtcatttatttgtagtgcgcaaagcaaaagcagggaactaacttgtgcggctattacgtgtgcgagtattgccactgccttgcagaccaaatcatcaccacaagagagctcgatgtacgtacaaataaattcaaaatttcattacgtagcgatttcttgtttaattactaatcaatttcatacattcatatagtttattcgcatgagggataacctgaccacacacaaggaatttatcgcggcggttcaagaacaactcatttgattcatcaacgaagaaatccttgatcccaagggtgaattctactacgacggaaacacaattcaccggtccttagcttttgagctagcagcgagtactactacgtcgaaatcgtagctagcgaggacatataatggattgtaattaatacatgactacatatgtttctatatgcatatgtacacattttctataatgtaaatatattttggtcatatatatatctatatacatatgcatttgcataacatatatatgtataaatacatatatattatgcatgtatatacatataatataatataatatatatatatacatatatatatatatgtatgcatatatatatgtattgaaacatatatatgcatggtttaaccgggagtaccaatatccatgcaaaaaaaaaaaggtcagctcgatctttagtcccggttggtaacaccaaccgggactaaagatggctcagccggccactggttgatctttactcccggttatttcacccgggactaaagatagcgatctttagtcccggattggtactcccggtttagaaaccgggactaaagagggattacgaactgggactacacagggtttctccgccagtgattgtcgccaattatttgatctctcgagatcaaccaagcttcgacgtgttgtcgcggcggaggaccatggtgtcggcgtgatctaacattaatccctcgacgtgtgggacatcaactggtgcgaggtattggtcggctgagtccaagtcgaacccgacaccgatccctaccaaccaagcaagcacgacgaggagccaaaaatctactgctggattagtactaccgtgttctaactaggacaagatttctagccacgatctactggtcgacagcctgacgtcactctgcatgtccctgtaccgagccaacacccatgtgcgcacgtgcatgtatattggccgtacagagctcttatatgtgttttcatgacacatactccatgtttcccaaggtaattagtaagattaatttttaaattaatctactaattccgtaaatatatccggcatatatctacacaggtacacaatattttatatgcaatttatcgtatctattcagatcatacaacattctcagatcaataatttattatgtctacctagagcatattttttatacaatatctattatacgagtgtttccgacattagctgactacggtttaatattgggggctcgttttattttcctatgtataaatcatgcttgtttacggtctacataatacctgatatttacatctgctcgttatatcctgataatactagaagatccatgcagtttttcgaatacatactcgatattctctgctatatgtcttgccttctagaaaatattttttaggaacaattgaggactcgagtgggttgtggtcaagttacaccgcattatcgagaacgatctcgacaaatgcagagtcgtcgcgcccaacctaccaacgaagaccggcgacctatctcatagcaccggccatggctggactactcgataaaaggttgttaacggataattccttgtgaacgtcgtctgcttgatcacccgacatgattgcgaacggacacccggatatgctataagttgggtatgtgagtcatgctggccacatgagatacacatgtaataaaccaactctagcactttcattcgtgttcgagagatgattctactcgctcgctggttctcgaaccagtacgtagcaatctcctacaccacaacctccattggtgttcgagagatgattctactcgctcgctggttctcgaaccagtacgtagcaatctggttcttgaaccagtacgtagcaatctcccgcaccgcaacctccattggtgttcgagagatgattctacttgctcgctggttctcgaaccagtacgtagcaatctcccgcaccgcaacctccattggtgtttgagagatgattctactcgctcgctggtcctcgaaccagtgcgtagcaatctctcgtaccgcaacctccattggtgtccgagagataattctacacgttcgctggtcctcaaaccagtgcgtagtaatctctcgcaccgcaacctcagatggtcgaggtacgactacagcaataacgcagcggtcctcgcaccacgacttcaaatgatcgagagacacctactcactggttctcaaccagtcaatcgtagtgatctctcgtacatttacttctagtgattgagttacgactactacccggttcttgaccagaggtgtagcgattctcccattacctctacttcaacaagtgttttacccagtgatccctcaccataaaagacacctagcattgaaacctatcctaatgtccctttacgccgtcttgacaatgcctctgaggaacctaagggaacttcggctggggacgcccagagcggataaggctttgtcggatccttcagagacgaaagaccatgtaagatctggtcgtgtaagagttctcgccgtgcgtattaaccaagccgtgtaatcggaaattgattttccaacctcacggctaggggctaggatcagtgcttgttcaaccaaggcaggtcaaaggtccaagagccttatcatctgagaacgattctccgacgacaaggctgggggctagggagagtgtataactcaacaaactgactgatcgaagtcggtaaaagagtagacgctcatatacaaaacatttggtctgtaagtttaattcatcttcagttttccatacatattataacatgtcaccctttgagctttcgctcaggggctatttctatctaatattcttttctaagtattgatttcaggaaaattctattcgacattatcgaagaccgcatgtctctatggttctacaccaagatcgactaaggcgagtacgacaaatgttgacaaggctccgtcgcagattctgcgcttctcgatcactcgagaacggttggtggatctcgacaaggaatacggaatgaagaaatggtgtacccgccgagataaaatttcttgacttcaat

SEQ ID NO: 4206 - DNA, 5132 bp, Oryza sativa
aggttgtctcggtccttgaatgagcatggcaagcataatgtactttcttttgaaacacaaccagggaggaaggttatagttaacaagcagaactggccatgtactgtgacgactgctcaaatcaccaaaaggattaatgccgtccgtacacattgcgaaacgcatgtttcttgggtcatttgagaatttctggtaaatcctatcgattgtcctccactgcactgaatctgctgggtgcctcagcatagtatcgactttccgttcttcggcatgccagtgcacaagcttagcttgttccttgttcgcaaacattctcttcatgcgctccgcaattgggagataccacaccacctttgctgggcctcccctctttgacttacttccttcaccttcactctttgctcgtttgtatcttgatcccccacagatagggcagacatccaactcagcgtattccttgtaatacaaaatgcagtcgttcggacatgcatgaattcttctgacctccaggcccaacggacataatacttgcttcgcttcatatgtcgtctgaggtaaattgttcccctctggcaacagatcctttaacagctcaaggagttctgtaaaactcttgtccgaccagccattactagccttaagcttcatcagttccaacacgcatgacaacttgctgtgcttcgacttgcatccatcatacaacggcatctggcaatcttccaccaacttactaaacttctcataatctctgtcgttgtcctctgcgtcttcaatgtcatgcaacattgtagatagacattgagtgtccaaatctatggtctctccacctaaaggagaaggtacgaacatgccttctcaagctgcggcggtgttctctacatcctgatccaacacttcttcagctgcgacatcaggcgcctcttgctctccatgcttggtccagcaggtatatttcttcatgaatccattcattatcaaatgagcatgcacttcatccttgtcttcgatcatctgttcattcttacagtccctacatgggcacaacatgtgcatgctcatcctactttttctgtcattatccgcaaatgtgacaaattcagtgaccccctctctatactcggtagacgaacgatgcgcatagtacatccatctacgatccatctgaaatcaacaacatacgaagaaaaataaatgatgatcgatatgttgagaatgaatggagaataatgtgttttttaccttgaattttagcaaaaaatcgccccccttgccctcccaaccgatttgtgaacagtacaatggtcgggatggaaagcagttggcagtttgggggtatttatagacccaacacacctcaaacgggttagataaaaaaagcccgtcaaaggtattgctcatacctttgacgggcttctattcaacggcccgtcactggtatccgctcacctgtgacgggccagaaatgaaagccgtcacaggtggcggcccatcacctctgacggcttctaatgtatcggcccgtcacaggtgaggggataccagtgacgggttggaagaaaaactcgtcactggtatacctctgacgggttttcctttcggcccgtcacaggtgaggggatacctgtgacgggccgcggccagatgcctcaccggtgacggcatcccgtataacccgtcaaaggtaatggtcactactgaccaattcgtttgcccgtcacaggtatcccgtcagaggtgtgaggatctggcgtagtgcagggagttcggtagattagcgtgtcattagtgtgctaattggagtcaaagacgcagctgcatgctgatttgttcaggacgtgcatgtaggaaggatgagtgaagtctgaactacatgcgcacactgaaattagttggtgagtggagaaattagtgcgtgcatgcaggattagtggaggtgatcctgctgcatattcgtggagtctgttgtgtaactgattgaccgggttgtgtggctaaacgtggctaagtgtgtgtgtgtgcgtgtggggctatttaagccatgtaattagcctgttaatcagagtgtggtgaatacaagtgcagtagtgtgcgtgtgtgcatttgctggtgcagtgccgagacaaattctccatcgtgtgtgtgtgatcttgtgttctagctaacagtggtatcagagtgtgtgatcttgtgatcttttaagtttggggggagtggcaccaacttaaaaggggaggggtccctcacctcatgagctagcttttggggtgtagaaagactttctcccggttaggccaacgtttcccggttttgggccatcaagtggtatcagagctgggcccacaatctctctaagtgccgtgcacactcgtgtggtgtaagcccgaagcccagtggaccgcgggtgtgaggcccgtatgtgcctatgtgttgggccggtcagtggaccgcgggtgtgaggcctgtatgtgctcgtgtgtggagcccggtcagggctaaggggcaccaatgtgtgacgggggagattgttgggaatagtcccacattgaaagtttagggggagtggcaccaacttaaaaggggaggggtccctcacctcatgagctagcttttggggtgtagaaaggctttctcccggttgggccaacgtctcccggttttgggccatcactgccgagtccgagcacgtcgacagttgccgcgccgccgccaccgactactccgactccttccccgaagtcgacggcgacgccaagtcctgccaccgagatcacctctccgcctcccccgacgccaccgcttgcgacggcaaggctttctccttccaccgcgccagcgacttcctcttcgcctctcgtcgactcaccaccaccagcgggcacggatccttctcccgcgtcgactgactccgcgcagacatcgtacagagttctgggcggtgctgtcgccatcattttaggggtgtggcgatttactacatcgtcacctagcactggaccggacgggaagccgatcgaactgacgactgcgacctctgtcaatcaaagggacatcgaactggttcttactcgtcttcatgttgctatctaattttttttcttcatctgcatttgtgttccatttctgatgatttctcttttgagatagctgctgattagtatgtctgcgttttggttctcccctaagctgaagcagacaattcattactgcagtatttgcctctattcatatgttggcacttggtattcagaaaattcatgagcctagtagctctctgtgtttgtgctttaactttttgtgacgactatgcatcattttctggataaatggagctacaatttgtcttcaagctgaaagaaatctgaatcattttgttgttctagaactagcagagttgcagtacatatgttatcctgtttaactttgtttactatacgcagagactaatccctgtgtggtgtttgttctcattgggtccccggggctagttcttatgtgtttaaatgctgatgcaacaaccatacttgttgtaatttgtatcaaactccctcaagattttaatgaatttggtcggcgaaactttagtcgcccacgaaaagcaaaatgggaatattgagccctccatgcccgaatgatgatttgctggtgattgagcttgctgtgtgcctttctgatcttatcatctgagattttagttcctgcagattcataacaactttggttcctgcagattgtagtctcagaagaaatagcttgaagtctttgaactaaaatgtgtgacatgttcagacttaagaatgcacggctagcattacttctgttcagtaaatagcttgttttacatccctgaatttgcgaagcttcccaactgtgagcacagatagctatacctcttttttttttctttttttgcgggaatagagagctttattgattagggcaccaaattacaatcctgccgcagcacatgcaaaatacaagacggagcttgatcacgccaaaccgcgcaatgagctgtccgtttcgcaagctgagcaagttcatgagcaaccctattacactctctattgacatggtgcacactcacctcttgcagacgcctaacagccgcttttatttcacgaagaagaaaagtccatctagaccgttccatatcctttcctgcgatacttgttgttgccattaaacaatcggattccagtatcaccggcaagtgtatccattctgctgccaagttgattccttccgaacaagcaagaagttctgcctcttctgcctgagagcatcgtctgagatagcgccaggagcttaggagcactcttcccaggcagtctctgataaccactccgataccacatcttccatcaccctgatcaaacgcgccatccacgttgattttggcccagccttctggaggtggttgccatttggacttcgtatgtatctccttcacagagggcttggacacaccccccaaggtatttccagatttaccattaggatcggctgtggcttgtcggacgagtgacagtatttccgcataattctgcaggaaagccaccgaacctgtcacagatagctatacctctgatacctgcatggctgcatatctatctgttcctctatgattgttataccactctattcagaaatactcagtgtttagaatttagtaatttgcaactttgcaactaatatattgccccagagtcatgcgtacagttgcagaggccagagagattacctcttgaatagtcttgaccttccattatctttttttaataaaataaattcaccaaccagcgggcctcaaatgatgttttatttggagaggaagcacgaagatgaatacggtagtcatacagacagacagttggcttgacttcgtttcacttccaaataagatctctgccttggccggcgccggcgacgcggagtggtactacgcaacggcaaattttcaggctcccccaagtccgcgcgcgtattctgaagacgacggaataggccgagagagaaaatacgaggaataagttcatctgaggtcccttaattttacaccgaattcgattttcatccttatagacatagcatacaacctaacgattttgtttcccctatgaggtataaaaaga

SEQ ID NO: 4207 - DNA, 13489 bp, Oryza sativa
catgcacttgaaacgggtaattatgtgccggtacgatgtacggatatgtccatgaaaaacttggtggagctgaaccatcattgtagcgagcttacaggttttgttatgggcctggcctgcttacgtgggctggtcgatgtcaatcgtgggccacgaccagagccacagcgatacggcataggaaaaagtacaccgaaggtccctcaacttgttatcgaattacaaaatcgtcccccaaccgtaaaaccagatatatgacatctcttaacttacaaaaccgttcgttttacatccttcggtggttttcacccggttttattcgacgtggcgggtgagtcagcatgggacccatgtgggtcccacatgtcaggacgccacgtcatcaggctctctcttccccctcctctcccttcctctctctctctcactcatctccctaggcaggctggtcggcagaaatctttacaaaaatagaccctgcggccctccatttaggcggcaagctgacgtggcacacggcgtcgtgacgtgccgtgtgcgcattttgagcttagacccttggggctaaatgtaatttttttccatgctaaaaaaacaattgactagttctttttgcatctgggctccttgccgcccttgcgaattttgcacggaggctccttccgcccagacagagggcggcaagggggccacgtgtcgtagccccccaaaacgaccgtcctgcaccgtgtgccacgtcagctttttgctgatataacatttctgttaatattaaaaaataaatctaaaaatgaaaaaaatcagtgttcaacagctactctgaaacagagccaaatatttcctgtagtgccaaatatttcctgcatccttcgtacggcccacagctaaatatattttctccactacaaaatgttggtacctagaatgaaatttagacaacgaatctggataaacttttatccagattcgttgtcgaatctgtacataatttctatccaggttagttgttctagtatggattaaatctcattttatattacaacattttaagacgatggtaccttcagaatagacaaaatgccaggtaaaacctcaataatataaaactcgaaaatgtaaatgaagtctgctctgccttgtgaggctacgctgttcagggaagcaggaaccaagtcaagcatggactgtaacatatccatcgtggcatccaaaaagcatgaatgaacaggacaatctgcagagtgcagttatcaaagatacagggtatctcaactccccaacgttgagatgcattgcaactctgcaagttcagtaaaatttaaaagaagcttagcatgaagatttattatcacatattggcagaaaaggtgtcaactgtaaggccttagttgtatttctgcataatctgacctttaaggctgtcataaatagaacagtatctcagtgccttataattaatggagagctcataagataatcacacctcacaatccatgcacgtaaactcggttcatacaagtgaaactctcatccatcagaaatgtctaaaactattatcccatttacaagtggtcctatttattattattattattattattattattattattattattattattattattattattattattattattattattattattattattattattattattattagtagtagtagtgattgttctttcgtgtaaacaccatatagtatgaagactaggttaatgtaccacatgagtaaataccaaccttagtactgttccgtgagtctttttaccgggtttaaccgttgagagagtcgttatacccaattttttttacgattgaggcgaacgatgatcgtacagagtcaaactagactttatttaaagcttttatcgatcgtagtaggccagggcaaaatcacttctctatcattgcccagctcttgatccgcaagtacgttcggcccaattcctagcaactttgattgtttaggcccatatttcttgcaggatactggatttcgctctcggtctatcccgtcttcgtcttcacgcgcggggactcggggaggctcaaaatttgccgttgcgaagtgtccctccttgtcgccggcgccggcataggcgaacaccatatttgtcttgagacccagactgtgcctgtgacgtcgttgcgttgaggacaagaaaacaacatgggccatgtcctgatcgatcgatccagaaataagttcactttaggttccttactttgatggtgtttgaatcttctgaagatgaagattaagcgttaaacgaggtagaaataacgtttgaataattaagttttaattattataaacttgaaaaatggattaatctgatattttagaacaactttcctatagaaagtttttacacgaaacgcaccatttagcagtttgaaaagcgtgccactttgatccaaaatttaatccactatttttagtggattcgaacagggcctttatcaacgagtatgaaatttatccctaaaccaaaataccaaatataacgagtcttccaattcacaaaaccgaatcactcgaggttctagacagtattatgggcatgttcactttgatgcaaaaaaaaaaaccttaccaaattttggcattgtcaaaattttggcaagatttcttatacagttaccaaaatttggtagcaaactaaatgtagtcacttttttgataattttaccaaaatttggtaaggttgaaaatggcatcaaagtgaacaggccctatgtctggttttaattgacatggcaagctgagtctgcgtgggatccacacgggccccacatgttaattgaaacactttcttccacctctcacttctctcccctcccttcctcatcctcaccgcggatcttctcaccggcttcttcccagccacacccctcccctcctaggtggtcgtgcggccgtgtgccgctgttgccctcaaaaccattgtcccacctacgtcggtgataaaatagtagagagaaacggagagagggaggagaggatgggtcactaatgtgtagggttcgccaaatgctattttttttatttagactgaattgccctgacacgtggatctcacactgactcagcttgttacgtcagctaaaaccggatataatactacctaagacctcgggtgatccaattttacaaattgaggaacccgttatatctaatattgcggttcatggacgaatttcggatttgccgataaattaagggacctaaagtgaacttattccatcgatcgagcatgagcagcaaggaaggccctggccggctgctcctcgttgggccttgttcttcttcgaaggtctctccaatccaacccgtgtcagctccttccctcccattcgaatgcgcctgcaagtgccagctatataacacaccaccttcttcttccttccgctccatctccgccttgctcccaatccctcctcttcctcgtcctcttcctcctcctcttgcagtgcgagctctcccaccgccccatcccctatccatggcgaccaaagcggcgctccgatcgttgtggtcggccttcgacaagcaagcgtcatccatcattgacaagctcgtgtggccttggctgatgccagcggacgataccgaggagggcgcgaagaggcgcgcggaggagattactgaggagctcgcgcagctggagaagaccaggatgacgacgtgggcgcgatcggtggtggagagcttcgacacggcgcctcctccttcccctccgccgctgagcgctactacgcctcatcctcctcctccgtcgcctgcgaccagcagcagcaggacggcgacggcgacggcgacggcgacgccgacctcaccgacaccgacacctcccccgacctcggccactttgctgtggccccggcctcgcccgacgaaggaggaggagggggagggcctgcagcgacgcacggacgcggtgctcgtgaagaggctgaggagggcccgcttcgcggcgtggacgagtgcggcgctgcacaagttcgacttcgacgacgccgcccccacggtgcctcctccgccgccggccaccatgatacctcccccgacggtgacggctacgatcacgccgctgtggcctccgcctcccccgacgaagaaggaggagcatgagggcctccagcgacgcacggacgcggtggtcgtgctcgtgcggatgcagaggagggcccgcttcgcggcatggacgaatgcggcgctgcacaagttcgactttggggccgctccccccacggcgcctcctcctccgcagccgctgcctgttgggaatagtcccacattgaaagtttagggggagtggcaccaacttaaaaggggaggggtcccttacctcatgagctagcttttggggtgtagaaaggctttctcccggttgggccaacgtctaccggttttgggccaacaagtggtatcagagctcaggtgccatgtctggagatggtgtgtacacgccgccaccgccgccaccgatccgtcgcagcagcggtggcggtggcagcagcagcggcaatggagatggtgtgtacacgccgccaccgatccgtcgcggcagcggtggcggtggcagcagcagcggcaacggcggggatggcagcctaggcggccatgagctcgtcgtgcagcaagtgaaggaggcgggggtgacgttacactaccccatgctcggggagaacaactacggcgtttgggcggtgaaaatgaaaatttttatgcgtgcacaaggtgtgtgggctgccgtggagggcaacgcaaccgatgagaagatggatcaaatggctctcgccgccattgtccaaactgtgcctgaggccatggtgatggccatatccgaaaaggaaacggcgagggaggcgtgggacgcccctcaagcatatgaacatgggtgaagagcgtgtcaagaaggccctactacaaactctcaagagagtgcttcatggtatgtacatgggtaatagtgagaaaattaatgattttgctttgaaggttaccacgatcgtgaacgagattcattctctcggcacgaaagtggaggagaccaccgtcgtggagaagctcttgcattccgttcccgacaagttccaatccctcataagcaccatcgagcagtggggggatgtgtcggagatgacggtgacggagacaattagacgtttgcgggcgttcgaggagtcctccaaggggcgacgtcgtgaaaacgcaggggaggagcagctgcttattgcaggggctgagcaacggctcacacgcactgagtgggaggccattgttgctaaagagaagaagagtgatgaggcctctggcaatggtgagaagaagttccgcggcaagttcaacaaatcgaagattgagtgccgcaggtgtggcaagttcggacacttcgctgacgagtgtgatgagccgcggaagatggccaaggcagtgacgcagcttgtcatcgcggacgcggatgatgagccaacgttgctgtgaaaccggttgtggaggtggagaataaaatccaacaagattagagggtgattgttagagttaatcttgttgtttatgttttcattatattcagtcatgtatacgtagtggtctgagtccaaattagctagtgtgttgcgtggcatggtgagctgatcagccgttagtgaaagcacaaagtggtgcagcactacactggccaaggtcacctgtgacgggcccaaaccctcatctttgacgacttcgcgcatggtcagtgatcagtggtcactggtgagtccagtcacctttgacgggtggccggccgtcacaggtgacacccacctctgacgggcaagttactagaaggccgtcagaggtgttggtctccgctagccttgagcgagttaggacccgtcacaggtgactcatctctgacggccctttaaataaaggccgtcagaggttggggtctccgtagttagaagctgtcacaggtgatctacctgtgacggccccaaaagtaaaggcccgtcacaggtaggtcacctctgacgggcctttatttgctagtccgtcacaggttatgttacctttgacggatttttgttccgacccgtcactgatgagttaattccagaaaaaaaataaatgctaaatattggctagcctcaggatttgctagccatgccctctgaaaaatagaaacatcacagatatattccagtcacagatccatcacagatacatcacccccccaatataacatcacagatccccaacaacacatatatgcagttcaaatgccacaattttgcacagcaaattcacaccccttgaaagccacaatttcgatcgttgctcatagaaccgcatatatacttaccaaatggattaaagccataatgtcatcgacctgcacaacctgtcaataaggaaaaaaaaaggagaaaacagatgaatagtacaacataaatcgtagttgatcaaatgtgatgacaatttagtaaagtaccataaatattgcacatatgaaagtaaattacattgcactctataaaaacataattttttacatcgccagaaattataaaaacatcttttttacatcacaataaattatctagccaagttcatgagtctatttggcatgaaaacgtcctttcttgttcattatttctgcaagaataaaggcgcacaattcgcctctgatagcgggggggttgatgggtgagatcttgaagccagctctacatttctgtttaataaataagaggttaattagcacgttttgaatagcaatgtagatattgaaatgagcttattcgccattagcaacaacctcagggtcgaaatctttcacctctcttagaagtgttgacatgttgtggcacacgtggaaaccacattggtctccgatctgttgtgcgcatgcaaacttggtgtcatgataaagttcattcttgccctccttgtgcctaccacccttttccacatatgggcctcaagccatatttaaggccttggtgatttcactgaaatcataatctttggacttattggagttaaggtaggtaaccctactccacttaggtacgatgactaggagaatccaatgtcgcctgcgcagtggttatgtagcgttagtactaagaaccttaacttcaaaaacaatatacacgaagggtattgtcctcttactcttggttgtgtgcgcacatgatgtactccttgtcttgatgggcccataaacaccggttgacatagtcaaccacctcagtgaagctctgtcgtaaattaacctcattcaccatggatggatcaaggaacccaacctgattaccatagcgacgactctcgatccaacacaaccttaaaatatttacgtattagaactaatttaattaggagatatagtccagtcatatcacaagtatagaaggtatgcacttacaaggagtagcattttagaagaccagtgtccaacttccggatcctgaaaaggtcgaagaggtcatcaaagcctatagttatataggcaggcgacgataggaacggctggtggtcgtgatgtccaactatggatgactccctcattttccgcttggcattgcttagctccatgtattgcttatgtagctctcggcaagcaatacccatcacagctaacacattgtcctccaccaatggcatgcctagctcaaattgggctggcgccctcacgaccttccccgatttgctcaccggcatcgacgtcgcagccttgcccctttttggctccggcgccaactcctcgaccttccccttgccgcgttcacgcttctggcccttgacaagtggtggggagctatcggcctttcttgtggtctttattggagccaagctttgagctatatctgccaagtccatatcagctccaccgggagaatgaggtactgacaatgccggtccacggggagcctcaattgatagcttacacttgggaggtgtaagctccgtcggtcgacttggacgaggagtcatcttcacaactatgtcttctttgggccattgtatgaacgtcttgcgcgcatcgcccaaagtcatgatttcatcatttgggggcacgggcagcggatagcctgaccaggtgtcctttactgtatcgatggacaccttggcatacccagctagcaggtctgcgccgtggaccttgtctgtaaccgagggcttgaaagccatgccctcagcgacttcaggagcgaaagttgggtggactctcgctagtaggacacactgtgctgcgccctgcataaggtgaaagtttgaatttaatattggaatgtgtaaatgtcttttattagatatggatcggataacaacaattacctcgatgtggtccactgcagctagtggtgcgatcgggagaccaggggccggcacctctgtggatgcacaactactcctatgctgtgacggactcgcgtcgtgttgtacacgaggagttggttgcacagcaggtgttgtgactcggggtatattcatgtcggcgagcaccttgttaaccctttcttccacccttgcattcatgctagcttctagttcttgaatgacctcaaccttaagttcggccttcaaacgagcgtccctctcttccttggagactttccgtttcctgtattgggagctgtactgagggagtccatgcttccagggcacatcgctaccaattccccgagttcggccaggatgttctttggttccgagcgcctttgtgaggatgtcatcttcgcgcctcttcggtgcggactcaacctcgctttgtgaagcttgttcagcaaccaagcccaactagaaaagaagatagtcgtttatacgaacttgtactttatacgaacggaaattagttaggttaagtagtgaactcaccagttcctgatagacgacggcatcacttttgttctcaaatgtgacagagccgtccgggttgaccttaccccttgcccgcgcccagttgcgagctctttgttcagggatgtctgaaaacggggcagggacattcgctgctgcagcggctgcatctttttgggcccatattgcctccttgccgatgtaccctgcggtgcccagccgatgcgggtgctcattccgctgttgcagtacgcgatgtgcctcgctggattccctaaactcttgggtggttttgagagagcagaattcctcccacaccgcttcggttatttgagggtattcatcgaacggcgtatgattgccgggcgggttgacatactcggtgaagagcttcgacttccaattcttccaagctttgcccatcttttggaatgccttccgcttgagcctatcctttgcttcggctggaaatgtgaaccatttctccattgccgtccaagctcgctctttctcggcttctgtgaccttcccgatatctttatggaggatcccgaagttctcacgtgccgctagcccgcagcagttagaccatcttccaatgacagtcctgggcgccgtgggcctaccactagcgtcaacctctcttataacttgcactgtggtcggccatatattttgtgaccgcggatttctactagacctacttgcacttgtctcgcccgacatcgacgtatgttgttcctgcggcaattctgcagcacaaacagaaggcaatatttgctaaggggtgctagctaaaatttatgtggtcatgtggtgaaaatttatcctataaattaccatgaatttcgggttgttggaccgccgttgtcgcgggatgaccttcggcaactgcctctgtggctgggtttgcttcttcctggatcctcgcaggtgttggggagggcgggtttgcgccgggcgttgacatggtttaactttcgcgaaaaagattatgaatggttatatgtccaaatggctcttaaatccacatccaagttgcaaactagctacacattcaagttttaactaacagttgcaaccataggcagcagcatgggcaaacatagacagcaaggggcaagtgtagataataaaacagcccacaataatttatgtggcagcagcagcaggggtatataaatcatgtatataaacaacaattcaactattcatagacaacaagggtatataaatcaataagtgtagataatctgttcttatccataaagaaaagaacatccactgcagcaaaattcatgctaagatcctctattgatgctaagattcactgcaccaaaatcatgtatataaaatctagcccctacattcatccaaaacatccacagacaacaaatcacatttaattcatctatacagcagcaccaataatcgaaacaacaaatcacatttcattcatctaaacaatgcaattcatccatcggaaaaaaggaggaatgggggagggtggcggcatacttggagaagcggcgtacttggagacggcggcgcaggccgtagtcgtcctagatcctggtggcggcggcggagaggcagtggcgaagaggtcgaggcggtcggcggtggtcggggatcccggcgtcggggaggtcagggtcggggaggtcggggaagtcgatggacggacggcggagaggacgaccggcggcgagggcggcggtggagacggcggcggagatggcggtggagaggacggcggagatggcggcagagagggcagtggagatggcggcggagagggcggaggagaggttgaggcggcgacggtggagatggcggtggagaggacggcggcggtcgagagagtgagtgaggaggcggcggtggagaagaaggcggcgagggcggcgaagagggcggagatggcggcagaaagggcggcggcgagaagggcagcggagatggcgccggtgaagatggcggtggagatggatggcggcggtcgagagagtgagtgcggcggcggtggtgcaggccggcgtcgggaaggtcggcggagagggtgagcggcagagaggtcggcagtggagaggtcgaggcggtggtggggaggtcgaggcagcggtggagaggagggcgcagagggtggcggagaggtcgagagggcggcggatttggcggcggcgaggacggcggtggagaggcgaggcggcggtcgagagagtgagtgagtgagagtgggcgccggatctggatcgatctagaagatgtccaaccctaggtcaaccctagtcaaactcacctgtgacgggctccaactatgtggccgtcacaggtggcctcacctgtgacgggcgccaaccgtggagccgtcacaggtaagaccacctgtgacgggcccaacactctgggccgtcacaggtgaggtcacctgtgacggccctacagatagagcccgtcacaggtgagtttgcctagagcaattttattttattttatttcacttagttcttttattttccttaacatattttcacatacactacatatttttttatacttaattattttatttcactaacagtagtaattgcacttcattattatactactttaattattttatttccaatgcttatacttgcttaattattttatttcacttctagtgggtgcttcacttaattattttatttgactatttcataagcaatatactattgatcattgcgaacatattagagtcatacagataacagacatgtagacataaactacgtacataaattacaaaaataatccttcctcatggtcgacacgtgcatattgaacttcatcttcttcctcctcctcttctagaggtatttcttgacctatgccgtggacgtgctggttgtaatcatcctcgtctgcaatattgtccaatccaacaattctccttttcccttcacgaacaacatgtagtttcttgttacacgggtcaactatgtagaacacttgaacaacttgtttggcgagaacgaacggttcatccttgtacgcgttgttagccaagttgacagtggtgaaaccttcattgtcaacttttacattgcgaagatcgacccatcgacaacgaaacaacgggactttgaacttcaagtaatctagctccaatatttgctcaactctaccatagtattgatcacgacgaccaccgtcactagcagcctcgatgcgtaacccactgttctgcactgtgcatttgctgtcttgctttaccgtgtgaaaggtgtatccatttatgtcatatccttgccaggtggtggcactccattcaggaccctgtgacaaccactgaagtgtttcactaggcaagttctgcaacctggcaattcggttcttcagccactcgttgaaagaagacatgtgcttattcctgacccaactctctgatcggcctgggttctcttgtcggataactgcaaggtgttcgtcaacgtacggcaccacctcagtcatatgctgtagtaccgtgaaatgagctttatcgtacaccttccgatccaacctaatagtctttcttccaacagtaccaacaccgtcaagcctcccttcgtgatgagatcgtggtaatccaattgaagatgtttctgacatgtagtccacacaaaattcgatggcctcttcggtggtgtaactctcgatgatactcccctcggggtgtgaacggttccgtacataacccttaaggatccccaggtacctttcgcaaggatacatctgcgtcatgaatgctggaccacagcactttgtttgcctcacaaggtgcactggaagatgttccattatgtcaaagaaagttggaggaaagtacatctcaagatgacatagggttctcacaagttctgcctgtagttcatctagtccctcgggatcaatgatcttctggccgattgcatggaaaaaggaacacaaccgctggatcgtgtgtcgcaccttaggaggcaaaatattccttattgcaacgggcaacagctgtgtgataagaacgtggcaatcatgcgacttcattccaaccaacttaagatcttgcagtgaaacgagcctactgattcttgatgagtaaccagatggaacctttataccactcaaacatgttagcaaatcaatcttctcttctttcgagagagtgtagcaggctggaggaaggtaaaccctgccggattccgtggttatgggatgtagctccgaccgaacacccatatcttccagatctcgtcgggcgttgagaccatcctttgtagtacctgggttaagcagtaatcccattaaactctcgcatacattcttctcgacatgcatcaaatctatgcagtggcgaacttcaagatccttccagtatggtagtctccagaatattgacttctttttccacatgctcctctcttttgtcttttgtttttccacatgctcctctgttttttccttcgatgtgctcttctcttttcgctttccaactttcctcttttttccaaactcgttggttattcccatcactaagttgtgcacctctgtccctgttagctctgtcggggggccggctgtatctctgtgtccattgaaatt

SEQ ID NO: 4208 - DNA, 4268 bp, Oryza sativa
cacatcatcttcagtagtgtagcactgaagagtgaagacatctgaacaaatgtcataagacgcaggatgcaaataacaacaaagtgcatacttaactatccatcatagacagcaagatcttaagtccttgtctgccttagttaaagacgacagacaaatcaccaggcagcacacacaccaggcaatgcagtcatacactgacaggcttcaattcaagttcatcaaatcaaaagtatataattcattacatgaatgagcatagacaaaatggcaccaatgcttcaattcaagttcaccaaaaagtataattcattacttcaactgctcataaaacattacaactgaagaatgaagatgcctgaacagtgaaccctcaccatacaagtgttccaacacatcaatcaaattgcaaataacagccttcaggcactttcatagcgtacaagtgttccatacataattcagatatccaaataacagccttacttacatgagtccaacaatttgtcacccggtttgcttaaaacgaaacaaggaaacaagatcataataacctatataacaatatgaaccataggacaaataacccccaatgtaataactcacatatctgaccacaacttaatagctataactctctagtattcacatttcgcctgtgtgctaattgtataattcagttctcatttgctttgtgcaactaaatagtataccttatttacggcctcttctttttttccccctcttttcatgtcattatcaaagagagaggagattaggagggagtgagagagtggcgatcggtgatggactgacacgtatgatcaatggccgaaggaaaaccggtcggcgggggtgatggagtggcggaagtggcaccggtggccgtaggggcagacgccgccggcgagcaccatgcggcagacctgggtcttgtaccgagggtggcggatgacggggccgaactccgcgacgccgtgggcgaactggcactggtcgccgtaggggcaagccccggtctcctcccacttgttgcacagctccgtcttgaacatgccctggttgtacacctcgaactccagcccacccatgggcggctcctccttcttcacaccaactttgtgctcgcctccctccgcgccgtcaatgcccacgaacacgcgctgctgcttgcattgtcgcatcaagaacatcgtactagttaggattgggattttggattcagcacaggagtcagtgcgctgcaagagtgggagccagacacaacacaatggaggaattgggggatttggtctcaccgagccgacgttcaccggcttcgacacgcgatgcttgccgccctggttcagcttctggtatccggtcgaacggatggagatgctcttcggaagaacagcctgcttctcggggacggcgacgggattcatcagtgcggccggcggagactgcggcggaggaggaagagctggcacggtctgctccttggggaggcggaggcggcggaggtcaccggcgagggcgatggcggagctctgccttccgccgaacttggcgatgcggcatgcgaggtcgttgttggcgacgcggagctcggcgttctcctgacggagcgcggccgcctcgtccgcggcatcggcgaggtgggagaggcagagctcgaagcggttggccatctcctggtactggagcgcgaggtgggcgaggtggaggcggtgctcggtcgctgccgctgcccccgcaccatctccgtcgtcgacgacggagtcggaggaggacgagcagtgggagaacgaggcggcgcgccgcggcggcggcggcgagagcacgcgggtagggctgaagggggagtagcagccgtagaagagatctccaccgttggtcagcaggttgggcgaggagagccgttgatctccgctgccgaacggcttcgggccaaagtccgagtagaagcggcctggatgagccggaggtagaagagcttcctgcatagcggcgatctccgcgaacaactaatccctgcaagtaaacggatcaaaatgtcaatgaaaattccaacaaaaatcacactaaattctccacacgaagcgaaccaaaataaaaaaaaagtagagatgctttccacagaatctagctctgagaacaggaaaatcgtatcatggaagcaatcaaaaatcgcattcgaagacgcgatctcatccactgtaacagtgagaacaagtaatcaactagtttctaaatcgagaaccagactgattccacaccaaaaaacgggacaaaaacgctaagaaaaaacggaaccggacgcctgatcgcgaagaaaacgctgaatccacgaacaaaaactagtttctcaccaatgcagcacgagaaacagcaagcttaaaaaataaaaaagcaaaatcgatcaaactcgcatcccaagtggagcagaacagcacgcccaacccccaactatccactgattaactaactagtggcgcaagcgcaactaaatcaccaagcggttaaccccaagtgtagattggatcaagcagcacacctctcgattagcgctcaccacccggagcctttgattttgagaaggatgatttgggggagaaggggatagggagaggaggaggagggtgtcgtggggctcgcggctctgcctctgaatctctctggcaatctgaagaatgcaagtgctctgcacctgcgcatatataggccgccattccgtgcggtggattcggtggggccggtacgcagtacacacgctccgcgaaatggaagtacgtactgtgttgtacgagaaatggatcgcgcgcggcgaactgtttcttgccgcgcgtgggcgtggcggacgacggtgtttgggatttgggaattgggcgctgtgaccgcgggtgtttttgcacccctctcatcccgctacgcgtacgcgcacaccagcgaatacacctcttaacacacgctcaaatagagatgaaggccaacagtacttgttaatatcctattgaaaacacacccatcggcttgtgtattatatttatgagtaaattttactttcagtcacttttattatcggtatgtctatctgaatcactctttaaccaatatttttgttttagatcggataatcttatctttgttgtattttggaccaccctaactttcttatatatgaacaatctcagctatacttactcttacccgtcaatgaattcccaacctattttcttgacatatgagatgtagatcaatagatggataatataaaggatgtaagagtggtccaaagtgtcacaaagttacgattattggttaaaaggtgatctaatatgaaacaccagtaataaaagatgactcaaagtaagattcactctatattttggatatatcctagtgggtgaagttctgtacccaagatttcacctcagcatcgttggtgctttccattattcctaactattttcagtacgttaatgcaatatatcattattacaaggtccatggtcaattctcaacttgaaaaaaaataaacaagcagcatgcctaacatattcttaactcgatgcttcataacaaacaaatcgtcgagggtccactctgcaaacaaataatccaggtagctgagctactagcaaaatatatcccttgcacgttagacacacgacacacaacaacggtatgctaatatgctactcctatctagtgcggttcttgatgcaagggatcattacaaagcttcgcttgcttgctttgcttttacgggtccgtccctctctcggactccgattgatcaagcgagctaaccaacgccgtctcgggaaagatagttaaccaacacatgtacagaaaaaagaattaagccgtcaccttcccttttaacgttgcttccttgatacagctttaactaacttgccccacccatctcaagccatgccatgccatgcacacgtacgaacgaactacacacatcaccaaccccgacctccagctgctaaaaaaatactggggatttttttttttttggctcctgctgcctcgcgatatgatctcccgtggccgcgacgcccaaacgaattcgtgaggctttttaggtgcgtcgtctctgctttcgtttggcggcgacggcaaccgggatcaggtcggctagcttacacacatgtgctcggcgatccaaatcaatcagattagttatggacttgtttgttggtacgtgcgggtgaagacatgcacgcacgcgatggcgagcgcactgatgtgcaggttggacctgaaattaa

SEQ ID NO: 4209 - DNA, 8423 bp, Oryza sativa
aaccttattggcaggcagccaaacatagcaagaacacaggttgtgcactgaaaatgtttgctgcaaacttgtgatcccctacacacttgccaatattagggaagagagacaagaaccaacagcaaaaataggcaagaagctaagctgccaatctgccatggattccaactccattacttcctttatgtcttcctccttgccaacttttccccctccctgcggctctcccccttacaccattacaatcttttcttccattggaggaagtaaaggttaggtttgtagcatagggagagtctagggcggagagagacagaggaagaagaggaagaagctatcggccacacggtcaataaagagagcggcgagaatggcgagcaggacgcagtacgccttcttgctcctctcggccttcatggcctccctcttcgccggctcggccgccggagtttaccacatcatcggcgccggcaaggggtggcggatggctcccaacaagacctactacgcggactgggctcgcaccaggaacatcagcgtcggcgacaagctcagtgagcatatgcattgagaattcgcaattttatctgatcttttggcgaaaaatttgaagtgtttgggtgaatcttggaacaatctttgcagtgttcctgtaccggagcggggtgtacaacatcgtggaggtgccgaccaaggagctgttcgacgcgtgcagcatgaggaacatcacaaaccggtggcagaacgggccgaccatcatcgagctcacccagcccgggccgcgctactacttctgcggcgtcggcaagcactgcgaggaaggcgagaaggtggccatcaacgtctccgtctccgcgcccacgttgcccgactccgacgccgacgccgacgacgacgacgcggacgacagcgacagctcggccgccacgccggccaccgccgccgaccttctcatctacctcgccggcctcgccgcgtgcttgctgccggcattgttgctaatatgatcggcatgcggagtcgcagctgtgtgcagtgtgtgtatgtgtgcgtattgtggcaggcaggttgggtgtgtcagtgtgtgcattgtgactgtttcttgcaactgtgtgcgtgatgagattagtacggagtaggaattaacctttggcttttggtaggaacaaagattttctacacctagatgccatggcacctatcatttccatgcgactcaaatagttatagaaaaatttgaaaatatttagtagcatcgtttgtgatgatacaagtctatacacaaacacgcaggactaaatttgatctacaactagagaaacaaaaataataaaatcagacagtcaatagtatccgtacagtgcatataaaatttgttatttttgtttcttcatatatcgatcaaatttagacttgcatgtttacatagtgtctataatgtcttatattatcattggactatcttatcaaattttatgaaatattttatataattgtttaaattacatgtatacatctaggtgtagaaaatactttttgcttttagtagcaagtgtacctgcaattttgcattcgatcgctcacccgctgctctcgtctagccccgttctttgattgctgcctcgtctcgtgccattctccaaatcgccaccaccatcgatctccgccgacatggacggagctctgtggcgacattatcgttagccgccagcccgccacgtcgtcggccatgggcggagctctcagccgacatcgtctgccaccacgtcctgtgcgaggtggaccgccgcgtggtggaactcgtctgccgctcctggcgcgcggcgctcgtagggctcgatccccctccgccgctcacgtggctcgtcgtccccgactccgaagccggcggccctgggttccactgcgtccccagcggctgccgcacccaccccttcttcaccccgcacgccgcacgcctctcgcgctgcttcggttcgtatgacggcgcctggctcttcctcgccgtcgacgacgacgacgaccaagctcaaggcaaagacgaccacgtcctcgtcaacctcaacagcttttacttcctcgacctccccccaacatgttcccagaaatgaagttcaacaacagcgagcttgtcatcgtcgccgccaccctctcgagcgagccgaccgaacaagctaggatgcatcatcgtcgccggcatcatcaacttctgcccctgctcccagggccggtgggacacatcgcgttctggcgcatgggcgatcaggcgatcttatgcgatccttcgaggcagacgagacgtgccttgaagtggaggacctcctatatacttcaatggagatttcctattcctcgctcgaggggaacacattcgtgtgtgtttagatggccaaatgggccgcccggcccggcatggcacggcaccgtgcctgggccgaggttagtcggaccggcacgacccgacctacacatcgggccgtgccgtgtcgtgccagcctatgacattctagtccagggcttaatagaattaatagaatgctcatatcaacaagttacaacttctattccggaagctaatctccaaagaactccgaggttaagcgtgcttgcgcacgagtgaggacaaagtgtgcagaaaagacatgtgttggtctgtgagggcagtctatgacctatgaaagctataaggtgtaagcgggctcggcctgggggaaggacgttacaaagtggtatcagagccgaccctcgcggggcctgggggaaggcgggacgttacaaagtagtatcagagccgaccctcggcgtcgatctagcctagggcttaataggattaatagaatactcatatcaacaagttgcaacttcttttccggaagccaatctccaaagaactccgaggttaagcgtactagagtggtcatgacacatgcgttggcactggacacatggatgtggccaagaggggacgttcctggcctggggttgatcgacaggggcgtcgatctagcctagggcttaataggattaatagaatactcatatcaacaagttgcaacttctttttcggaagccaatctccaaagaactccgaggttaagtgtgcttggcctggagcgattgcctggagcgatttggggatgggtgactgaccgggaaattcttcccgggtgagcacgagtgaggacaaagtgtgcagaaaaatatcaggtgtaagcgggcccggcctgggggaaggcgggacgttacacagcccacgggcagcacacacgctccaggcacgacccaataaaactcgggccgtgctggaccggccctaaggcacgacagtctatcgtgcttctccacaaaataagtctatttttgctccttcaactctttgggctgtgcctatatggctagaaaataagtctattttatattcctcttctctttgagccttaccttatactatgatttattaagtctattgggtccctctactttttttcttcgattgtgtcgggtcgtgctggcccaccgtgccgagggagcaacccaggcacggcacggctatcgggctgagttggcacgggcatgaccctagtcaggctgtgccgtgcttgggttgggccaaattgttgtgccttgggccgggctgtcaggtctcgggccatctggccatctttacgtgtgtgcagtgtgccaagaagaagaactggtctttgcataccaattgctaatcctatgcacaattgccatatatctcacacacgcgtacactttgccgtacgtttcacatgccacctcagcctatatagctcaaattactaggaggcgcctacatatcaagcactgtttcaccaagtagatcggaattgtttcactaagtagatcgaaaatgtctcagtattttaaaaagctgaaacacaaccaaatcaccttgtgaaacatttgctacaacgtatgaaaaacggtttccaaaaaactcgggcgctgtttctccttatataaaaacaatatttcagcaaatagcgaaaggatgttttaactcaatgcaacatttgatccatacataatgaaacatcatgagtacacttactgaaacattgttggtgaaactaaaaatgaagcggattcccttaatagagcgtttctgtaatatgcgggtgatttgttgcaacggcgtggaggcgcgggaggcgcccgatttttctgccgctgatcgggcgcatgatcgccgacgttttccaaataactagccacgtttcacacgttcaactacattttgatctacggcgcttctacgaattgctcgggttaaagtctatgcacaaactaactactgcgaactttgaatttttctttcgacgaaaacacactaactagtaatacttctgtcggtgacatgggaccgggggtatcttgactagaggtttggggcagctgcagtcacccacgtggcctgaccccctcgggggggtcgggcccgagggtgatgtggccgcccctccctctgtctccccgaggggtcgggccgctcccgtttcggccccgagggctggggcgccccgaccccctgtgggtttggcgccatgtgtgtgggttaggtgagcacagcggcgctcacctaaccgcgtttattgcgggttggacgagcgccccacgccgcatttaatgcagcgcagcacactcgttcggtccgtgacaggtcacagtgtgtgaccagtcacagaccggtcagatcgcgggttaggtggcaacaggcggcctttcgcacgcctcgccccgtcccgtcggaatgatgagagcctccaggcactcgtccctagccggagccgacgtgctaactcctggagttagcacgtcagtcccggctagattcataccaggcttcattgcaaccattacaaggaagtcattttatgaagaagggctgacgtgtggcatgctaaactgacgcgtggtagacaagaatgaccggtttgtgactggtctgacgccggtcacgtcatcggcagacaaccgtgctcccacgttgcgcctgcttccggcggagtggaggtaggtatggcccatcccatcggagggtcattcggacagcagccatggcaaatctccgcccattaatgagggagtaacagggagatccccggtgtcaggcgagtgatgacgctgggcctcactcaaagacaagctgtgatttagctttcaggcgaaggcgcaagctagtttttttgaagatagggtgagtccccacccaaaagaagagtaggtagaagtggtgcatgtggtatccccttgagatataaaaggaggaccttgctcacttaagaggggaagaagggggagaagacctgagctcgtagagaagagaaagaggaagagggtttctagagtttgaactctcttgctctccagctctttgtaactccttcatacacagatccaccagaacacaggagtagggtattacgcttctcagcggcccgaacctgtctacatcgcccgtgtcttgcgctgtcacgcccggaatttctatccaaaattccaaacgcttacatgtgtgtgaaccctcgtctaggaatcagccgaggcacacaataacaaattgataatagagtacaattattactctaattaataagcgaataaaatgtcattacagaggtagatagttcctctcaatcaataaagatctaagcagcggaaagaaagataaacggcgcagacgactccattccacaggcagcttgaccagggctacacctaatcctccacaccatcggcatcactgtagaactcttcctctgatgaatgattgcaaggtgagtatatgacatactcagcaagtcacgcagcaaatatgcaagtgcacaggataacaaaggatggcataatagggttccatttgcataaacagcctttaataaacatttcagaatttaataaaacagttaagtaataattaaacaaaattaatccaacgctatacaacataccctgttgtataggcccaaccattctgaacaaccatcccggctgcacagtcctatctccaaaccaggaatataccattccaaaccaggagctaatcaaattattaccaattatagcatcttttattatgatgagaggtgtgagactaatcacgaaagacattgttagacccgcccataaccgcgggcacggctattcgaatagttttactccgatcagaggtgtaccactgtacccacaagacacaaccccacatcatgtcaccatgtgcctcaataccaccacggtatctcggaaaggagttgtgacaataccccttgcacaacacaatccattacagcgcacctttcctggatcataatcacccccttataaacaaggcatggactccctagcgacccccgtgggcttatctccgccacttctcagtctggtgctccgcaatgaaccatgctatacaaaaggtaaagccgttgcccacgctggcttgtggttggcacggttaatgtttcacaaccgaaactcgtgaaccggtccttaattgtcatgagcacgaccatcaaaaccatatgctcacaacccaccattatcaggttttagttggcacattaattaattaaccaatcacgattgaccaacgtgaactatcattaagccatcattaaataatagtaaatcttaagttatcccaatagtgtgctaatgtttctaagcagggctaagcaattatatctaatatctagctgaaccaatatataaagctcaactagtcaagttataataacccaaggtatcaaggaataaagtaatcaagaacaaaagggctttagcaaacaataggttaattccacccaatgacattcgaaaataaatgcaatagttgaatagaaacgatagctttaaacgggatcaacatgctcaaagggttgtttgggatctgtgtgacttgccttgctggccttggaactcttcaaactcttctcctgcgaaaacggactctccggaaacgacggaatctaagcagaaaagagcaaaatcaccaaaacagcacaaaaacaagcatgaacagtacatgtggatatttttaacatgtagatctcaaatttagaaaaatttaaagacttgaaccaactaaatccgagctaagatgaattagttatgaatttttaaagatttaatcggattaaaacacttatatagattttaatggaattatgacgcaataatgaattatttttgaaaaggaaaaagggatttattgcgtcagcggctagggtttcgcggtggaccgggcgcacggcgacggttcacgggaacggacggccgagatcgatccatccaaaacggacgaccgagatcgatcggtccacgaccggctcacgggagagggcgacgatgacgtcagcggcgacgtcaccactggcggcggctcggcggctcggacggctcggacggcgcacgctcgccggtgaacggcggctcttcggcacgaacggagggcaccaacgggtagagggcgactcggcgaacttaccggtgaccaaaagagcggcggaagaccaacggacggcgacggcgacgaggaagaagcggcggcggccttcgggtcaacggtgacggcggtgctccggcggtcttcggcggcagtgaagcggtggacggggacggcgacgacttggcgatcccgacggtggccttcccgagtgacgacgacgaccgaaacgacggcggcacacggctggacgaacagcggcgacggcggcacaaggctacacggggctagggctttatcggcaacgagaggcgaaggcgagggtggcgacgggtagcggcgacaccggggtccttttaaaggggctaggaggcgacggcgaaggcccacggcgaccggcgacgcgatggaaggttcgggctcggagagagaaaagccgatccgattcgacttcgaatcaaacactttccaagccgatttagccgatatttccaaaggggaaaaggtagaggagatctcgggaaacatttcccctcaatcaatttcaccggatcgggaaaggagcggccggatttggaaggagacggcggcatggctcggctagggtttcgggcggcggcggcgcgacgaagacgacgactccgacaggcgggacccacctgtcagcgatagcgagggcgcgcgcgcggctgcggactgggccggcttgggccgaggagagagagagagaggatttgggccgactttcggcccaaagccaaaagaagactttttaaaacctttttcaatttaaattatttatgaaatacaattccatttattaaaaatacttccttagctcaaataaatcatagaaaaatctaggaattatagaattaagcaaagtatttaataaaattttatctggccccattttatattggaatttattaattaaaattagatcttctcttca

SEQ ID NO: 4210 - DNA, 1656 bp, Oryza sativa
tatctgttcacgatggatacataacttgtggttctgaaaataatgaagtgagtattatatacaatgcggttactttaattgttatactgtcaattgggtgttctgttgagttgaaaacttacctgagttcttgttaagaaaattatatgcccaggcctcccccaccctcaactagttcgattgacatttggtgttcttttttttttcaccatttcttcctttgtaacgattacccaagtcgtgccataaatttggccccaatcataacaccttggttctatgttacgtagtaggatggtgaagtttagattatgctcatttgaaggtttatacattaaacatctcatgtctttatgtgaagtcttatttgtgaacactttcatgatctgaaatcaatgtctcatcttatatttcttctgttaacctttttgtagaaaaagttctcatgtatttggtgttgacatgcaggtattttcttattacaaaacctttcccatgccaataacttctcacaagttcggttcaatcgacccaataactggacaagagacaaatgatgataaccaacaatttgtgtccagtgtttgctggcgagggaggtcgaacatggtagtggctgccaattctactggcagcattaaagtgcttgagcttgtgtgaataagttgatgggaactttagtgaatgggaagatctgaatcctaaggttgccatactgcatggttgatgcttagctgcccttgtatatttccgtgaacgtctgccttcgcagcaggcagctactcaagcatcaaccatccttcggttctgggcttcattccatcagagcatttgcaacactcagtttaccccattcaagcaacctacagcgccaaactattggtggtgaagagatcggcgaacaaagagaacaaagagatcttcgaaggtatgaaaggtactggcaattcttgaagatgattgccaccaccaaaatattttgtttgtatggcgttttgacatagtacaagtcagcattttaaggagggccttaggggtctgtacagattagggtcacaaagggtcgatgtaatataatatatcatgaaattggatatgcttttgggctaaaaagccttacatgatacatctactcgagaaatatcactgggaattaactcagttttgatgtgcagtggcaagccgtctagtacagttagaaaaaggtgattttgtatcttgaagaagattcggaagagtaatctagaaaaggtgtctgtagtttgaaatagaaagcttaatcaatttttgtgtatagagagaccttgcaacaagtgttttggctcgccgattctctgattgcgcgttggtgccggtgatagcgataattgactaattttctggttacgcatttcgatcaggtttcatatgattggattattgtgtaatcaacaattcaacattcccgtgcttgcaatttcttcattttgaaacagaataaaacgcatgcgcccattaatttggtctagtagattaagcctgatttggaagagcattgaatcagtttataatttgtatagttgttcttttgacaatacaagacatttcaggaactaaaagcccatcaatacaccagacagcatgcatcgatcggcagccacgtcacagttcacaggc

SEQ ID NO: 4211 - DNA, 10935 bp, Oryza sativa
  unsure (1)..(10935): unsure at all n locations
tcatgatagtgtgataaaagacgatacgttttgaccagaaaagcccatgccgttgttggacgaaaatcggattcggtgtaaaattaagagaccccagatgaacttattccaaaatccaatgcacgccgttgttgggcctttggggtttatgggccttaaataactagatcaagcaacaattgcttacacatgtaatggaagaagaaaaaaacgtatgcagagaataatcagaatattgtgctacatataaagaataacaagtatggggatcctgcagcatagatctatataatttaatgtttcctttttgaagtgtttaacttggttctgaataaatgacttgttgtttgcccttgtatatttagccatctttctgagttttctctcacttgtactgactgttcctaaacttgttgattgggtcacaagatagctattgctaattaaggttacattcagacctacctctcgtcccaaaaagaaactaatcctaaccataaaactgaatatatgtgtgtccagattcgtagctaggatttgcttttttgagaaaagtacgaattaccccctgaactattaggtgagtatgaataacacccctaaacttgaagaccagacatcgctcacctcgaacttttaaaaccgaacaagaaaccccccctgaacactgttgcgagcggtttagagttttaatattacacgtggcagtccagtcagcaatactttttttaaaatagtgtgcccatttgtcagattccccacccatcttttctctctcttctccgtctccttcagaaacgcgcggccgccccgctgtcccgcacgcgggagagagggcgaagcggcggggtgcctgccgaggccggcgtcatggagacggaggcgagggcggtgcaaccggagacacggtcgacggcgaaggtgcagcggcggaggcggccatggcttgtgtcagcaccgtgacagcgacgcatcgccagctaaccaccgtgccgtcggtggggcgacgggcgttggctgccggaagtccatggggcggagagctataaaaaaaagaaaaagaaaaacttcttccttcttggtggcgtccaagctctgggccaccgtgcatggcggaggagctcaagtgctcaactgtgaatcgatttgaagcaacaaacgttccgaattccatggacacatcagatcgagatcgattattatctccacctcaaaaaactgagtaatgattttatcgaactcgggcgaccgtggtacatggcgttgtgcgtggtggtggcctgcgccttggtcctctcgttcgccgtctttgtctgcggccacagctccggcgtcgttctcccccggagaggttgtggtggtggcggtggccgcaaaagctatggtggtggggctctctatctccgccgccccaccttcgccgtcgaccgcgcggcactcgcctccggctccatgccactggccgcgccccgccacgtcaaccctctcccgcgccgccgtatttctccgcatgcacatcgcgctactcctccagagcgggccggccgccgccgccgcactcttcagaacnnnncgaggagagaaatagaggtggggattctgacaagtgggcccgctattgtttttagaaaaaaattgctgactggactgccacgtgtgctattcgaactctaaactgctcgcaacagtgctcgtggggtttcttgtccggtattaaaagttcggggtgagtgatgtctagttttcgagtttaggggtgttatcacactgatcacccaaaaggtaggggggtaatttgtacttttctcttgctttttttatgggacggagtagtatttgctactaccggtcttctgttcctaaccatgtacgtgcagttaattaaacactcaatcgtcttttggatcgtcgaaagtccttgcctgacacccccagtctaagaacacacacacctatagcatgccagtgagcataaatgtagaaatttacaatggtaacacatgtctaggattattgtctatatattaattgatcgatccaatcaagttaaacattcatttattatgcaagtttgaacattcattcatatcaaggtacatgtgtgctgcgtagtacacgatcaatcttaaccattaaaatataaactcactataatcaaacagttaagtttttttttctttttcttcaattactgtgagaatttctagcctccacagcaaatatggtgcttcctttcaaacttatcttattataatataatagatagataattaatgtaaagtaaatcaaataattattgttgactagaatgtgatgatgcatacataaaggttatgacctatcaacttgaattgacaaattacaagtccatgcatcatcatatcttacaatcttcctctactccatggtcgtgcatgggacgagttgatcttatctaggactaaatatatagtgttacatgtcacaaacgtgcctcccatgaatacaccataccaaaatgagtgtaaataacattcgtaggtattgtagcgatccaaaaagcggaagcaacaaagatatccaatctcccaaataactcttgctaatggatcggcatcctgatcccctaatcgagtcatatccttgcatgaaagttatgtacctgaaagcacataggatttaggataaataacacagcagttaattacataagaaaaaaatggcactaaagatgtcatccaaaacacaacaagcccaggccaagacaaagtagtcaagccactcaatagtttttcaagttaacttgcaacagcgatctggatatgtataaacaaattaaacttttttttccaaaaaaaaagatttaaacgaaaactaggaacgataaataattaaccagcctatgaattagtggcaaggtaacaaaattaacaaaagaaggtaacaaacactcccaaaggtgtaatggaattaatttcgcggatacctgatccacctaacacaatagtaaccgatatagcctacctaaaaaaatgaagtggcttatattagtaaaaaaaatctttttttgatcattagtaaaaaaaattctcgatgacataaattgcaacataaaatttacaaaattataaaaattccttccccctaacattttttaatctcgttagaaagaaatcaagcgacaaggagctgcaccaactgttgtgagagggaagtagaatagaagaacataaatgtaggactcggtgatggtacttgtcgctggtgaccgtgcacgaccaattgggggagagaaggttgtagcggggaacatgatggaagctctggaggaggatagggcaaggaagaggcacactttgggatgatctgcattatacagcagcggtgttggttggctggttgcccgatgaggaggaggggagaggtgtaaggatcgaacatggacaagaacaagtctaccagaggaagctaggatggtgaacggtagcaaaaaccaaacaaccaaatcttttagcagaaataaaaagaacaccaaaacttaatggactaacctgttgatcacagtgtgatcgtccttctcctgctgatccgtctgcttacaaaataaggaaacataatttgactaaagttttgaaagtgcccacaaaaaaccctctctcatctattaaactcaagtcgttaccctagataaaccctagcttttctctattcctgtagttacttgctcttgggttgagcccttgtctatttataccgaacatctcttgccgtacggatccctgtttcgtcgcgcgcgccgatctcctgtcgactacgtacacgctccggccttttgtcagctgggcttgcagccatgggccgcctccagctgctgttgccttgcttccgataaaataagttcatttaaggtcccttctctgttgctgagtttgacattcttatggatcaagaaattgggtcttgaggagaaccgtttctacaagggacccacatcaacggccgataaaagctggcaagccgcaagtctagcctttcctcgtcgtcttcccgtctccttgcccgaaatcccaaaatcccccaaccgcccacctcgccatccacgactatcaccatggatgtgtctccggcgccgccatgggcggagctcccggacgccgtcctgctcggcatcgtccgccgcatcccatgcgcgttcgaccgcgcccacgtgggagaaatctgccgctcatggcgcaggacgctgctacagatcccgccaccgcggccgctcccggggatcctcctcctgacaccccacgggcctaccctgtccttcgtcgtcgccggcgacgcctggtgcacccaccccgccttcgtccccgaggccttccgccgcgcgcgctacttcggctcgtacgacgactcgtggctcttcctcgccgttggccaagacaacggccacgcgctcttcaacctcaccgactcccaggaggaggaactgcccaactggggcaccttccaactccacgaccgcgagcttggggccgagattctcctcgtcgccgccaccctctcgtcgagtccaaatgtacacggatccgtcgccggcggcatcctcacggctgaccttccgcccgccaactccatggagcacatcgcgttctggcgcacgggttctgatgtgatgtcaaaggccatcagggcaagcggggttgggccattggaggacgtcacataccacgacgaggccttccatttcctcaccctggacgacatcattgtcgtgtgcagagcgtcgatggcagagccagggtcaccaggcaagatcgtggtcgtggatgaggtgcatgtgagtatcgagctgggcaacatcgcgccacgcgatgaactcggttatcgcgacctgcgcatcgtagccagctacctcgtggagtcccgcaatgacctgctcatggtcgagaagctagctcccaacttgctgtcgccggcatcggcgttccgggtgttccagatgatcaaggagaggttacacgacggccaggttcgttactcatgggaggagctgacgaccaagctggatggccggatgctgttcgtcggacaaggttgctccagatcatatgaggcggctaactaccccggtttggacgcaggcgtctacttcttggatgatcggagcacccgccacgaccccaagattccatttcaagaagcccgcgcacggcggtatctctgcagcgacaacgggaaatggtcaggaacacctccccagatcaagctctgcgttccggatccaggcccatcgaaccactctcctcccgtttggtttttcccttgagacgacagatttctgacaccttgttactctgtcatgcttcatctgcactgagttttctgtttctgcttgctgagttcgttggctctcctcatgttgatagttgcctgattagtctcatgtagttgtatgtgttttgtttctgctggagtagaactcctacagtgcacaaatcggcaaatcacttgcagcagatcagtgtgtagttcagttcctgtactttacatcccttccaccattctggaaccttttctgatgataaccatgagcccgtacatctttgcattttcattgataactgatgtctttttttgaacggaactgataactgatctctgaacatctgcagttgtgcatgtttgtgctcgtttttggggtggatggagttttacttagcttttcttgaaattgcaatgaatctgacttagttttctgttgcactcattctgtatgctttagctttctaaaatttatttagtctcatgagagctctctgataagtaactttttttttatagactctgataagtaactgaagaaagtgagaacattgatgttctagctgaatttcagtctgatcaatggccattgtaaactactctgatcttaattactttctccccttattgtttcttggcttggtttggccgttgtaaatgactccgaccttaattactttctcccctttcttttggtttatccactgtgaattactctgatcttaatagtaattgtacaaagatacacaaagtgtattcccggaaaagtatcagactcatcaatggccgaatgatgacttattttataatcccttttccatacattgctagtagaattttaatgtcaagcttggtcatgtgttcagagctttgtgcacatctcacctgagtgtgtataggctcaaattattttatgtttggtgcctgcagattattctgattctttcagtgttgtggagttggtagcactaatagtccttttctagcagagaaaacttgaaactaaaagatgtctggttcagtaatcgttcttacaactttctggttctattgttcttgatgaaattgtatgcagaaataactgggctggcgttacatgatctttgtgttgaaatggataattcagtgtgagaatgtgatgttaattacgtaaaaaaaaaaggaatgtgatgttaatagtgtttagacattcctgatagttgagggtttcacttgtgaaccgggtttacatgcacggattgtgaagtgtgattacgttataagctttctaaatgataaggcattgctgcatggaatattgttctatttattatattattaaaacagttttgaaagtagacatcacatttattctggatgctaaaaattatcacattaatcgaagaaaaaattcaagtaaaaatacaatttaaaaataactgaaattcaaatggtctccctacaccgccacatgagctaagcggggacaacgatcgacggtagtggcgcgacgacggctccatggcctcgtccaatgggcaggatgaattggatcatcgtgacaccggcctcccttctcaacattgccatccttgttcgcacttcctccttccccaaaggcggctgacgtggagcataggagggtggtcgtgcaagggtggcgggggtcggagtggcctgactccatctccctcatctagtcaggtgtgtgtacaagctcaccccctccaacgagttcaatgtcacccaccttgccttttccacgtcgcgtgcaaccctcattctcaccgcctcctgttcaaccttcgtgctccttttctctggggatctcctcttgtcgcttccttggatctccatctccgaggaagtcacctatactcgccgtcgttttgcttcaagtaactgtgccctccttgcctttagcgaaaagaagggtgtcatccacgtgttctgtgtcgacaagtagccatcattggacttgcccacatgctcaacgcccactccatcgagacacgggttgtccagtacccctatcgttggcggtgacaaggtccacctcttttccgctggcaatgtgcgctcctcctctattaggatgtgtccttcgagatggttgtgttcaatgtccccgcctctcaccgtgactacatccgcgccggcatggtgtcccttgccaaccacaacaacttcgtcgcaggatcctacgaccacaacatcaaattgtgggatgcccgcattgggaaaaccttgatgttgtcttctctcgtggcaaattggtggagaatgtgttgtttcggcagttcaacaggatgctagcaatcgttgggctcgtgcgaatcttggcccatcgtattgatacgagggagttaaattacaccacttttaataatttagaggtgaagatatccagtattacggttgagaggtaccttggatctttatatgagagagtcaaagtggacttactccaaaagattgtcaagatccacaagaaccagacaagagaccattgaggcccatatcggtagaaaggattttcaggcctacttctacgctcaactggatttgtttacggccatgagctactaccgaattcgacttcgctcacggcccgtcttgacggacaagatatctattcaaatttgaacgaaaggggcatgacacgtgttactgccagctcagcacggcaccgtcgttccggctataaatggccccacgcttcagcgtctcgtgcagaaagtccattactctcctccccgcatcagaacacagagagagagagagagagagagagagagagagagagagaggtaggagaagagtggaggagcgccgcgaggaggccatggcgggaggaggaggagagctccagtggatcgtgatccatggtgtccgcgatgcggtcctcagagccgccgcgatcatcggccctcgcctcgccgtcatcggcgacgttcgcgtcagcgacgcccctgcggtgctgactctgctggagaaggaggtcgtgcgccaggactgggagatcgagcgccgccaccgcctggacaggcttgccaggctcgaccacgagctcgccatcattctggaggccatcgtgccgatgctgatgcatactccgttccacatcgtcgccggccgggagctgcagcgctacgggtggtcgattcagcatctagcggcgtcgatcttcggccccgtccacgccctccacgccgccgtcggccccgtcggacgcttcctccgccgacatgctcgacatcagcaccacggcacgagggatgctgcttggctcgccggcaacatcctggaggtgcgcgatcgggtttcggccctgaggtccctggttgtgatgttcccggaggaggaccctgctgccgctgcagccgctgcgggcgacgacgaccacgacgacgacggtgcagagttcgtggaggacgatgctggttctgatgtcgagggaggaggaggagagctccagtggatcgtgatccacggtctccacgatgcggtcctcagagccgccgcgatcgtcggcccgcgcctcgtcatcatcggcgacgttcgcgtcagcgacgcccctgcggtgctggctctgctggacaaggagggggtgcgccagggctgggagatcgagcgccgccaccgcctggccaggcttgccaagctggaccacgagctcgccatcgttctggaggtcatcgtgccgatgctgatgcatacgccgttccacatcgtcgccggccgggagctgcagcgctacgggtcgtcgattcagcatctggcggcgtcgatcttcggcccagtccacgccctccacgccgccgtccgccccgtcggacgcttcctccgccgacatgctcggcatcagcaccacggcacgagggatgctgcttggctcgccggcaacatcctggaggtgcgcgatcgggtttcggccctgaggtccctggtggtgatgttcccggaggaggaccctgctgccgctgcagccgctgcgggcgacgacgaccacgacgacggtccagagttcgcagaggacgacgacgaggagtagagactagagaggatgacgacgagcattaagcaaaggttcttctaattacttctctccgatcaatttactgtcatctgcactgaccactgagttgtttttttgagtttgttggcgctcctcatgttgatagttgtctgattagtctctgtagttgtctgtgttttgtctctgccataagctgaagcacagctcgtttactgcagaaatctgtaaatcacttaccatcattgctttaaccattctggtaacccttcagatagttcatgagcctacttgatcttttttttttttttttggtattctgaactttctatgggcatctcgcttgcttaggaactaaaatgcaggttatttcgtcttagctgcctgcagattataatctttgtgttgctacgatgttaaatgaatctaggaatcctcctctctgaaatctgaagtaaaacttgtgattcaatccctgtatttggtactttctggtacccttttgttctctgtgaatctgaatgctgatggttgtgcatgatttgtgcgttgaagagttgaactgtataattcagtttctacgaactgaaaatgtggtccttaggccttagctaatacgcatccatgataaatgcaactactcattcactggagtatcccatgaactggatttacatgcatgggatgtgttctggcactgcgctcaaacgatcaagttactttgtcacccatgcttcatctgcgccttgtctgtttgtcagtttaacatcttttaacctgtgtggaatgcagattatttcatctttgattcctgcatattctagtctcagaagaaacaacttgaagtcttgaactaaaattgtatgagatgtttaagttcagacttcagaatgcataaatagttggactagcattactccactgttctattgaaatagattgatttaccatcaaattagaaatgaatcaaattaactgacttaacatggaatcattttctgcttatatagtttataagattgcttgtcaatcttgttttatatccctgaatttgcaaagaaacccaactgtgagcacagatagttgtacctttgatatatgcagatcgatttgcttctttatggattgctaatccctatctgaccactctattatcactaccaaataggtaccttttgatacctatttgagcacagaaaattgtatgtttgataaactatacattttatttctactgtaagctgaagcaggactcctttactgcataaaccacttgctgctaagaactttacttatcagcattgcctctctggggaaatttcatggttagtagctctcggtgtctcattggatgattgaagtgcggacatatgcatgtttgtgcttggactttcagttagcagtgctcatcattttcttgctaattggaattatattttaccatccagttgcaagagatctgaattagactggtgctgtaggtctttctgtacatattatattgcttgaatttgtttactgtatgcagggatgcctgagaaataactgaagaaaatgagaacattgaggtttcaaaattgaaatgcagaaccctgcatgcaggggcggatccacaatgggggcggagg

SEQ ID NO: 4212 - DNA, 7671 bp, Oryza sativa
  unsure (1)..(7671): unsure at all n locations
ccccactaccgcccccgggacaatggagacccccctaagcccccactaattttttttccatagatttataggatatggggactggagtttcaatttatgctgatgtagtttattcagtccccactactatatttttctagatccgcccctgcctgcatggctgactgatgatttgttggctattattttattttccatgtattggtacaaccttctgtcatgcttggttatgcctttctggagtaaacatttaacctgtgtagaggcagattatttcatccttggttcctgcagtttgtagtctcagaagaaataacttgaagtatttttttgcgaacgcgcaagagtcttgaactaaaatgtgtgagatgttaagttcagacttcagaatacagaattggttggattagcaactagcattaccagtctactacggcactctctcacagtgtgagctacttttctattgaaatagacagatttacctttaaagcagaaatgaatcaaattacccgacttaacgtgaactcgtttttctgccaatatggttattaataaatttattaataatatgagcacaccacagataattgtttacacctttgaatttattaataactagccgggaccccgcgcgttgccgcgggcataacaaatacttcctccgttttataatgtaagactttttagcattgctcatattcatatagatgttaatgaatctatctatctatttatctatgtgtgtgtgtaaattcattagtatctatatgaatgtgggcaatgctacaaagtcttacattatggaacggagggagtatatatattcaaaaccgtgagaagatgagaaggttcccctgattcatattaagcttcaagctctcaaaatatctccatcaaactttataccgaataacatcattgaataccatcacaaagtttttggccatagttaatttaccaaacttttaaacgattacatcatttgcaaccataagctctgtagcacacatatgcctgttacgccatttacaaccacacgcaaccgtgttgaaggctctggtcaatccaccccaaaccattttgttatcaattggctagcggataaaccaaacaaagctattttgcgtacaaattggccttctgaaaactatccatagatgaggctgaaagtttcttaactaaaggccaccaccaaaatggaacatctgttacttccatatgcactcaattgtgatggattgacaactaattgtaaaatattaacataatcttgactatcttgtaagtgatatttacatgtatagttatggtatggagtagcccatagggtaacacgctgtttaactaagctgcctttttgttttaactttgaggaaaccaaactgacctaaaatggttagattgcggcaatttgtttctagaaacggttgaaatcaatctgcaagagtataggagaatgtgcatatgtagctgtagaaatcctctatttcaaaagtagctctataaatccaatagaatagttggtaaacaaaacgtattgtacgcttgcaactaaatgattatatgtaaattagaataatactatactctagagcctgacaaagggaactattaagattgcaggaatctaaatgatgagccaataacagtgttaaggatctttctgtaaagtcaacatatgcattatgaccaatcactggataaacagcaaggatgcacacatgacattcatcctttttcaaaattaataactgagctatcccaaagaaattaaacaattgctaaaataatttgaatataatttgtgctcataattacaaatggtgctaccgcggataaatgtgttcttttcttcagatagaagaacttggaagacttgcggtagtttactcccttgctgataaacatcagttactgaaagaaaatgcagaaatgttagaacaaatttaattattaccttgatggttattatgaattgaagcctcatggtgataaactgttcatatggcctcatttgcacataacagcagagtttgtactatgcaaaatgaagaaatgccatcaacttatgtgtattcactcaaatgaaggccctcatcatcccataaatgctacaaaagcatatgcaaagccatggaacctacaaaagcaaggtgttacacatgcagttcaacaaatatatcactcactgaagaccatgaacctgacagtccatacataggccttgtaatgtaagcaatcatggcatcatactacagcaagcggttgcgatcaagttgaattgtgtgccttctgtactaaacatcaagattatctatgaaatagtaaattatcttctagcttgaatcaacacttcattcttctcatttgtatcgccatgaagccaattaggaacactgaagcaggtagcaaaaaaaacaatcttatgtacaccaaagcagtaactaattattcctatgcatgcacaaatagaacatgtgcaatcggacaagtagcacaatgattttttataggtttacccttcatggtgcattgttttgtggcatcctgcactaaccataggtatatggtcacatcgtacaattacatagggaaaaaaatcaggccaatatctctttgtgcatgctattttgctgtgtgtaaaaaaatgaaaatatgtgctataaccacattgctgttaaacaaatggaatcccagcaatatatataaaactatcatgcatccctgaaacaatggggaatcatgtattatgaaagaaataggataaccttattgttgtttgcattttaggccgattgtacaggtagcaaacatatcagaagaaatatttatggattagtaggaatcatacctatatagagagcaaagcaaaggtaatctgagtagtaaaatacctactgcagaaaagaacagttatgcagatcaacaatacgaggaaaacaaaatgaacctaataagtattagtgcatacagagtggtagaggatggcagtaccaattggagaggtgtggaggagccgacaagcagcagtcacaggaagcgaggagatggccatggacgagatgtttggtggcagtgctgaccattggctccacgagaagacgacggcggatgttggctccacagggggtggcgcagaacagtggctccaagggaagggagcggcacagctggctcgacgatgacgaagcgacacggggtcgccggcaagtaaggcgagaagacgacaatgttggctggctggctcggcgacatggaggctgtagtgctcgctgcttgctccgcgagaagacggcggcgccggtcggcggcgaggatttttggggcggaggtggcgaggattttgggatggggattggggatttgggagtagcatgggtggggaaaggtggggaatggggaatgggagagagaatctttcggagccacaacgtgctgatggacggccggatggaatcaagatggcgagatcgcacggtgcatgcatacgctggtactgttaccctgtagcaaaggctagctgtgctgtggttcaccggaagtgggttacgaaaactaaggatttaatatgatatgacgtgagcactgaaatagacaggcttgtttacacctctgcctatatgtctatatatgatgctcgagccagccacaagaatgtcaattaagaatgtatagtaacaagcttactagatagacactgaaactaaagagataaatctgaagctaacttatccaaactaatcctgcgccatcttagttcctgtggtgtttgcctgttttttcttttcccggcgacggcgctgatactgaaggccccacatgatgagacacagcataattagcatgatatacgctgtaaaccttttgcatggcacctactgcagggctccagaacagttaacttaactgtagttgggactatcttttcaatgtacctcctaatagctgagagcgctctaggggcttccatgagaatatcctcctctatgtgattacaaaatggagaagtttttaggtaacacctacaatcaccatgaatggtgtccaatgtaagagactcgagtgacaccacgttcttcagaatataacaagttagctcaaccaagctctttgcagagcagaaaccagagatcttcacagtcttgaggctgtcatggcggttttcaggaatttgcctcaaacccgaggattttgcaaaaaccgattcatgctccatgcttcgctgctgcccctgaagatggaaaggagaacacgattgagataaatggacccagagtgaacagctatgttagcaggacagagttaatggacagtgccttacatcaagataaaagtttccaacgaaagagaagcgtcaaggaaagaaaccagagaaaaataatcataggacggggaaagtgtcgatactgctatcaaactaatgctcaggtgcttgaggtagaggaatttggtaggcagcactggtgtatttaccgcctgtataacaaatatgacacgtctaanatcatacacaggtatgactaatgtaatacgcatatatatgtaatactagtctataacacctaaagcttctggatatatatatacatacctcangtcctgaacgtatgttaagagtttcaagatttggcataatggaaagcaactcaacacgagcataatgcacaacattcgcacggcccatggcctacttcttcattttcagtgtttctccagtgagagctttgccccgactcctctacagaaaaaactggagagatttggagttttattctctaatattctcaggttagagcatccagaaacaaaaaaactggagagatttggagctttgttctctaatactttcaggctgcacatccaataacagtaaggttgctgagcttctgcagggagcaaggtatcttcaagcaaactatctccgtgcaactagaaatgcgcaactgctccaacgcaggagaattggaaagaagacactgcaattcttcccccctgatactcaccgaacgcagacgcaggcttgtaaggctttgcaaggggccgagttcagcagtgggacgaagggcacaccaatcgagtctgaggtacctaattgaattttgaatcccatcagataaaagtgagcatgggaaattgtactctctcttggttttacacaacacaagggtcagctcttcaatccctggcttaacaaccacctgaagccaactgtcaagatagcgactggcatcaaaccccacgacgccaaggtattcaagcctgaatattttcacgccaatgcctgagtggttcctcataatatggtcaactttgcggctgaaattccctccacaagcactcgcattcaagccaattgtatccttatttaaaatgagattgggatgacttctccaggactgtaaaaaggttctagacaaacaagcagcacgggcagcatcacgcattggcattagggaatgtatatgatgccagatgtcctgcgtacacaagcatgggatggaagatcaacattgcagtcgtaaatccaaatggttacttccattagagaacgaaaaacggtagaacatcatggcatgcagcgttacgtagaaagatggtgcagtgaaatgtaaacatggcatatagagaatttttgctaccagtgtcattagtgggttttccaaggagaagaaataaagttgctaatggctagcacgaattaactaccatgaaaaatacttttgacttggattaaaagaatacttttacttgctgtagcaaatctagccatttgttctggattaaggtagcaacatagcaaaaccaatactcttgtacgaaatgtgaagcaggtggaaagaaaaaatatttttccaatttttcttaatgctaataagtgcagcatagcactaaagcaccccagttatgccaatttatgaacatggtactaaatatgtaaagcatcgcacttaggtaaaattctgaagagatttgttagtaatactgccagcctttgcagagagaaaagtggtaactagaacgaagagaatctgctagttcagtacgagtgtaggactgtggccacattgcagtactaaaatactatatctgacttctgtttatataaacaatactgtaatattcaggtattcaagtatagtcccaagaattagccctatcagatcactcatggtaatatcatgcttggaatctaagcctgcatcatcagaatttcatacagcagtacctcaggaaggcatgggtatggggtagaacgtctcattgttttgacagctcgagaatcaccatgctgacaaggtgatccctttcttttacaccacctaatcagttcatctgcgacacaaaaaaaaagaggataaggatggctatggttgcaggttgctcatacatgaatgcagaaaaaaggaagaaacgaaggcccaatctcttgagttcagagtaagagtaaggtggcttactctgggctctgatttggcggcggcgccgcttctggttgcgtttcgcaggcatgtggaactagtaggtcgacgacgactcttcttcgtcagatctcaccgagaaatcacttccgtttcccctccttcagatcactatttctctcctatctactactatctgtttttgtacttgaattttgacctcaatttcggaaaattcgactaggcataaaaaggattgcgatggccctggtacgagcaagaggaacctggactctttttattcccttccttttcctatcaggacttcttgaattgctccaaattgcgccctcctatagaaaatcgttaagataatgggagtcctttttcctatcaggacttcttgaattgctccaaattgcgtcctcctatggaaaatcgttagagaatgggagtataaaatttagccatattgtaacatttgcgctgcaaacttgtcgtttagataagcagaacaatactatctctcgatataacaactcccgaaactaaaaatctcctgcaacggcaataaatctgcaagcccggttgagttgcagagaagaatgagtgaaatcggactcaccggactagagatgcagcttctggggaggcggatgacggcggcggcggcggcggcgggaggaggagattgaagagcagcgtgtgataaggacgcgtgatgtgaccggctgcggcgagaagtcagccaaactagagaccgggcgacgaacagcagcggcgtagggcacgtcggcgacgcgaacctggcggtggcggcggtggtgcagcgatggaaggaaaggaggggctagaaagagaaaaaaaaatatccaaaacattaagagtaaattacagttcatgccacgttttatattatcaaagttttattttgattacctttaaactattttttttattttagaccatgtaactttttttattatttatgtctaccctctgttccggtgaagatatgatatgtataaagacgggaaagtgtattgaaaccaatttattgattggtgctggaaaagttgtttgggtagtttaatccgaaaaaatggtaaagttacttggttcaaaataaaaggattagttgaaagatgactcaaaagtgaaaatttaactataaaggatagtccaaactgcaatttactaaaaaaaacttagtttacaagatctcaatggtgctttaactgacaaacta

SEQ ID NO: 4213 - DNA, 4799 bp, Oryza sativa
tattcagttaaggaaagagaaattagaagagaaaaataattttggaaatatgggattaccattgtacccttaagtaatatatgtgggggtgcatcagtacatgttcgatatcctccttcccccagatccattcccatcccgaagtccttggcgcggcggcgccagaagcaggcggtggagcagctcttcagcgcggccgggagcaggtggcggcgcagctcctcggcgtggccaggagcaagctgcggctccaactcctcggcgaggccggaaggcggcggtgatggctcctcaacacggcgtcgcgagcagcaggaggcggcaggagtacctggcagcgacggcgatcctcagcgctatggcaggagcagcaggcgatggcagcgactcctcggagcggcaaaccattggtgatgaatcctgctcttgacgggttcatcagatcgaaaggacttgaccaacatgaagatacctgatgtggctgatactatgcacttatgcagtaagacacaggatgttaatgaacttaccattcatagacatcattcatgttcatgcaatgtggcgccattagattttcatacggattttgaatcatttcacgaaagctcagtacaaaataagggtaaaaatacaagtgttgtttaaaaagtaggggcaaatatgcaatagctagcaagggcataaaagtcttttcgtgctcgacttaaccccgttaaattgaccatccaaaccaggggcaaatctctacttcgtttcaaaaaagtaggagtaaaaacgcaaaccctaaaaagcgagggcaaaatcacaattgaacttcaaaataggggtaagaatgcaatagccccttttttttactatagttgaatcaaattcaaagtaaactcaaacttgttcaacacgaagttcaaaattatttaaaattttacataccctgcacatctcgtaccccaaatttcacatcgatcaagcacgtcctcaagacggttgcaggtaagaccgtaagagtgcctagcagcggccatgctagatcatcaaatggccgttttgcatcaccaaacggctgtttgaaacgagaccaggagatcttcagatgcatagaaacaaatgcatatatttaggaatttaggaacagaggtagtagagacagacaaatgaacatcatgaatatgcatgaatgatgattgaataatgatggtgtcaccattacagagtaattacatcctgtgtcaaaaatcaggtggtgtaaaattagacaacactgcttatctacctgttagtggcaaactaaaaaaaggtaacagctgtctcctctcttgttatgtacatcaaaatacagcatcagctgatgcaggctataagagacggctaagctcaggtttggtgactactgtactatggcttgcataagttcgtcgtatttacgatcgagtaaccagtttgttgttcttcgctaacaacagcaatgtgatcaataatgcaccccgtctttctttctttcttgccatgataaatttggctccgattcccctgcagttgttgtatgatggatgcctatcagctttgccacttctacagctggacgccggcatcctttagagcagcagtcacagaagcagaggcttcctctagggttcttgtcttcttaactgtgttgaatgcctccacgacatcaccttcctcccattcgtcaaaatcatctaccccaatgccacactctagcccagcaccaacctagtggggaaaaatgtaaatgttgaacatcacattacggggactaatatcaaaataaagtgaatgtgaatataacaaattaataatgtgaaaactttttctttttgcagtgatactcaggaaacacattgtgatattgcgggtaaataactttctcacagagtgcagtgaaataaaaatagttgatggattcatggttatcgtacgtacctcctttacagtttctttcacccgtcttaacgaatcaagtgtacccatataaacttctttccctttacgaagaacccgaacattgcagtcatgaacaactttcccagtagtaatcatgcaacccgccaccttgccactgccactactaaaaacagcacgaactttggctgaaccaattggtacttcctcctgataaagaaagacaatgaggatggacatccaaatattccagcaacttgaaatgacaagtaaatactctaaagcacaccaaactatcatggaaatggagaaataaataatactccctctgtttcagattgtaagactttctagcattactcatattcatttagaagttaataagtctagacacatatatatgcctagattcattaacatctatatgaatgtgggcaacgcaaggaagtcttatattgtgaaacggaggaagtattttagaagaaggatttcccagcatgcaaaggaatgtggtccatgtggacctatcaacaagggcatgtcccaagactcaactggttcataaaagttgaaaagcaattttctgcttacctcagcaagttcaagaagtccttccatggcattccgcaaatcatcaatcaaatcatagatcaccttgtacagacgaatttccacacttttcttcttagcatagcttttaactgatcctggagctttgacattaaaaccaaatataatcccttctgaagcaacagccagatcaacatcactgacactcacatctcccggagcttgaagtaggaacctcaaggagacattttcttgaggcagcacttggattgcttgcctaatggcctcaactgaaccctatttgatcatatgcttggcatatttagcaaatagaaaaaatgaatagttcatattcgataatgcatatagtttgcaagagcagtggatacctgaaaatcaactttaaggatgatattaagctcgtgtgtatcaattcctacttgttttccagatgaaacagatgcagcaatggatgacagagtgactttcccttccccagctttcgaagatatcctttcaattctcagtgcttcagcacgtgcgtttgccctttcacgtgcaacatcaaggttgtccacagactcaaattcatcaccagcaaggggtacattattcaagccaataacctgtcataacatatcatttcttgataaattcaggatgcttacaataatactacaaacttttgaagaacatttaatgctcaatggtactaaagtaaaaggcagcaagctatggaagaaatgtttccttttcaatccatgaattgtgatagtatatgtgtagcatccagcttccaaaattggcattagcttaatccttctatacgagcaggcccatgtatgtattgcacagtacttatactctcatccttgcttcatgaaaaaagaattaatctagaggaacacatgaacttgtgatgctcccggcagcacaatgtcctacatggcaaatgaccagaatcactcttggtgcaatgctgtatgcctccataggctcataggcactcacactccagcttccagaatctacattagcctaacccttctgtagggacaggtccatgcacatatatgtcacgtgcttcactcggtgaatagctagaagaatagagacagtagttgtgattgacaggtatgtattattattattattatctctaaacctattttactaaattttactaaaatagcttatctgtaagcctcatgtgccttctgccaatgtgccccgtgcatttcctccagtcaccacaccttggcccttctacaagtgtggtcccacatggcagatagcactgtacttacacattcttgccaaattaaatgtgtaaacctgaaggttttgtggttagaacatgtgagcttatatgctgaccacaaactaatttctccattggagactaatcccaccatactgaataacatgggccacaaaggtctccaataatgggctgaggtgtaattactcatcataatatagtccctggaagaaagcaagagaagttgatagcaacaatcaagctcaggaataccagggtgattaaagaaaacccacttgtgttttttcttgtcttctcctgtctacaaaattcaaattttagaattttcagcttctgataaaagggtgcatttttacatcatgtaaaagagctcacatataaggatgccatttaggacttgagcaggtttatatttgctagctagtcaacagcgacctctatttatccatattcatcaatgtcatgtaactaacagttctaatgcacataaacatttatagtttcagatgctttctctttatgtcaaaattgcatcagacttgtgatgagtattttgtttagagtcgtcatggccagaggggccatctcatgaggagaaccaactgtaatttcagtaactttttcatccgaaatatggtatattaggaaatgttaggaaggatcatggtaaaaggaacgaggaaaataaaggaaagggaaaacctgcacggcattggatggcccagccttatcgataagctttccaccatcatcatacattgcacggatctgaaatgataacaatgctatgttatactccaaatgacccatgtttgttagtttgtgcttctttttttcatgcaagatatattacatattctggatcaaatcataacaagtaggaattgagcaaaccaacctttccaaaagcctcaccacacacaacaatatcacccttgtttagggttccattctgtacaactagggtggcaagagatctttagctttggcaaggcatgcttcaataactgtaccctttgcattt

SEQ ID NO: 4214 - DNA, 2408 bp, Oryza sativa
ccaccccacgcctttggcataagtccaatttgggaaagcttgtgcatgacccgttcagcattaactccttccttggctatctgcttaattaggagggtactgaaacatgacaagagaattttccttttaacaactgtaatcgatgatgaaatgactaggaaatagaccttgtttatggctatcacaatagggactccagctgcctttgcatgtgcaattgcctcatttgtttgtggacgaacaccatcatccgcagagacaacaatgatacagatatcagttaccctagcaccccgagctctcattgcaccaaatgcctattgttgttgaagaattaggagttgtaatgccccacgttaatacaaccagaaagagagaacatatggtaaaatatacatatacttttgctatacctcgtgccctggagtatcaagaaaaacacaagcatgagggtttccatcaacctgtacaataacctgataggcaccaatcccttgtgttattccgccagcctcagatgccaccacctgtaactaactttatttagatctacaggtttataggaaataggtgtttccatgttttaacattagtaattattccactccctttgttcaccaaaacatgatgttttagccaatgttgcagagaacaatgcaactgttcaatgccaggaaatggactaattagcccgtcatctactcattaatctaaagccttcattcgttccaataccaacactggtcaggcaaggcacggtgaaagttcttcgaatcaagaggcagggtgccacgtggaactgtgaatgtgattgaacactttgaagagaaactatgtactatcaactcatcctagaatgtgcatcatggtaaaaaaacaaatgcacattccactagctttaattttacccagaaaatccaagatgtttctatttgagaacaaaaccaacatactaaaatgccatctaaaaaagaatgaagggagtatcatctaaaatcccaaaatcaccaacaggaggaacatgccaaggagtgtctaccttgctcttgcgtatataatccaacagggtagtctgcaaacagaaataacagtgtcatacaaacagtgcttcagaacagttaacaaactgaaaaattgatactggcttagtacctttccatgatcgacatggcccatgatagttacaatagggggtctgtcttccaacttgtccaaatcttcctcgtcaagaattccttcttctttgccatctcttccactttcactggaccactttccagtacttctacatcatattccatacaaaccatcttaaccagatctttatcaagtgtctgaacattgtcaagcatagctcctctcacagataaaaatcgcagaatttctgattcgtcaattgccaattgatatgccaattcctcaattaccattccttcttcaccaacttcaaggatctcgactctaactggctcttcaacttgtgaagcctcaagctgaagtcttgcagctctgcgttttgccttgctccatctcctccccttgcgcactgcagtatcctcatcaactaaaccatcattttttggcattcgtcggcgaggaccagctggtgtgcttgtttttttacgacgatcatccttgacttttgctggtgggcctcgtactggctttacaggttctatcagtgctgcagctacaactggatccactattggtttattggaagcaaatttatcaatcaggatgggtccctttttctcctttgatgtatcagccttgacaggccgacgaggtggtggtgctactactgaaggttttgttagtagaggaggtactggttttgttggagctggcatagaaggttttgctgtagaactagactgattcctactttcagagcgtggatgatctctgaccaccttatgtacagttgacacagggtttccctttcgccatacgctcttaagtgtttttgtcttcctcgaattcgcaccctccgctgctggcgttgccgaactatcaggcttcgacgcgccattctgcctcaagtcaccatttccaattccatttccagaggttgatgccttgagcttctcagccttctccaacacctcatccaatgactccctaaccttatccctatcctccaacgtcggcctcgacggagatggtgatgccgcatttacgctctccggtggcccattcgcccggattggcttctgcggtggcttcaaaagaagatcgctatcatcactaggcttcacactcacactccctctcgacgagaactgaacccccttctcttcatcgatcaaattggtcacaaccatgcatctacacagcctcccaggcgcatactgccaccgccggatactgcccagaccagcaaacctgatcctcgaagccaaatg

SEQ ID NO: 4215 - DNA, 13329 bp, Oryza sativa
  unsure (1)..(13329): unsure at all n locations
ttacgctgggaatctgacacgtttcactagttacgcgacacctccttccgtgcgaaacttgtaaatatttatttggcaagaaaaaaatcaacgataaaattgtaatgtaatagtccagctctataactttcctgtagagtttgtctccatataaaatcgtttcaagattttaaaagtttgtttacacgaatagatttgaagacttataacataatatatttggacatataggccttcgttaagattccaaaaaattttggccaaaaacgtcacatcaaatgtttggacacatgcatgagcattaaatgtggaaaaaaaacaaattgcacggtttgcatgtaaattactagacgaatcttttgagcctaattacgccatgatttgacaatgtgatgctacagtaaacatttggtaatgactgattaattaggcttaataaatttgtctcgcggtttataaacggaatctgtaatttgtcttgttatcagtctacgtttaatactttaaatgtgcgtccgtatacttcaaaaattttacacccaaagaactaaacacacccataagcaatcgtagacaaaaatgttatcaagtggaaagttttcttcatccaacttaggactccttggaaatgctgaactgaaaaactagaggaacagaaaaatatatataattgacaaaagaaatgcaagtatgaaatagaatatcaagagaataaaataaatacaagaatagtctttaattgaaccgctacatatgaaaagatgcatatttgttgttatgttctactgaataggaactatgaagatggattctaatagctcgagtggacgtccatctgtttattgcatgtcaactaaatgattacaataaaaaatcaaaaaaattgacaagatagattaatatgaaatatatcactccacaacacatgtaatttcaaattcagcttctataaattgttacaaaaatatcaaatttaactgtaaatatacgtacagtaatttgagttttgtttgttatgtttgttacaattttatagaagttgaattttaacttgcatgtttgtggagtgatatattacatattaatctatcttgtcaattatttttattttttcataaccatttaaatgatatgtattaagcgagtggacatctaccactatagctttgttgttttgttgttaccaccaccaccactactactattagacttttgagggcaaaattttttatctttcaaccattggatttgttccaagattcatgcaggtaaggagatgatggtttgtacgttttgagttcttacatactcccttcgtctcaaatttaaagggattttggataaatggaacacattgagtgtccaaattcatagtatgtgtttatattcatagtcttataaagtgtctaatccattcaaaatctcttatattttagagcggaggaatacaattacgtactacttcagtacactcagaatgaaaaaaacactatagttaattagttggtgtatgtttagaagttattctctcgatttcctatcgaaagttaaatagccactttaagaaaacaaatccgagtgtgaaatgactttcgggatgtaggcgccatacagtaattttcttcttaatcatacgcgactctgctttgaattcagaacgccaccacagaccacagatccgctcgtagtacgtactacgagtcaccactgatttcgatcaaaattgaaaaagaagggatgaaaccgaaacgaacaaactatgaacaaacgcaccagcacgcacgcactcacgctgtcacgcgcatccatggacacgcgacgaactccaagcatccttacgctttacgcgagcaattttactgcgcggtacttcaattcactcctctgcttgatcggccggtgacactgacgccgacgccgaccggtttatgccctggcggcggcgccgggaagctccggcgtgacgatcatgttgtagatgtgctccatcatccgccgctcgaagtcgccgccgctcccctgcaggcgcgcccgcggcacccgcctgtccagcagcccggccgccgcctccgtcgccgcgcagctccgcgaccgcgacctggacagcgcggcgccgcctccggcggccagcgccagcatcgcgtcgacgtacgcgtcccggatcctcgccatcagccgcagcggcgacagtagcaccgcgcgcgccgccgcccgggcgttccaggacgacaggcgcccgcgccggacgggggcgtccttcgtgctccgcgcgccgccagcgccgccgccgaggcgcgccacgcggaggtgccgcgacggcggcgagccgaggcgcctgtagttcctccgcgcccagtacatctggatgctgcgccgcggctgcgacacgaggctgatcgccatgcgcgcgatcctgctgctgatcgatcgagttgctgccggtgctgcactgctgctgctgcgttgaggtgtgtactgcgcaatggatgcttatatagtactaagagctaaggttaattcagattagtgactggagatgagagaatttgtggtcaatataattggatcaagcacaagctaatctgactgtgatttgggttcttccttgacggcgcattgattgggagttgtagctcgtcagcgttgaaccgttcgaactgggtgggtcgagtaaaaaaaagaagagccgccaaagttgcaccgggaagaagcagataccgtgcgtatctgtcggcgaggcatacgccattctcgtctcttgctggagggtagggtatcgttgacgattgacgagaaatgcgtcgtgacctagcaagttttggatgctgcttaactttttgggggtgtttagattgaggggtgtaaagttttaatgtgccacgtcaggtattatatagggtgtcgtatggggtgttcgagcactaatagaaaaactaattataaaatctgtcggtaaaccgtgagacgactttattaagcctaattaatccatcattagcaaatatttattgtagcaccacattgtcaaatcatggagcaattagatttaaaagattcgtcttgcaaattagtcgtaatctgtggaattagttattttttagattatatttaatacttcattcatgtactaaacgatcgatgcgatagtgcgtaaaatttttacgtgttaactaaacggagcctttaacccagtcgacgagtttctcaagctgcaaatgtacagctcatggaatcccccttgggatcgtgcactcatggaaccatctgtacaatttgagacaaacacactattttccacacggaaattcttgttctctgacacgtcgctctatttatcacagctccagctccatctttcttgaggtgaagtctaaccaaataatttcagctccgcctaaaatagaaatagtgctaggtgagacgctatcataaaataaactaaagatgtaagctggttttaggctgctactacacaagtccactccacgtccaactcccgaaactaaatttatcggttagagttctacaaaatagacccgtcatattgtgcgtgcgactgtgaggccttgtttggaagttggaacggcccggcacattcgcatatagtccgctgcaactgggccgttatttttcgttgccgaaagaggccttatggagaccttggaccgcacgattttcaaccaacgttaaacggcaggcgcttactcgcacaaaaaggaataagttcactcgaggtcccttaacttgtagccgagttcgaaattcatccctacaccacaaaaccacatacaacgcatcccccaatttaccaaatcgtgcaaatcgtgcaaaaaggtctctcggcagtattgtccccggttttgactgacgtggtgcctacgtagcgctccaattactaggttttcatcccacgtggcattgacgtggcgcttacgtggcaatttgataaaaaaaattaataaaatatatgggacccacttcagttaaaaacaaatggtggaggacccacgtgggacccatatgtcatcctccctactcctctcttctctgttatcgttttcttttctttttcattctttttcttcttttaatttagaggatggcatccggcgaccggcactcggcggagagggcggccgacgagagaggagcggcggcgcgtgccgcgccgacggagaggaggccgctcggagcgaggcgtcgcgggagaagggcagcacgcggtgagcggcggcacgcattcctcctccgctagatctccggattcgtttttgtacttgctagtcgcgtccggagaagaggagaagaaatccagtcaatcagcatcggcatgtcgtcgcttggggtggtggtggttctgaattttgattgattcgtgctttttcgttgggggttgcttgccatgggattggtgaacgaggcgagctcgtcgtggacaccatgctggtgctcaagctcaggctcaactccatcaagacgctgacgctcctcgtgccactcagcatattcgccgatgtggttgacctcggcgccgtgggcgtcattctcaggaaggacatgtccgtctggctcaccaagccaccactcgtcttcgcctgcggtggcctgagcgcgatcctgtacagcatcggcgtgtctgtgtacgctttcgagggattcggcatggtccatccgcttgaggcggaggccgccaacaagaagaagttgggcgcaccacgctcgggctatccatggggccatcccgtctccgcccccctgccccatctccgcccccctgcggaggaagagatgcgcagcgggcggcggccagcgaccgtctcggccccactcatcggccgccgcatttttccctctcgacgcgcgctcgccggccggcgaggaaggatggccgggagggagagaggaggcgccggtccatcctctcccgtcgtccgtggatagagaggagggtgggacccactgatacgtgggtcccattatttttcttgtgtgtaactgatatgtgggtctcacttttttgtttttattttaattttttatattttgcttccggtgccacatcattgccacgtagaacgaggacaaaacaaaagagccacgtaggcgctatatcagtcaaaaccaccatcgaaaccgctgaaggacttgctttgtaccggttttgatagttgagggactcgttgtatctggttttagtgttaaaggacgaaaatcggattcgttgacaagtttaaggacctcaagtgaacttattccgcacaaaaacgaaaggaaatgggcttgccctgacgaagagcttgaacagcattttagactattaaaattttgttagcattaaatcttgggtaaattttggctagtagatttggctcagctctacaaatttggtacaagtttttcctcaatccaaatgtttatcaagtactattcgtggctatcaaatattacctccctcacaaaaatagttcattcaggtgcataatcatgaatggaagacttgtctacgtgcatagctagagataatagacttatactggtgcatagtaaaaaaaatgggaatttgtttttcaaccttaaattcaaagtcgattttgggttttcttcatcgaaatttattttttaacctttgtttttagattgttaagaacatgtatatgtaagttttattcaaattactttttttctgtaaatatgaagccaaacgatggggccggaagtctttttgacggacggagcaattggtaaggccgaattagtatcaaaccaaacacaacctttagatacgtttgtggttctatgccaatttttttacaattgcaagatttgattactgatgcagtcggcaatttttttcagaacaagcaaaaatcatgcaacctttagatacgtctgtggttctctgtctgtttttcttttcagaagaaacaatcctgaatttgacaaagtacttacctttttcttcgtagaattagactaaaactaaaccaaaccaaacgaaagatttttcccatacgacagaatggctgcactcggcgagatgaacaaggtcactgtcgtactacacgaaacggcaagagcagctacatgcctgtactccactccaacctcatttgttgtacacttgtactgccgatcagttccaagcagcaaaacttgtacgtttcatctgagaattgcagtggtagtaccgtacgtctcacgcgctggccaaatcgctcgcatcgtgccatgttgccatgtcaaacaagctcaaaccgctctttaaaaatctgaacctttctgatctgaattttcggtttcgctgtcatttggagttcttgctgtgtctttctctgtctacttttcctcgaaagcaacatggtcagattaagaaactgtgcataggccaaataagcgagttatattgatcagctgcaggatttgcttatttgcaagcaaagaattaagatacatggaacatatcacaaatagaaccatatctatttttcatttcccggctactaataagtgggaagaacatttatttcttctagaacctataaataaccaatagtccaatactaccatcttcctcgacaaatgacaaggccgtagtagtcgtatagtacaaggctatgctaattttgctaaactaatttgggggtatctaattaatcttcccctttacaaatgccatgctcgatcgtgtcacgtaccattcgtatgtcgcgtttagaggaagaagcagcccatgccggagcgcggcgcaaagaacgggagcacggcgtcgggcgacgccgacgcggggggcggcgcgctctccgccgcngcngcngcngtgatgctgttgaacctccggcgagccgacggccgcggcaggttctccggcacgatgttctccagcgagttggcgcgccacggggggcactgccggcggtcgctccaccgcgccggccccgccgccgccgccgccgtcgcctccggcgcacgcgccatcacggcgccttcgccggggccgcccgccgtcccgagcaccgcgcacgccgccgccgccgcgacgcacgcccggcgcagctgctggaggtgaggcgcgccgccgcctctgctggcggcggccggagccggcgcaggcttgagctggcaggagaccaccatggttgccgacacgtctcgcagcagcagcacagcaattttgatgggaaaaaggccagttcgaagcgagatttatagcgtttttttttcctttttttttttgtttgggtgagcagaggagggtcagatcacggctgttgatctcgacgtggacgctggattttagtgctagcttagcaagcgcgcgcgtgttgctttgcttggcgtgtggaaccacctgtggcgtgtgaaaagttgcatatggcacgtcgggggcgtggggtggggcccgcgggcggtggttagatatttggcatacagtaaatagcgtaattagcagtttgcgagcttgcaactttgcaagggggaaattactcagtcacagcgacgagaggagatgcatgggaaacccgggaaattacttggctgctgctaaaatagtctgccttggacgggttccttcgtataccaaccggagcgagacatgtaccggactttctatttgcgccacgcttggcacttggactcttacggttaaacccagattcaatctaggccggaaataacatgtatattaaaaaatttataatagatataacgagagactggatttattctgagccgggaactaatttatttatgataggaataataaaacatccagattagttccacacttcttgacttattggattgatttctaatatcttattgtccctatcataagtaaattgattcccggtccagaataaattctgatctgttattgtatctacataaatttctttctttagttgtcattccggctcggattgaattcgggcgcaaccgaacaagtcctaattcgtttcaggagggtgagctgtacgagccaccaagtcgccaacaacctaggaagaactcgtatcgccattcgtcgcatgccaacttggaaatcgacgttttttttttctctctctctctgcagactacaattacctcaactcagtgtcaactctgctttcgtagatgggagttcccaacacggcggcacactggaagccaagggaaggcaattaggtaaaaacccctcgctggacacaatcacgcgcacaaactgttcgagggaattccgcgctgaaacaggcacagcttcgtcgcatgatattttaagtgagaaagctaatcaacggtgattctttgaggctagggagaccctgtttagatgagactaaaatttataagtcactatcacatcgaatatttagacactaattataaatattaaacgtaaactattaataaaactcatatataatcttgtactaattcacgagacgaatctatttaccctaattaatccatgattagcctatatgatgctatagtaaacattctctacttacggattaattaggcttaaaaaatttgtctcgcgaattagctttcatttatataattagttttgtaagtagtctatatttaatactctaaattagtgtcaaatatatagactaaatttaagtccatggaatccaaagttccaaacaccacctgaagcttcatttctggtggcaccatgatttgattctcttgccgttggattggatgccgtccaatcggtgatttgctcgtacatatttttaaccgcgtgtcaaaagtttgtaagaatatcttttttacgtgaatcattttcgtatgttagaatcactggggttcatctgcaaaggaactgaaacagatgcagagagacttggaacttggaaaaactgaaaacctctattctggatttctggtctttcaggtctcttttttttgggcctgctttgggagcccatcatcgtggaaaggctaggaatcatgggccgccaaaacaggccttaaagatcacaattcttccagtagacacctgttacggtaaaattaccagattaggcaaataagaaaatcagatgaaaggagttatcaaatagaccatcatagtcaataacagagtgctgaaaaaggaaagacagtatatattccaaaaattgacaacaaatttaatgttgatagtcggaattttaaatatatgaccgttattggcttttaaatatatatgctattgtgagccaaagacataaatctaaaaaaaaaagtgagccaaagacaacatagagagatcaagacacatctgtttattgacttttaaatatatatgctattgtgagccaaagacacaagatagaaatccattcaagacacatccgtttcttgacttttaattatgtgctattgtgagccaagccaaagacataaatcctcaaaaaaaaaaagtgagccgaagacacaatatagagatccattcaagacacattcgtttattgactttaaatatatgctattgtgagccaaagatatacttcctccgtctcaaaataaacaaacatgttatgtaaccttttctagatacattcattgtactaggatctctatccaaattcattgtgctaggaaacgtcacatcctattctagattgatttttatgggatggagggagtaagatggagaaccatttaagacacatccgtacaatccttgtcctaatcaagaaagaaagatggtacaataggtaggtcagtatgacactagtacaaatcaagaaccaggcaacactgtcatgcatactttaggcatctctgccctctcatctaagagtgcgagcggataggctgaaatattgacctatccaattgagataccaagtattaacctatctcacatagtccaacatggactaaatcagtagaaggaaaaaaaactatttttgttgttttcggcatccaccacacaagntngnaagggaaatggaaanaaaccgggaaancccaattttttntttncaaccnttggggncctcggcaccatgtctctcattcatgactactatcgcaattcccaaaagccctcaccaacacactgtatgaccgagatcttttggtcatattgagcatccaccacagagttaggtagagtgaccttactctagtcggcatcctatctccattcatgattactcttcacaatttttcatgcgtcatgaccaacgacaccatgcgaccaaggtcttgtggttgttttcaacattgaccattgttaggctaggttggagtgaccttactccaattggtaccacatcctaaattcatggctactctcacaattcccatgcgcctcactaatggcaccatgtggctaagatcaaggccactcttaggtgttgcatgacgagtaggttcccaatttcattttagggtcaaaatgtgatccttagcaagatgcaaaattttatgaattttgagcgatatttgtgaaatccaatttatttcattttgaggaaatatggtttcttttgcaatggaatttgatgaaaatcaaacaaaattgtgaacccaacctataagtctgcaatacttattttaaaggattctttttaaagattatcgatctattttttttattattaccaagaagagattaacattcaccaatgggaattttttttggattaccagttgtagttaataagtactactgaaccggaatagcattctattataattcgaagtacatcatgttactcaaaacgcattacaactttaatccgcttcgtctaaattgatcgcattgtgctccacaccatgtctcccattcatgactactctcacaattcccacgagccctcaccaacgcattgtgtgagtgagatcttttggtcatatccagcatccaccacagagttaggtagagtgatctcactttgactagcatcctatttccattcatgattattctcataattttgcatgcatcatgaccaactacaccatgtgaagaaggtcttttggttgttttcaacattaaccagtgattaagctaggttggaatgaccttactcccattggcaccacatcttaaattcatggctactctcacaattcccgtgcacctcactgacaacaccgtgtggctaagatcaaggcccactcttatgtgttgcatgatgagtagatttcattttcattttagggttgaaatgcgatccttagcaagatgcaaaagctcatgaatttcagacgagatttgtgaaatccaatttgtttcattttgaggaaatctgaatttttggaaatggaatttgattaaaatcagataaatttgtgatctcaacgtgtaagtcccaatacactatctattttaaaggattctttttaaagattaccgatctaacatttaattcctaccaaaaggagagatcaatcaggagcgacattcacacatggggatcctctgaattaaaagcatcggtcaatgagtgtgactgcaccagtagtaatgtagaggatccatgtcctccattcacccacacgaatgaacggaaactacattttattataatttggagaacaacatgttactcagacaacatgcattacaacttaatatggttaatccaaatcgatcatattctttagactacttgcgccagggacgtgactatatgagacaatgatactagtcactggctcacggcccaaattggtgggagaaaaaacaactcactttttggttgttttcagcatccaccgtagagtaagataggctagagtgacatcactccacttggcaccacgtctaccattcatgggtactctcgtaattttgacaggtcctcgccaacgcattgcgcaaccaagatccttttgtcgtatccaacatccaccgcaggtaaggtaaagagtgatcttctatgcatgattattcccgcatttttccatctaccctcaccaatgataccatgcgaccaaggtcttttgatcgtttttagcatccaccgtagagtaagctaggctgcagtgatctctcttcgcttggcaccacttctccaatgcatggctactctcataattcccccaagttcccacaccaatggcatcgtgaggttgagatcgaagtcctaggcaacatgtgacgtcctacaggcagggtttccaatttggtgtcaaaatgcgagccttagcaagatgatgaattttgtgaatattgagtgagattcatgaaatttgggcaatttcatctaggggagctccaaatttttggcaacgaaatttgttgaaattaaatgaaatagtgaagccatcccacgagtcttggtgcaatatctttattttgatttccaaagatcaggaccttacacttaattcttaccccaaagatcgattaggagtaacattgatgaaatgggatcctttgaattactattggtgaaagtagcactcactggtatgtaggccggaaaacacatgttagtcgtggggattgctatctagagcagctgtgttttcagcacacactttcatctgaaaatgttcatccaaataacttttgtttgagaacttccattcgaaacactttcatctcacacattcatgtgaaaacttacatttggaaattaaaagtgtgtgctaagggcatataggaacacatctgcgttaaatagcagttatggtacttcaaaggatccattttcaacattcacacattgccaatgaactagaaacgacattttattattaattcgaaaaccaacatgttgctctctcagactaaatgcaatattattacaactttttaatctggttcatcaaaatcgatcacattgtttcccccacataaacttcgaaacccaaacatccctcttcttcactgcatgatttggttgagagcaccatggccaccaccactgcttccgccgccgccgccgttggtgttgctgttctgactctcctccatggcgtcggcggcgccgctagccatcatcgtcatcttcttccccgcggtcgcgcgccacgccgacgccgagtacagcctctggctatgccaggtgagcgtgaggaagccgccgttctcctggacgccgaagccggcgccggagaactcgcggagctgcatcgccgcctgccagaggccggtggcgccgagcggcagctgcgtcatccccccgcgccgcagcctctccacccaccgcggcatctgctcgtggcgctccacccggctgctcccctcgcggctcacgatgtcggcgatctccccctgcaggtacgcctcggcgagcgggttggccgccccgttgccgccgccaaggcgggtgaaaaccttgaccgaattgaacaaggaaggggaagaaaaaaaggaagtaa

SEQ ID NO: 4216 - DNA, 545 bp, Oryza sativa
cttcttagaggacgctgtcatggccggctgttcccgcttccatcttcatcgctttcgactcaacaagacaaggaagcactagcagccaccacaccgtcccttgagcgatgacattgccgctttggtcatccctcctatgctatagtagagaaagtagtccataatcatgatctaccagtttcagcagagtccaataaattgttagtttgtgattcttgtcaaaaagggaaaagccatcagctaccctttcccaagtcgtctagcgtttttagcaatcctcttgagttgatttattcagatgtttggggtcccgctcctgttgctgggggtggaaagaagtactatgtaagttttattgatgctttcagtaggtttacgtggatctattttctcaagtataagtctgaagtttttcagaagtttcaagagtttcagtgccttgttgagcgtatgtttaatagaaaaatcatatccatgcaaaccgactggggaggcgagtatcaaaaattgaataccttctttaataaaataggcatcacacacca

SEQ ID NO: 4217 - DNA, 15003 bp, Oryza sativa
caagaacccagattgttgtggtgacagaattgaaacttctgaatatcggcaattcagtcagacgaggtaacggagcactcatatataatcaaaagtcataaaaagacccctcgaattcagcttctgtcatcaaatcaacagtttcaaaattctgaaaaacggtgggttagttgattgtgccagcagcatcccgcatccggacccaatcctctcgatctcctccggccatctgtttccctccctgctagtcaaacgcctccaagattgctcctgccgctgcaagaggaaagctgcttccttaggggcttcgggctgctacttattcactggacatcaataatcgaacctatagaagaacaaacgatacaagacagtttagtttgtgataaatcgtgcattgccaagcaatcggcatacgactactatttatatcaaagataaatatctgcattttgcaaagctagctgaaatcaacaaacatcgtctctgatctcaaaagaaacaacatctatcttagcacgacaactttatactctacatagccacaagaggagacaagagtacaacgcacggtaaattaaggacatcttagccagattaccaacaacatacctcaccatgacaaactaaattgaacaccatcaccaagcttcaccagaggccctccattgcggcagactggcagctctcttcaacaaatttcttaacttggttgctggtatctcaatcttgaacctaaatagataatgttagaaagctttctaaaagtatgaagtgttagtgcggctaagcaatgcatacagctcaagatgacaatactctggcctagaggcgacgcggacaagaagctagctgggaagtttccacagaaaaatgtagtttcttctgaagaactagatgaacaaacaaacattactaagtagaactggacactacatgtacatacaaaaataagacaaaaaccaatcatgcaattgactttgaagataaattactcagtcacattagaatatgcctccttgtgatctacttcttgaatattgagggtaacttcagtcaggagtcgcatgtaaggaaaaattctatatacagcagttctcctccatcacttgatcaaaatagttaacaaagacattggttgctctgctacttagtcaacaaatccgcaaatgggaaagcaatagcatatcctcccttgttagtcgttaaaataattcacatatttacatcttttaactttgttcttcaaaaaaatgattgcatttccatgtccatgtcctaacttcacttgtcctctggagctgcgactttaatgactctctggtcccacctcaacatttatactcagcaaaaatgctcttgaatcacatatatggccaatcagctccattcagctgattcacgaggctttatgcaatcgacctttgagaaccacatattatatagtttttttttaagaaagggcaaaagctttgccacttttatattgacatattatatagattgaatcaccaatagtcatcacatgagcagactccatcttctatacaatgaaaccgaacagtgtcccttacaactattcttctgcctgtggcaagtgaaatgagtttgatggcaacatggcaatcatcacatatcctgacgtttttcattatacgaatagcttctcccttgggggtgcgaataaggccaaatgcaagagctaatttctcactgtgatacataagatgttcttccttttgttcatcctcaacatcatgtagggccactgcaatgtttggaacatatccaatcacttttatcttgtctatcagctcttggagttttttggtgatctgctccatatatgggtgttttttgtcctcagatgtgaaaacatggacctcactacccacttgaatccaactaacaccaggctccttcctaacgcccaactctctcatcagcctccgaaccttcacgacaccatcccaccggtttgctttcgcatacatattagaaagcaaaacataggttccaacatctttgggctttaactgaaaaatctgttcagctactcgatgaccaagaccataatttctatatacttggcaagaacttagaagtgatctccatgcaacaacatcggtaccaatgcagttactttctatgaatcgttctgcctcgtcaagccgtccaactctgcacagcaaaccgaccatgcaagtgtaatgttccttaccaggttttactcccacttccttcatcataatattcaggtagtagaacccttcatctacaagacccaactgagcacaggctgacagcaccccaatgaaagttacataagatgggacttcttctgcaaacaacatatcatgaaatgcttccatggcttctcttgcacggccatgatgagcgtagccaatgatgattgaattccaagaaaccacatcacgacatggcatagaaaggaagactctccgtgcatcctcaacactgccactctttgagtacatgttcatgagggcattacagacaggcaaaaggccccaatgcccagttttcatagtacatgcaccaagggcattaccatttttcaaggtggcaagaccagcgcaactgttgagagcaacagcataagtgaactcattaggccgaactccttccatttccatatccaagaacaactgcaatgcatcttcaaacagctcattttgtgtataagcagtcataatggctgtccaggaaacaatattcttttctggcaaaacctcaaacacgcgattagcttcatggggaaagtcacatttcccatacatatcaacgagtgcactccccacatacacattcagctcaagcctcctcttcaacgcttgggtatgcacctgactcccaagcaccacctctttcgtgctagcacaatgcccaagaactgcgacatatgacacatgatcccattgcccgacatttctcaccatgcttcttactatactggtggaaccatccatctggccccgatcaagaaacccatttatcattgagttgaacgcgaatacattaaaactggaaacattatcaaataccttcaccgcttcgtccatgtgtgcacattggcaatacatatgcagcaccgcactacaaacgtaagggtgctctgctagtccagccttgatagcatatccatggcactgcctccccatatcatagctccggacatgggcagtcgcggccacagccgacgacagcacgtactcattcagaccaaagtcagccaccctgatgagcgcgagggcgtccctgtggcgcccggaagaagcgtacccggacatgagcaggttcccagacacggggttcctggagggcattgcgtcgaacacctggcgggcgaggcctagtcgaccgcacttgacgtacagggcaatgaggttgttgtactggacgacgtcgaagcgcgcggccctgacaaccctcgcgtgaaccgccttccctaacgaaagctcgccggcggcggcggcggcgcggagcacggcaacggccgcgcgccgctggtcgaccgatactcccatagggcaagctcgggcggccgccatgccacagccgtccccgtaaaccccccacccctcccctcccggcgtgctcaagctcctcagccggcaccaccggagttgggaaggaggcgcgggggcgccggagttgggggggagcaggcgcgcgggcggcggaggtgggtccccttatcctgcgcgggggagccccagacaacagcagagaacaccggagctgcgaggaatggtggcgcggccgccggagttggggaagaaggcgcgcgggcggcggggtttaagcagagccgccgccagccgccagagagaaggtttgagtgttttccatgggcctattctgtgacctgtctgttgccggctggactcggcctactcctcctacaaggcatcgtccttcttttcttgggcccaacgccatttcccggtattcccaaatataatgagcattaatcctgtgattgccatcataatcgtcgtgttagagcaaatttaatagtatagcccactactaacttcaaattatctataatcaatataataaccaattaatacaacagttgctaactatactattaatacctggtcctacatgtcatacacacattatgtcttatagtctgtactacagctgactacagatctatagcatgctgctattctctctcttcctttatctctttaaaatacatttattgctggcttataacctgctattattgtacctgctcttacctatgctattacttcgttttcttctacttcccccatcccaaaatgttgcaaccctggaggtaggggtgaaaacggtacagaaactttccggattccggacctattttcgaaaacggaatctgttggtcggaattttttcggaaactgaaacgaattcggaaatattttctcggatacggaatcggaaatgataagggcagtttccgtcggaactcggaatcggtcggaaactttccggaaattttcttggaattaccagaaattttgtgactgaaataccctaaattctttttttaagcactaaatagtgaataccatggtgtttggctgttattttttaaaaatatttgttatgcaaatctaaaattacataagaatatttttttttcctatattgggatttatcaacaacattactcttttaaatatagataatttattcaattggatttatcagtttgaggggttttttattccgataaattttcgttaccgtattcgcgccggttcgttttcgctccgttttcggtttcgataatatttgattccgttttcgtatccggggtttccgattccgaaaaaaaaatgtgaaaacgaaaatgataaaaatggtttccgtctgtttccgtaccgttttcacccttacctagtagccgccacagaacaaaagaaactagtgctcgatgggacacaacctagtactatccagattcacattaataggataggaaaatgctacgcatacgatctttttagtacgatcttgttacgataagacgcaacggcatggatggcagcggaacgcacggcgcggacggcaacggcaaaacggcacgcacggcgcgcgcggcagtctaagcgtacttatgggccctaaagcccaattcacctctaaacctgactttacgttcactactccaaaccctaaatctgactttcatgttctgatctaatctgcaagtgtgaaactaatccaatagcatacgcatcgaagacgaaggtatggcatcttatttacttgatattctttagcttcacaatcatctttttttttacattattctctctttcttttttttcctaggcaatgttcatggccatgaaatgctttctttattattatggatttaatctaaaattttcctttgcaaaacatatgccattatttttaattcaatctgaaactagggttaatgttatcactgtccaaggttcaaggaacatatttgtatgcgtaatttgcttaaccatgccacatgataaattcaatgttgagtgctaagtacgattactatatacagtaagatattaggaagaggattgcttaagatatgattgaaaagaaaattgctttggttggctcattggctgtccaagtaggccaacaagatagcaggccaggacgtcaggagcttgggcttggatatgggatcaactgaggcctgagggatccgtttgatcgtacaaccatcgtacgaaataattcgtacgtatagcagcgctgaataggatactactacgtcttaactagtactacttctgactcaaaatataagagattttagagtgatgtgacatatcctggtactatagatctaggctggcttcctgtctagattcgtagcactagaaaatatcacatccctctaaaatcatttatattatgggaccaagagagtattgtattgttatgttttgggacggagagagtagtattcatcttcgagttttaaactcttcttttttaaagaaaaatgtataaatatctgaatgtatgctatgttaacgagagaatgtatcttattacataagtcttttcgtttacacactatgcacgccaactaaaaaatatcataaaaaattatacaaaaaattgtacatgtactttgattagtattgcatctatgtgtaaagtaatcatcttcaaattcatagggagtaaaaaaaaagacaaatttatacttttaaaactattaatttttttcttttattggttaaaatataatgaatttaaggttgagactttacaaataagtaaattttattggttggtgtacacgagaagacttgtgtgcacagggtatgttacctgttaacgaagcatgcagcttccttaatacaaccataaaactttcgtacatcaaccatctaaccattcaaaatttatttatggtcaaagttaaaattacattagtctacagatatttcaaaaccgaagggaagggaatattaagggctcatttgacatacatggattatatatatatatatatatatatatatatatatatatatatatatatatatatatatatatatatatatttatagaattcagttcaataaaatctctcaaaattgatccattccagaggaggtatatccagcagtaattgtcaatgaaagatatagcattcatctcaacaatttgttcattgttcggtggatctctcatccaactttcatgattgcaagacgaagttggagcctcagttggaatccatgcacaagtgaagcgaagctctggagatcccttagttgtagggaacatatcaggtgcacatatctacattggtgaacaaatgcacaaactgaaccagtatatcttagcccctgtagtctcttcttatacactccagaaatcaagcaaaaggtagcaagagaacaaaattttcctattataaagatggcaaaaaggatatatattctttcagataatggaacagaaaaatcatatgatataggcattggaactatttttccaatccatgaaaagggagtatattgtcattagtctttccagccatctttggtagatctccttgaagctagacctttggatgataggttgggcatatgtctggttggcgtcaatggcgcctcatcatcccactcgtctccccagttgtcatcccactgatcagattgatctgcttctttcttccctccagtcgaaagaggaagctccgccgcatcaagcttctggtatgcaggtccaccatcttggatacctcttctccgaagtttaatgcatgctaccacagctccaataagaagaaaaacaggcactaacatgtattttgaggtaagccgcattggcattacttgacttatctccctcgcaattgctcggtgaatgctaatattgcaggtctcttcagcaactctaagaattattgtcatgtttggtgcaccgttgttaaaaatagtcacctgtgtctaaattaacaatatgaaaataaaaaagaagatcagtacatcgattgaaaacattgaaacagcatgagaaagatccagttccccttgaataaaagctgataagaacagcaatagtatactgacattctgctaatcctgagatacactatcaacaagaactcaaaataagctaatgcaattatgcatgtatataaatcaatatgggaataacctaccgcagttcacgtgaaatatataactcacgaaccaattatatgacaaaacataaattaatgacaccatgaagccaggatcttggtaaagagcaactatccttctataagcttgcaaaaaacagctactctattttgaaacaacacatacagtagatagtacatatgggaaaaaataagccagaaaacctgcagtataatcctctcaaaagctcgctggaaaaactttcatatcaataaagaatataaaagacagtctcttctgaaataacatgtgtggaagtaacaccatgcaaatattgcataaagaaaagttaagccagaaaatctcattactataattatcttcaagatactcatttgcattagctcacctcattatgatcatttgcttggacatggatggtgtcttcagctgaagtgacaaattctggagttgtaataccaacataaagtgggtccatgcctttgttgtccatcagaagtgatagagctaatgaatctgatttcaacggtaacaagttatttatgtgcaaaacatagaaaaatctaattaataagaactaacacgactatatccatatgtgatgcaaaaccttcagagaaaaaacaatgaaaatatatctttgcaaagtattttttaggtaggtgataacatcacaggtacttttgcagaaacattatttgcttaaattcgtcaggggcaaaatttgcttgtgatacagcagttgtattgcatattcaatttggtcccagacattgtgtttttggttagtatagatagctccaactacgcaatcaattgtcacttcatcagcactagtcgtggctataagttgacaatagtgaattgcaattggtcaaaaataattgctgactggggaaaattacagttgcagaccaatttacgtgtcaatctttttatcaacaaacccagtatttggtagcactaattaaggcaaggtcaaatcaaagataaaataactgccataacacaatttgcaaacgatctgtcaaaaaggaaatgagaacttttcgtgaagacaggtatactgctatactacaacaatgatggtgcactaacagagattagagaagactagttgccgagaaaatcaccttctccaggaactttcaagcaggcgatgaactttttattttcaattacacatgtatgagatgggtcacaccccttgataagaggatcttgtgagaagtctgttacatgcgaggattttgctgtgttgatatctttatccacatgatgcacagctgccgcatattttgccgtgctaataacttctgttgatttgtccttcttgttgttcccatcagggtcattctttccttcatcatgatgtactgtattaggatttgtttcatcatgccgtcctgtcttcccaccatctgaatgtgctatgttgttgtcattatttttgtctgcttgtagaatatttgttttatcctaaattcaaaatgaaacaacatatcagcaacaacaatgaaaacaaaacagattatggcatttgttagtcactggatcgaattaagttttcatggtaggtattggtgaattgagctttgactgaccatcacaagttaagtgagagcaacgaaatctttcatgcgacttgagaatcacaaataagtgcacgaactctagagtgcacaaaaaggcgatagagatgcattgccgatggattgaagcataaacagctaccatcaccagcaatgatctcgccatctaatattcaagtcatcccaaatacagaagggatgacagcttttatgtttcgtcagaactaaaatgagccaacgtaagcacaagttaattagtaatcagtaatcattcaaccaagtcgtatataaatctgtgcatctatagccatctatctataccttacttgctccagttacttaatgcaaataatacttacaaatttggaagatattacaccttacctcttctgcggctgcagcaataacaagcaggcaaaccagtgggagcagccgcaggccgcaccaccgcatcccgccggcacagcaacagcagcagcaaagctcgcactgccccgcccccaaatccaacccaacccaacccaacccgagctggtccgcaccgcgcgccgccggccgggccggagatccgggggcagagcggagtcgccccaacccgcgtgcctgcgatagctgatgggttccccggagcccggaggagacgaggaagaggaacgagcagccgcggcccgcagcgacgacgagcatccgacgagaaagcagttgggacttgggaagggggaaggaaaccgccaccggcgactgaaaaaagaaaaaaaaaagatcgcgcaaaacgaagacggccgtgactgcggccaaggaggaaaaaaaaaatgttctttttcgccggccggtaacgcatcactgcaagattcagtgcagtcctaactgggaccgcaagttaggaactgcgtatcatcttagctatccattttttcaatgaacggtctaaatctgatgctatagtgttgctgtcacagtagttctacagttttttaagatgtgaacagtattttatagattttgaacccttaaatttacatcaaaaggtactaggtgactgcttatgttgcagtcacactaggtactgcaccggatctaaatccgtctgcatgtgtccaaagggaaaaaggcaccaaattacttgcagttgcaggcttgctgtattttcttaatcactggttgattcagtgtaaggaataaacatggtgactgtttggagtactaacaccgtgtttagttctaaaccttttttcaaactccatcacatcaaaacttttctacacacataaacttctaattttttcatcacatcgttccaatttcaaccaaacttctaatcttaacataaactaaacacggccttaagttaataatcaccgaaaaggacatcattagaccagagtttttggacttggtgatttactctagtggctctcctttgattttttttagagaaggttattttctacccgacctccatatccaaccggatatatacagccattgagatagggaacttagccccgtaaacaacctaatctgaaattcactccatagaagattttaactcagaacctcgtactacttttgtactactcaggctctcctttgatggggcagtatattactctctccgtttcattttaagtgtaaccatgagtttacatgtccaactttgatcgtccgtcttatttgaaattttttataattagtatttgtgttgttatgagatgataaaacatgaatagtattacttgtgacttatgtttttatatttttttaaaaaaaatttaaataagacagatgattaaagttaggcgcgtaaaatcatggctgtaataagacggagggagtatcactgtatcgtatatttggacacaatcaagcaagtcagtactgagaaataaaaatgatctgtactgtaaatgccaagttaagtacatcagcacgatgtagcacgttgtacttttgtaccgcggatcaggtgcagattcagggaatgattgagtagtctgctctacagccattcactggtgggctgggccgtgggcttcccaacggtccaaggtcgtgcactgcaggaaatggggcccagcccgaagcataagtgcaaacaacagcccaggtaggtggcacacccgcgccactggactgacagcaagtgtgggtgaaacggaagaggaataagttcactttaggttcctctatctgtcggccagtccaattttcgtccctgaacctcagaaccgggtacgacccgtcccccaacttatgaaaaccgggcacataaggtcctaaggcggtttggatagcggttttggctgacgtagcgcctacgtggctggtttgactaggtctccatctcacgtggtactgacgtggtgcttacttggcaattcaatttggaaaaatataatacccatgagacccacatgtcaattacataaaaaaataattaataaaaataattaataaaaggtgggctcgcgtggaccccacatgtcaatcccactcccatctccttcctcctcactccccgtctccccttctcttcgtctctctccgactctcccccctctcctctctcttctcctctctcgggtgcgacggccggcggggtggacggcgtgacaggcggcgaagagatgggtgactgccggcgaggaggatggcgcgacgggcggcgactggcggggagaaggagcgcccggacgggcggcgaccggcagggagaaggggcgccgggacgggcggcggccaatagggaggacgaccgacgagcggcgggcggcgcgcgtgatgacccgggcggtggtgggcagtgaggaggtcgacggtgggcagtgaggagggcagctgccggtgcccgtgacgaggatgagccgacgagggctgggcggttttgacggtgggcacctcgggcgctgccgctccaccgcctcccccaccttgttccggtcgcttccacccggaccaccccggccgaagcctgcagcttgcaaccgctgcggcatgtccggccatcgcctcgagaactgcccgctggagcgtcgtttcctcgccaggctagtagccctctgccagtacgccatgcccgccgtgccggaatctctgcgccgcactgcaagtcttgatcaccatgctgtagtctgtcgcagctaaggcgtcggtcgttgaaccatgacacaccgaagcctgcccgtctcaccggctgacagagaaatcactccttcgctttcacccaatttcagtggctaatctgaagaactctgatgatcccagacggtgaacagtgaactgaaaaactgagtacggagaaacgaacagagtgcaaactcggagttttgggctgcgaattacttgcagcatttgacaaatacgcccaagattgcattatttgtaacaccggccccccaaagcctcgtcgcgctccacacatgtcaacgtcgagcctccagagctcgagccttcggacatgtcaccagtgcagcagcgtggtgttcatgggcgcatctcgtaccaggtcggccccgtcgtgtctctttgactcgtcgtcgacaaggccactggcaaaccgagggccttcgtgttcgtcgagtacctcccacaacacctgccgcaacctcgaccgccacgcctattgcagccgcgtgctccgtgtcggcctcgccgaactggaagtagcagggcgctcgcgcggcagcggcgagccgcacgagctggtgggcatcgaggactccacacacgccgcatcgctcgtgaagggggcaccacccagcgccgacgacagctgtggagacggtgggcgccgtggaggcccagggagacgtcacgcgcaccgctggccgcgtcgccgttgtcccccgccggagccggtcgcccccgccgccgggctaagtgggtccctctatttggtcgcctgctcggccgcccacccgcgccgccggctgcccgggaaggagagagagaggggaaagggaagaagagatgaggaagatgaggaggctgacacatggagcccacgtgggccccaccattttaaaattatttttatgtgcagctgatatatggggccacactttttattattttttcgagatatacttgccacgtcaatgccacgtgggacggagaactagtcaaacaagccacgtaggcgccacgtcagccaaaacagacttcaaacccgttgagggacctcgtttacccggtttacataagttgagggacgggtcgtacctggttttgcggtcagggatgaaaatcggactgggcgacaaatagagggatccaaagtgaacttattccaacggaagaggagaaggcccataattcatagtgggccgtacttgaggactggcccaaattttgccgttcgtctttgcattgcaggtttttctctgaacctgattcggctcttgccgctcacagatccagccagcttctttcaaggcgaaactgatcaatggtactgaccaaaatatgaatattttttttattttttcatgaagtaatgaagagaaaggtaaaattaaataggtggactagtcgtaattggttaagatgaaagagtaagtaaagaaattaaacaagagatacattgtgtttgattgagatgaataagtatgccaagaaattattatattttgagataattttaaaatgctagaaactgctatatcttcggacgcagagcagtagatcatttgtcagattggatggattgtgctactgtacatgcatagtgtttcagactttcagcaggtggagcaaaatggattcagaatgttgtcaagagttttacctattgtttcagaaatcagaactccaattgcagtctgcagtctgcatactccctccgtccaaaaaaaaaaaaagtcaaacctggtttcctaccaacgtttgactgtccgtcttatataatttttttttataattagtattttcattgttgttagatgataaaatatgattaatgctttatacgtgacttatctttttaattttttcataatttttttaaataagacggacggtcaaacgttagacacgaaaactagggttcgtcttttttttttttttttggaaacaatacgatcatctttatggtctttgattgatgaaccagcagtggcgccaatccatccgtggctacaaaagcatgtccacgtaggacaggtgggccccaccggaagcgtctctatttaaaacctcgcctctcactgttcagtgttcagtgccaccaccatcttcttcttcttcttcttcttcttcctcaagactaccaatccaatctcctcctcgccgccatcgcgatctccgccgccgcccgcctgtcgcggccatggcatccaccaagatcaaggtcgccaaccccattgtcgagatggacggtcagtctgatccctctcccattttcccctccctacacggatctgctactagtctccaatggattccggcgtgtcctcaattcgtcatgcgtatcgttttgcgactctgtttgagcttatctttagtctaggttcagtagcgtgccacaggaagcctctcggatctactagatcctttgcattgtgcttggtttggctagaattggggatccgattcgcgatgcgagtttttttttttttttttgaggtggtcgagtgctcctctcgagatatggcacattggcactcacgtgcgtttccggattggattttccgttcgcaggtgatgagatgactcgagta

SEQ ID NO: 4218 - DNA, 3675 bp, Oryza sativa
tcgtgtctaatttgaccgttttattttatttttttataattaacattatataattattatatgataaaaacataaataatactttatgcgtgacttatttttttagttttttaagttttttaaataagatataccattaaaattagacatgaaaactcataagttataactgtgtttaaagtggaatggagggtagtagattgcaaagctgccaacggtattatatatgctgtattattattagtacagcgcatgtactcctttatagtatcaggaagcgactttcgtagacgtggctctctctcgaacgtgcaatgcatcgtaccatactaccattaatattaccatgtacattagtactccctttatagtagtacgtggtttctagctgcttttctaaggctaattatcctgtggtcaggtcattgcaaacttgccgttccagctacgtacctgtgaaaaaaccacggcgcgttcgtcgtgtcctgctgagtgctagtacgtacatatatacgtgtcgacatggcatcgcattattcagcaattcactgaacctgatcatcgatcgagtgccatgcagaggatgagacgatagttacaggtagtgctcatcctctgatacatgtaaacacgcacgtggtcgaattcgttcggtacaactctggaaagagaccgaatcgaagcagagtgagctggactaccattgcagtagaagtcctggcccgatcgtaaatactccatccatcgtcctaataaaacttaacttcgtactacgatatgatatatttaaatactagattttttttttaaggaataaagggatcacgtagcatctccatcattaatggtacgattgacctaacgtttccgatcgaatcagcatgcgacgatgcgttggctcgtgaatctgccatcgatcgcgtgtgactgcgttgctgcccccgcgatcttttctccgcgcggacagcgacgtgcgcgcgcgcgccatgtgtgtggcggagacacggattccacccgtgcgcgagcgccgtgtttgggttttgaaggcgatcgatcgatcgattcgttcggtctgagccgagccgaggccatggggcgtcatatggcacgtacgtggcgggggaccgatcgttgcgtcgcgcgcgttaacatggtttggatttttgatggctactctcttcagttcattttaattaacgtttcgaataatgacacgatcactttactttgaccttatttttctattataatatacacaataaataaatgtatgtttatttttattatagtgttttgaaagacaaatttatttatattgttctagtttctttaaactaaactagcacagtgacccgcgcagattgtgcggctagcagcattatattttctctcatataatagcatatatatttcctcattatattattcaaatatattaaaatgacaatataattttaaattttgcaataactttacaaaactactaatgggtaatattcatattatattttatataagtgttagttattaattatttttaatatcaaattttagttatttgtaaattatatatattcctatatgtactttagactcgtcttttaatatttccttttttcaattccgaattttctgtaaattgtatttctagatagactctatgcgcttcttccaatattatttatttttatttttgaatttttattatttctaattgtatttctatgtggactctaaactcatctttcaatattctttaatttttaattttgaatttcagttaattctaaattgtattcctatattgactttaaactcttcttcccatgtttttcttaatttggaattttagttatttgcaaattgtatctttttatctctacttttaattttattatgtttattccaaattttagttagttttaaattcctatatggactctatactctacttctaatattccttattttttaattccgaatttctattttttttaattgtatttctatatggactctatactctacttctaatattccttatttttaattccaaatttttattatttcctaattgtatttctatatggactctatactctacttctaatattccctatttttaattctgaatttcagttatttcctaattgtatttctatatggactctatactctacttctaatattccttatttttaattccgaatttcagttatttcctaattgtatttctatatggactctagtctcctcttctaatattccttattttttaatttcgaatttcagctatttctaaattgtatttctatatgaactctgccttttctttttctccgattaatgtgagaatttctaggccatgagagcaaacgtggaggctcttttttctattcctttaatttctaaattgtatttccatatgaattctgttttttctttttctccgattaatatgagaatttctaggccatgagagcgaacgtggagacttttttttctattcctttaataatataatagatagatatttttaaaattattgatgatcaaagttataaaaaaattaattttaattttgttcgaaacgtcaaattatgatgtaaccggacggaatagtcaagtcggcctcgcgcgaaaggcgtacgttacgtgggttgttcgagagggttcggcctttttcacggcgagcgacagattcccccggccccgtcgtgtcagtgtgtttcctactgctacggagcagcagatttttgagggccgcgaagccacatgtgcaacatgaacaggatgagttcggtttggatttgggacgagagaggcagacttcagacttctttggtgcagcatcttgaatgcacagcgcgcgtactctgcccgctgactcattaatcagaaggaactggccagcgctgctgcgttggcccgacaaagaatcaaaaggccggccaagaaacaaccaaggtcaatataggccgggagtttatggatcctccccggtgagttctttgaaaacaaaaaggtgggctggagttttaatctccgatcaatttgggctaattctctctacaggcctgaagaaaatcatggaagaaaatgagttttttttttaattttctctctgagcccgaaaaaaaattatggaatttatgggggacacgtagtttgaaatcagattgttgcagctgaacttctgaacaggcaatcactttagatactctactgaaaattgacctcaaggctcaaagtagccgcgacagcagatttgcccagattctgcctgaggctgagtttagtttcaaactttttctttaaacttccaacttttccatcatatcaaaactttcctacacacacaaactttcaacttttccgtcacatcatttcaatttcaaccaaattttcaattttagcttcaatttcaaccaaattttcaattttgacgtgatctaaacacaccctgaatcaaagcaatgatagcagcatgtgtgactgtgagatgagaggatgtagtatgcaccacggtacccaccgtacacaacctaaagaaaaatgtgttggcaagaaatacggggctcctgatctttttttgaaccaaatatactgggccggtacagtgatatttacataactactccatttgcctgaatcttgctggaactgatgcaggaa

SEQ ID NO: 4219 - DNA, 14587 bp, Oryza sativa
cccccccccccctcccccaatggcgaagactatagaacaaggacggcgagaggcgaagtatcatgtgggtactctgccaagccggaggcctcttgggcgaaggatgcagggcgaagagtatatgccgaagggagacgacttcgccaaagcaagctcgcccccgcgagggccgaagaagccttttccggcccatcaagcctaggggccattgggccgacgatcgcctaacggcccatcaggagtccatgaacctctattacactatgtactcatttaaatgtccctttcataagggtaaccatgtaaattcccctgtataaccaaaaccctaatagtaataacctgtaataggggatataaatagtcccatagggccaggtaatggggggatcccaagaaaaattatctaatcaatacactttactttttctcaaccactgttgagtaaccacttctttcgacgtatgcagttgtcgtttcgacaatactccctttggctacaaatataaccatttctaggttgtttaacagaggttaacctgatgtctcttattaaatgagggatatgttcgtaggggtggagcttgagtcatcagggagggggggggcggttaccaggaacccgatgaaaaaaatttgtaactaaaatttacctattttcaccatgtgtgcatggtgcacccccctaaatataaatttagtcacccatatcaacttaaaatcaatataaagtagagcaaattaaacaagtgacaccccctccatttcgttctagctccacccctatatgctcctgtaagttggaaacaaatttgaatgcaaggcatttgataggataaatagtatttgaaatgtttacgtttgtgcagaattttttttacacaaaaaaaaattgagacacttcgaatgtttatatttagggtcccttatatttatggacaaggagagtaagctgttttgttttttcgagtaaaatggaacattgcatccatttccatgcttttagctagaggtcaggattgcaattggttgttcattgtttttttttcttggaggggaattgattgttcattgttactgtcacattatctccattgtatgttgtacacagagtttgatgactaaggcaacccaaaagtactcctttgtcatctattcatgggtggacggtaatcgttcacacactagcttggtttgcttatttcactttcatggtcaaagcacgggcggtgcggctgtatgtcgacggcttgtgttctaggagagtgtgacatttggttggaatctaaggagaaattcaaggtgaattcaagcaaaatccttcccatctgaacaagttaggtcgaaaatacttgagttctgtgtaggtagagacgtcaagtttgttctagaaaataaattgttcgctgatttgggacgaaaaagtaaaaaaaaaactcctttcaataattggtgtttaaattatttaagttggaaatgcaatatgattggcaattattcatcaagaatgtagatgtcaatcagtcagtgcttgccagccagctcagtcgatcagcatgaatgaatgatcagctagtcaaaggggaggccatggcaagggcccaatcagtgtgccccaatacagaggtcaggactttgatcttgatgacatatcgctaagctacagaaattcagcgaccgaccctaacctacctcgcatacatgtcaccggtttgtagaacgatcgagagatgtggtccaatgctcattgatggttcatcttcagagaacataaatccgtgttcatattgttagccactgtgtttccaattgttttgggtggtgaacttatgttcagattgagttagctacttctgaagggaagatgtgaccaaggcttttacccaaaaaaaaaagtgtttgcactgaattttatagtttctcaattgcttgtaaggaggaggcaatgcaacctactgaatctgctagtacaatttggtactcctgccaattcggaggcaacaaaagtccggtcaatattgaaccgtcgctctcagataaagattttgattggaaccctcgttgaacggaagagttggctcctttttgagctgatgaaaagaagccatctttacactttacagagcgcagttttaattcttgtgaatgctaagctgttcatgaattcgatcgctatacacgctgcaatcaaacataatactacgagtgcagcattgaaacgcaaaaggcagtagcagctacagctacagctacagcttgggcactgcgcgtgaagagattggcagcgaagtcaatggcttggggaccctgaatgcgagggcaagcgcagcagaggccacgaatcgcttgaaatcgaatcgcttccatgtgatcagcgatgtcgcggccaaacctttccatttcctgccttttttcttggccaaaaaactcgccctcgctgccctcgcgcgtcgctgtagataacagtgattcctgtctagaattcctctgactttcagcagagacgttcttggctgagctggttgtatcattgcccatcctgatctgttgtcacagagagcttaacatgtgtaattaactctagactggctactgaagctgattcttgcaggctgaatcgatcagtattcagtaatgctgaggttacaaactggattactagtactttgttccttttgtcaggataagatcaattgatcatttgatcaagccatatatgtgtggattgagggccctgcggtcaccccatttcctaggccggatgccacccttaacggtgacacaatcagcatgctgtcatgtctgacagggaatgagaagaagtttgggactttgcagccatgtgagtctcctcaagttgcatgaagcagagacagaaactgccatggacttggtgcatgaatcactacttagggtgtgtttagttcacgctaaaattagaagtttggatgaaattagatcgatgtgatggaaaagttggaagtttgtgtgtaggaaagttttgatgtgatggaaaaattgaaagtttaaagaaaaagtttgtaactaaactgagccttaggctgagttcgtataggagggttcccaacccttctccttcgtttttcgcgcgcacgtttttcaaactgctaaacggtttatttttttcaaaagtttttatacgaaagttgtttaaaaaaatcatattgatctatttttgaaaaaaaaatagctaatacttaattaatcacgcgctaatggactgctccgttttccgtgcgggagggtaaggttcccaaccatgatctacgaacacagccttagttcatttctacaactcgtaaaagttaaatttactcaattcgttgagtatgtatctttgtcttatcaaatttttcaataaatttaggtgaaatgtaagaaacgaggggatatttctactagcgttgaaaaaccatctggtacaactactccctgaacttgtcacttacttcgtccatacaaaacacctgagacgattgaatgaaccctagccagcaaggtaagctttagcttgtttcggctcacacatgtacacactgaaacagtgggaagaacacgcacggagagtcggagagaaacagtctagaacacggacactccgctgtgcgcacagcgtcgtccctgcagacagcctcagcgaggtggtcaaagctcaaaaccccagcgaggcgagagcgatgtcgccgtcgccgtcgcgtcgcggggggagtgctacgtgctggcgcgggattagatccggccatgccgccccacgccggcacgacagccacgcgccgacacgcgcgcgcggggtcagaaacgcagccaccgctcgcctcgcgatttcggcgccgggaacggcgaaccggtcttggcggtcgccgtcgtcgccgtcgccgtcgcgccggatagcgccaaacgaacgctttttcgggcggcctcccggaaccaacacctacacgaggcggcaattaatccaatccacagctcgaagtcgaacgctcgatcgcccggcgatctggcgcgcatacgacgcgtcgtcactcgtagtgcagctcgcttggaccgtatttaattatttacaccaccacttggctctctcgatcgcatctcgtcgtcaaggggctctggtgatgtgacgagacaccgggcggcacaccaggtgtcaggcgcgcggccatcggggcggctcctggtcgaggaaacggaggcgtcgagcactgtgattcattcgcgggcggtgtcgatcgatctcacctcgccatttttgtcaaaagagggggaaaatgtttgcagctgggtattgatctgcttaattaagatttaaggggagttcgttgagaggctccagttactagtagtttttggactcgtatctagtgtatttctgaactttccattttttttcttcttttcttttcgtttcttgcaaggatgcgtggcgcgtcgtcacaggggagcggaaagctcaatgattgagccgtttgtgtatttcgtgacgaagacttgacgtaagcacacgtaatcccctcaaaaaaaaagaaaaagaagaagaagaagaaaagaaaactaaaataactgcctagtgcaatacaaatggctcgggcgggcataggcccggtgaccacgcgcgggcgactcaggagaaacctagcgccaccgccggagcgcgtcaccggagcaccgtgcggccatccgggatggcgacggcaaggccaagcctcgatggcgccctgtcactgtgcgtggaaggcgggccggcgtgtgaagggtggccagtggcggatctaggaatttttctaagcttgggcaaacctaataatcgagaagaactaaaattaaattcatataaccacgtgcacgatttagcatagatcgagttctaatttataaagaagagaaccaatgtgtgaaattatattgatgaaatgaaactcgttaattgttaatgttgaatactagacatctattatattattaaaggaatagaaaaagaatgctccacgttcgctctcatggcctagaaattcccacgttaattaaagaaaatctattatattattaaaggaatagaaaaaagagactccacgttcgctctcatgacctagaaattcccacgttaatcgaagaaaaaaacagagtccgtataggaatacaattaggaaataactgaaattcggaattaaaaataaggaatattagaataggagactagagtccatatagaaatacaattaggaaataactgaaattcgaaattaaaaataaggaatattagaagtagagtatagagtccatatagaaatacaattaagaaaaaaaaatagaaattcagaattaaaaataaggaatattagaagtagagtatagaaataaggaatattagaagtagagtatagaatccatatagaaataaaattaagaaaaaaatagaaattcggaattaaaaataaggaatattagaagtaagtatagagtccatataggaatttaaaactaactaaaatttaaaataaacataataaaattaaaagtagagtttagagtccgtataaaaatacaatttacaaataactaaaattcaaaattaagaaaaacatgggaagaagagtttaaagtcaatataggaatagaagtaactgaaattcgaaactaaaaattaaagaatattgaaagatgagtttagagtccatatagaaatataattagaaataataaaaatttataaataaaaataaataatattggaagaagagtatagagtctatatagaaatacaatttacagaaaatttggaattaaaaaaaagaaatattaaaagacgagtctagagtccatataggaatatatataatttacaaataactaaaatttgatattaaaaataattaataactaacacgtatataaaatacagtatgaatattacacattaatagttttgtaaagttattgcaaaatttaaaattatgtttaaatataaaattttaatatatttgaataatataatgagaaaacatatatgctattatatgagagaaaatataatgatgctagcgcgtaatctgtatgggccaccatgctagttatatgtatatagctagtcactttgctagtatatgtgctgatccactgatctcacatccattagaactagttgattaagcatgtatatttgctattagtagtattttactcaattgtatgtggctgaacgtctgagcttgtatctaagcatgttaattaacataaactaaaaattactgcacatacggctacatccagcggagcccgggcacttgccgaggctagccgggtcctggctccgccgctaaggatggctgaagacacagggtggaggcgacggatctggcgccgccgcggccggatccagcctccccatgggtggatccgacgcctccaacaccggatctgggcggagcaagctgctcccgggcggcgtcgacgggaggtagtggtggcgtctggtggcaccgggtgaaggaggacggtgtgcgcggaggacgcggtggtggaagctggtggcggttgttgcggaggccggcgctgtggcgccggcagcgggcctcggcacggcctcgtcatcgcctccctcccctgcggccggtggtagaggctccttccggctggcgatgctccaatttgagcctctcgtggtcggatctgctgcaccaacactgggctatggcctcgacggcagcggtcttcggcgccggcggccttgccctataccctcttccctcccctttcctccctcctctttgaggcgcactgaaccttgctttgcttcttcccctccccttgtgccctcgttcgtctgccctcttccctccccgatccaaacatcgcttgtgaccgttcttttcaatccggcgtgcttgtttcggacttgtgctcctctagcagctcgagtggctgcggttctatgccctcctctgaagtcgccgttgatgttcttcctctgtgagattcccccttggtcatttcccttttatctagctccctgctcatcttcaccctcttcctcgagatgtccaggaccgcaaggatcagcatttctccctcctttgagacttccttcccttgaagggcgttggagagagttgatctaacaagcaacttgataaaacctgattaaagaaaactcaatttgggcggcctctggccgcaaccttcaatggccctccctcctttggggcttcctttccccaaagaacgttagcgagctctgatccaaacagtaacaagaccaagttagcttcttgatggcttcatgcgggtggccttagacttcaacagcattcccttggcctttcttcttttccggcttgtttgtggctgtgtgaggaattggatgttgataagttggggtttagcattaggttgatttggttcttggttgggtttttttgcaggtgtcgttcgtctatcgttaactttggggagcctttacaacctagcctccaaagcttagccgctgtctagctgtagcactttcaacgctctgatcgaattgttgttggtcagaaatcttttcccgcccttttcattcatatcctatgtaaaggctctgacgctgtcatgccaaacctttgtactccctgtaatatcatttcttttcaatggaaaattcaggtggggaagttctcccatccggtgatttattaagtttttttttaaaaaaaaatcttactcctggctagctttaaattgcgtttgacagtgacaggccctcgcgggcagggaaatcgatcctatccgctgggaaatatgtcaacacggtgaggtggcacgagtttgcgcattttgcagtacgcctcgactagctaacaggagttgcatgcctaaatcagtgtgggattagcatcaggcttctgtagctgatcagcaaagtttgaaaataacccacccaaatccatccacagcctgtatcgatttatgcatagtgttgaacccctgctttactgatagccatacaactatctaaggatgaaaacggatcaaaaacggacggaaactagctttatcatattcattttcatattttttttcagaatcggtatcggaatcgaaaactcggatacggaaatgaaatcgaatattatcgaatacagatacggagcaaatacgagacggaacgaatacggtagcgactatttaccggtatataaaaaacccctcaaattgagttttgataaggaagatatattgcttattattttaattcaacatctccaacatttatattgtcaaatttgtagacggtcccccaacagtacgtgaaaatcgattttcatggttgtttctctaagagatccatatgcaaatatgattatcattttctattcccaagaccttttactagatgtataacttacttaccattatataaattggagatgttatttattttacttcacatcttcgaaacttgtaatgtttgttttatactttaaatgctctcaaatacaaatgctataaactataaagtggtagatcccgttgagctctacaactttaatatggaacacatctccatcagatgtcgtttgaattgtagatctgagattttgtaaaaattaatatgatatattataatgaatatttagacccttaaatgaccccaaataataaaatagtcaataagaaagttgtagatctcatcgagctctacaatgttgatataaattttgtcttcatctgattccgtatgaagaagttatgtatatatacgtgttttttctaaaatttgctcaatgtctgcagatatccgaaaaaaattccggatagtttccgaccattttccgattccgacggatagtacccttactgtattcgttttcgttttcgagaaaaaaaatccgaattcgtttccgaatccgaaaattttccggatagttccgaccaaaactattcgaatccaaaaaaaggtccgaacggacggaaactactgaaccagtttcaaccctactactatcactgtcagtgcctcactgacgaaggcagattgaattttcaggttatgagccaacaaggcctagcatgggaaattggaggtagatactccatccgtttcaggttataagatgttttgactttgatcaaagttaaattgttttaagtttaaccaaatttatagataaatataataggggcatttacaaatttgctaccggttttttcaatattacaaggataccagtcgaatgatagttctagtggtatttttgcatctaatgacagttttacaataacgattcaaagcaatggtaaatttgtaattgtcctaatatagtaatatttactttaccaaattagttttattaaattaacagttaaatatattttttataataaaattattttggatcgaaaatattactattgtttttataatctgaaacagagggaatagctgaaactatccaactgagtggagtggtagagctgcggctgagggggtggagtaagggcggtggcagcagatcgagaggaaacttcgtctaatccgacggaaacggaggtagccaaggggagcacgccctggtggtggatcaggtgagagacgggaaaaaagggaaatgggagaggaggaagaagatttgatggcggacatattgggactcatgtgagtttcacttgtcactatattatcggtatcaaagttgacatggtataatgaggtgagcgatgagcggtattttagtcagggacgaatttcagactaagtagacacatttaggaacctaaagtgaacttatttcatccataaatgcatcaagaaattcaagcttacaacgcagtagaatgcaaatggttcgacccacgggcctaacacccacgggctttgtgttgggctaccgattccggcccaactaaccgaccaaggaggcaatgcgaggtctcttctgggtcctgtgtgacatagcggctctgcgagatggcatgaacgtaagccagtttacctcaccgcacgatgcagcaagaaataattaactgaagatctaacagtgcatgcattggatgctataattatcagacccgagagtccaacacatccgactactacatctatacaaaccacagaatcgatcatctcttctcaatcgaaaccttcatcgccggaaccgtttaattccggcgtctcgccgcgcgatgcccaaattaatagtatcatcgacgtaatgtacagggagctactagtagcttattaattagtagcgacgtgccgcctccatcgcggatgatgtcgaagctcaagctgccctgctcttgagccgcctgagctcgacgacgacgacgctgatgttgtccctgctgccgcgcgagacggcgagctcggcgaggagcgccgcggcgtcggcggccgagctgccggagacggactccgggaacatggaggccgcgcggccgttgaggcagttcctggcgatcttgcacgccacctcgttggacaccacgtcccacagcccgtcgctcgccaggatcaggaactcgtccttgtccgtcctctccaccaccctcacctccggctctgcgctcacgaacggcttcaggtagtagtcgcctgaaattcgagatgccttggcatttgttagttttacatatgccaatgctatgagcagcaagagttagattgggcttttttttgcttttacctatggatctagaagtggctaaaacaccaaggacacggtaaccgttccagttgatgactctgcctccagctgcttccactcgttccaactcgtcaggccgatctggctgcgtagtcaaaacaagcattattcagtttatgaccctgcataattcatgttacatctgaaccagtttactgatgggatcctaaaataatatcagagtccactcaagtgaagacacaaaatcggagcatcaacctgtttacgacaacagcgcaaacagtacactgttgctagtaagtggtgtaacccatatctttttcagaacggcggcacgggaaacataaaaagacaaggttctagaatgggggtaagctagctgatcgctgtgcccaacagctaacttttggcacatttagtggccgagacgcatcagacctactaacccatctcattgacgaacagtagtgtactgctgctactaccatgctttggagttaaccctgcagttgtgctgttcaaccgacaaagtaaaaggagactgtcaacgtgtaaagccagagatgaaatagatcttgcacttaccacaaccacccaagcgacagtatcagtaaatattttgaattgaagtacacgataatggcataatgcactgttagcatcaagctatagttacatgggcaaaatttcctactacctgcgtccttggcgaacattcgaaagatcaaactaggtacagtactatggagtagtaagcatgccacgtacggatctaaccaaaaaattaattgacggcaatcagagctaaatgtacacgagtaccatggattacacgaataacatttggccatccatatatcattataaagaagtagttgtacggagtgccacgtagcgtaccttgtggtcagtggagagtggcagcgcgacgccaccgcgggagagcacggcgcgcgagtcgccgcagttggcaacgacgatgcggcggcgtcccacgacggcgaccacggcggtggagcccaccgtcctgaaccccgacggctcggtgccgtcgacgcggggggcggcggcggcgacgctcccgacgacctcgccgtccatcctcgcgaagctggccaacatcgcctccttccagcgcacgtcgccgcccgacgcgctctgcccccgcagccgccgcaggctcacctcctccgcgagcacaacgtgcatccgcttcctgcacgcctccgccacccgcgacccgccgtggccgtcgtacaccgcgaagaagtcctcctcgccctccccgccgcccctgatagcgcccgcaccatcccccgtcgaagccatgaacgtccgctcgatggccaccgcgtcctccatctccctccgccgcccgatcaccgacaccgagccgtgcgacacgcacgccggccagctccggggaacaacctccgtcgacgagtcatcagacgacgacccgtccttcaccgaccggattctcttcgccgccgcatcatcctccgccgccagcccgagccgccggagctcgagacgtcggcgccggcgtgccgccgcggccttgccgtcacctccggctactacaacttcgcacgcgtgcccctcatccgtcgcgcccgtctccctcatgtcccacgcgtagtagagagagcaacggaggaatcaaagggaaaggctcgccgaggagggcgaggcgggctttaatacaagcccacggcgaaaggtaggagaagcaacccgagccgtcggatcgcgcgcggacggccagatgcgcgccaccgccgcgtgggacgtggacggacgagatcgccggtggcgcgtggcgtggccgccgtctgggatcccgggccgggagagagaccacgctgcgcctggtccaccggtacgctctcgcgcgcggtccatgtgggcccatgttttcagtgacataggcttaggtggaatgggtccacgtagcgttgggatggttgggaccattaggtaggggagtggggcccaggaaggggtttacgtggagggagagagtggaacgaggaagtgtgggggcgcccgctcccgctgcggcggggacaaatgttaaccagcggcaaggcaaaagggcgcggcttacgtgcaaggaaacgagattctacaggagcgagcaaaactgcaaaagccctctgtgtttttgacccaaaccgcgccaaaaccaaacccacgtctcacacacctggattccggaaaaacagtgttgggtcaaacaaaccacgccgcgaacagccggcggatgaacgaggtttcgtttcggcgtttcgaatggcggagatggtcgatggcgtacgcccgatttggagcgtggcgcgggggtgagggccgcgtggcgggcgaggtggacacgcgcggcggatccagaggcgcaagcgcgagagggagctcggctcatgccggggtggaagagccagcgccatggcgcggcctcgggctccgtttccggcgcagcgccactgctgctgctgagtgggggcgacgtggagacgacccgggccgtggtctccgcttcttcgtacgagcagtggtgacgtggtccgttgtggtcaggcactcggtgcaggcgcgggattcgaggggtgccacgacggcatgcgggcagcaaccatgggagggccatgccgttgctagctttcaacttttacggcaaagcttgttcattcatggtgatgcgttggatggcgcttttgtccggtcgtttctgatctcgacttccaaacgagggcgcgcacatgcatgctcgctcgctccatgatcagttcggaaccagcaactgttttgttccagctctcaggatctggacaggtgtggtagcactcccagtacgtcactgcattaacttgaaacccgtacgtagctcctgatcagcaaattaatgttcgttgctactagtaataggcattacacgtccttcacaatcacttcatctgtactcgagccatttgatagcatcatgatcacacagtactggacatgaggttaagcgggagcagagatgctttcccgtttgaaacttaatgtcacctgcacgctagctaaaacaatactgaatgctaacaatgtgccccttggatactatcatgatcacactactgtagagtgatgtattaaaaataattgttgctaattccgagcttagcatatttaagaaattcgaacataaaaaggagcagaaaatatcatctcactttctcagtactactctcagtacaataacagactataagccagatataaacatatttcaagaatataaaataggagagagaacagcagcgggctatagatttatagccacttgtagtaccaattataatttgtatagtatacgtttataggtaactattgtatgaatcggttattaaattgactataaatgatttaaagctaatagctggctataccattaaacttgctctaatactggtatctctctaagctagcgttgtgttgtcgctttcggagaacaacgcatgcatcaatgcatcatgattaattcatgcatggcttagcttttttaagatttttaagcacttagagcagttacaatagcaagctataaaccagctataaatatattttaaaaagataaaacaagagagagaagagcagcggactacagatctatagccagctgcagcacgaactctaagacgtaatatgtgtatgacaggtgggatcagatattaatagtatagtaagtaaatattatataaattagctattacattggctataaatgatttgaagctaatagttgactatactattaaactcttagcgagctaagctcaacttgttaggtctgatctgatgcaatgcaaagcggacaagattccgcgcgcggccgccataagcatggcctcgcaaatttgtgtagcatcgccttgacggcaatg

SEQ ID NO: 4220 - DNA, 16776 bp, Oryza sativa
aaaaaaacaaggcaaaagatagatgcaatattgaaagaacgattcaattactctctccgtttcacaatgtaagactttctagcattgcccacatacatatagatgttaatgaatctaaacacatacacatgtctagattcattaacatctaagtaaatgtgggcaatactagaaagtcttacattgtgaaacagagaaagtaattaattgcgttattatagattgtgtatctcaattgaactagccatggttgttataaaggggtagtcttgccttgcataggatcttctccatgtcccactatgtgtagatgtcaattattaggactcgaataaccacagtacaagcaagaaaatccgagacccaacaaaacctaactcggaattgaactccgccggtctcacgggtcgcatgctgccggtcaaaccgaccccaaccgttggtctgaccgccatcagtgcagagaacattcagcccatcaaaaaaatcaagttatttgggcagcacaggcccatatgcctcactcacttgggccgatccggcctcgctgaacggccgatggtactgcaaacggtaacagttgaggcattaacaaccgtacaccgatgttcatcagcgacgcggatgtgcgtccctgtttctctcttggcgatgtagatgtcagtgtgaccacaaacagagggagtggccctgaacaggaaaccagaattgggacgcgcaggtcgcaggaatcggaatgttaagagtgctgctagtaatggcatattggcatattagcatgtccagtcgaccagtccatttccagcagctgttagttagcactcgccataattaagatggatgcgtgccactgtcactcgccatctcacccagatcacacgaccaaattgatccatcgctaacgttgtaaagctaagctgcctcttatgtgatctgatcaataatacgccagttaattgacagtaaatcagtaatacagcaagaacgtacatttttagtttttttttcttacctagtttgatggcaaagattatttgctacgaattgatatttataataaggtgaaaataatcctgtggtgaaacgaagcaatggaggaggtggtggtgcgccgccgggcatgggattgcgggagcccactgtacgactcgttcgagctcgcgtcggtgtacggcctcctcgacagcaatctcatggcgctgccgttcgccgagcggtccgcggagctggacgcggcggcggatcgcgctccggcgaggaggacggcggcgaaggagcagaggcggaggaagaaggcggcggcggcggcgaggaggacgggcaaggcggtgctccgttccatcttcaggtccgtcacctgcagcaggaagctgtaaagctgtaacactgagaattcagaattcagaattgcatcgaacgagatggttgagaaaattaacgatatgatatggattgatatgaattgattcatcggtccgcagtgcagatctcgctgcttttgtttcatttcggcagattttatgattcgagttgggttttcgtttccatcggtttcttgtccttctcgggaatctccctattttcctgcatacgataattcgatctcagaaaaaagagagactctcggtgggcaagatccgttttgcactaggggtaaagggtccactaccagcaatcgtgtgaactctgaagtaacacaactaaggtctgtacatccataccgaaatagtgcattggcgttgcactgaaaattgaaaaatgccaaaatgggctgaatatatggatggtactcctagcagaagtcaatcagagtgcaaagtactactgagtactattatacatctggaattttgatattaagaaaactatttatttttcctaaaatgaaatagtagttctgaacttccgatcagggttcacctttccgattaagcgctggatcccgatccctggcagtatgacagttttcaccaaatttcgacaaattttggtcaatcttactgtttcaaatttgaattcccgaaaaccatccaaacttccactcggactctgctttcttcccacgttgaaacctcaaaattttgtgattttcaatcagttctaaaatgtcaggcagaagctagctcaacacaggatctttgagaaaggctcaacacaggagcaatttgtcttatgggtgaacaaaaatggaacactcgattagtatttcattgctgttcttgtccaaacattccaattgtggatgtactggacagattgtgtgggtttttattcagaagtggaggtggagcccagctcaactaaccactgtttgatgcacatgcgaacagagaaaaattggtgcagatgccttagtcagtactaatctccacggaccacaactgaaaggtttctttcagaaaatcaagtgaacaagctctacaagatttgtactggttagataggaatacaaaatatagtggcatgctgaaatccttcccttctgttgcgtgtctcatagtttctctatcctcttgcaatcaatcctctgctctgcaccacatctgttcattcatctaaaaatgtgcaaaactgcacatatgtgtgatgtgtatgaaatatcaaccactagggaaagaacataaagaaattatctgtgcaaataatcctctctaaaattctcatggatgctctctagctatgcaaacaaatcagaacaagaaacagagtacgagcaacatttttgtagagctagaaattcagtgattagtttttacaactttgtcgatgcaaaaacccacgacagatcgagtattcgagtatacatgttgttactaattagtcatttctaacaaagcccaattttctcgggacgatttattgctgatatccttctaatatttctaggttataaccttcacaaataaccaataatccatcatcacctaacagcgaagaatttctaagagctcaaactctgcaaccaatcatggccatccatggaccttggtgtcggttggttcgtgtccatggttcgtactccatctacgcagctagaagttaagcatctcccagatcaactcgggatcgaacgacggcatccgctcgagcgggcagtcgccgtcgacggacgccgcgctcatggagagcacgccgtccggtgacccgtacgacgacgacgtcgtggttgtcgtcgtcgtcgtctcggacgcggcgcgctcggaggccacggggcgagacggcgtcgccgccttcgcgtcctcggcgcgttggctcttcttgctctcctcgcgctggcggcgcgcgcgcgcgcgcttgcgcgccatgcggacgcggatggcctggatcttggcgtcgacggcgtcgcggagttggcgcaggttgtcggggcagtcgcggccgtccatgacgccggggaagttgaggcgcgcgtactcgccgcggagcttgaacgcggcgcggtcgtaggcgtgcgcggcggtctccggcgagtcgtaggtgccgagccacacgcgcacccggttctgcggcagcctgatctcggccacccacttcccccactgccgctgccgcacgccgcggtacagcttccgcggcgcgccatcgtcgagacccgccgcggcggccgacgaagagctggcggcggcggtggcgctctgcgcctgcgccgcctgcgacgcggcgaagtggcgcaggagctcgctctggcggtagtagacgctggagccgagcggcgggatggtgacgggcggcgggaggtgggagaacacggtgtcgagggcgctgccgccgggagagaggaggagggaggagacggcggagcggacctcgccggggaagatcgccggaggcagtgtgcggaggctggcgtccatgggaatcccggaggcgggagggtaatttcgtaattagcagcggatgttacgggcaaggcgggaagggcattcttgtggtgatttgctcgagatttcgccaagtactcgtgtaccatgtggcttatataagcgaggaatggcacggtggttttaccattatacccctcacatgataattggagtatgaacacaagatctttatgttgttaacacttcacgctttggtttggtcaactagctcaccatgtttagacccgtgatcgtaattaagcacccaagctaccccaaatcacctgtcaaatgaatagataatcattctacggaacaacaaatctgactacttatttcctcctgtgcatatctataagttggtgtttggatgcatccctatatttagacactaatatagagtattaaatataaactacttacaaaactaattatataaatgaaagctaattcgtgagacaatttttttacgggaatgctaggggacgggataccgtcccccaataggatagctccttctccacaacgcaattcttatccatacacgcaccaggactgctcactcgtcgccgtcgccgtcccccgccgctgctgcgcccgtcccccgtcgcctccgtcgccgccgccgtcgctatcccctgccgccgccacgcccgtcccccatcgacgccgcgcccatcccccaccaccgccgtcgctgtaccccgccgccatcgtgcccgtcccccgccgccgccgctgcacccgtcccctgcagccgccgtcgctgtcctcgtctacaaggaacggctgcaggggccgaccgcacgtgtcggggtgctcctcccctaacggaatgcccagctatatctagtaggaatcacctgatacctggtaggtatcattcgatacctcgcaagtatcacatgatacatggtagaaatcgtctgatacctgacaagtatcacatgatacgatacgtggtagaaatcgtctgatacatgacaggtatcgcatgatacctcgtgagtatcacgcgatacgtagttgaaatcatctgatacctgataggtttcacatgatacatcgcgagtatcacgtgatacgtggtagaaatcgcatgatacctgataagtatcacatgatacttacaagtatcacctgaaacgtgtgtagaatcgtgtgatacctgataggtatcacacctgatacctactcgggatcatcctgttgtgtagaattgtctgatacctgataggtatcagacctgatacctactcgggatcatcccgttcgaaaacgggatcccgttatatagcagcccctttttttaagcctaattaatctataattaaagaatgtttactgtagcatcacataggctaatcatggattaattaggctcaatagattcgtctcgtgaattagtccaagattatggatgggtttttattaatagtctacgtttaatatttataattaatatccaaacatccgatgtgatagatatttaaaagttttagtctcatctaaatagggtctaattccacctactgtaacattctcattgaaacttgtgttacaccaaatcaatctatatatgcaccacatttgtttcggatacaagaaaatctcacatcaattaaatttatcagccgatcatggtagatttaaattagtaatggtgcaggccaattaagagttatacctaaaaatccaatcacactctgaaatgtattgaaaatataatcttatccatagaaaaaaaatgctaatatagttatccatcaactccaatttgatgttcactattatatagtagaataaaaaattaagagccgtataacaaatctaattacactctaacttctctctgcgtggaagttgtgcgggacaattcatcactacttaaaataacaattgaatactaattccagataaattccagactaaaaattcaatccaattccaaatgcagaaaagcccgcggcgtgcacggatcatggattcccaagttcttggacacgaaggccagtttgggaattttgacgggtgggtgggggcagggacacgtggccacggaggtggacgtacggaggtggcactgcaaaatgtcaaaacgggagaggtcggaacgggaagagagagagccgtgatgagaaggcccaaaagcaaacttttggcatttatgaggattagttgcggtgacagcggcggccttacgctgccacgtttccggttctcctggagccacacccttgcacatccatcatctctcattaacttgattagacccggtccaccgtgctccggtgacacgtcggcagcccccttcctgccaaaaaatcacacttaatcaaaattaactactcttatcagtttatcacaaacctgtttcactatttgcactgtttgttttgatgactgcatgttacagtacaaaggcccccatttttcttacatagaagtaggtaaaataagcctgagaaaacatgctctaaaattttgtagttgcatgtctttattgattttttttggcatcattggttggctacgagctgattctaagtaaaaacggcttattagaaaaaaaaatttatgtttaaagctttttatatatcaagaagaaattgcgttaacataccgtagaattaacttcaagattaagttttaaatttaaattttggctcttgttcatttgttttgtagggcaaactatgaggcttgattgtttccttactccctgttggcggtatggtatgaggcccttcgaccaaaatctgccaaaggctatgtgaggagtgggaatccaagcccgagacgctaaagttagtcggggcgaagccccctcccccatggcgaacactatggaacaagtacagcgagaggcgaaggatcgtgtgggtactctgccaagccggaggcctcttgggcgaaggacgcagggcgaagagtatatgccgaagggagacgacttcgccaaagcaagctccccccgcgagggccaaagaagccttttccggcccatcaagcctaggggccattgggccgacgatcgcctaacggcccatcaggagtccatgaacctctattacactatgtactcatgtaaatgtcctttcataagggtaaccatgtaaattcccctgtataaccaaaaccctaatagtaataacctgtaataggggctataaatagtcccatagggccaggtaatggggggatcccaagaaaaattctctaatcaatacactttactttttctcaaccactgttgagtaaccacatctttcgacgtatgcagttgtcgtttcgacaacagctggtgccgaccgtgtggacctccgagcgaaaccactgagagcgaatgccaccgaagaaggtcgtaaaggagaaggttacaaggcgaaaggaaagcgacgccggggcggatatggccgccgaagagggagcagagccttcggcgcctgtcgccgaagatggaggagcgccatctgcttccgcacctgcgctatcactaccgcctttggcccctgctacctctgtgcaggtgccgaacgcggctgacatggcgaaggcggctgtggcggcgagggcactccagaccagggcggagatcctttcgacaaaccaactgctggtgccctaagccgctccgtcacagccggcagtggccctaactgcgctcgccgctgtgcaagcctaagtcaaccctgacaccgagacacaaaccgaagccgacatggaagccatgcgacagaacatgacacgactctaagacatgcttcaccaaatgcaagaacagcagcaagcgtacgaggcggtccaaggtcgcttcggcaccaatcctccagtattcggcaggttatgtcccaccccaagtctatccacaagtgccgacccagccccttctgccataagttgtgcaagcgccaatgtacttcgccgggcagccatcgaccgcagcagtgcatccggcccctcacgtgcaactgcaagctcaaccggtcgctgcccaagtacatccttaaccgcctggccaagtgccacaaacaatggcagaaggggcttcagctctgcaggcgcagctccaagctttccttcagcagctcagccaaccccacaacatttcaagtacaaccccttcggcccgcccggaggggaatacaagtcaaggtgcgcctcgttggttgccttcgaatcagctaggtctggggacttcgccttggagtcaaggaccacagttcgactccatcaatgctgcttaggcgccaaccgttcggccgcaagcaccaacgccaggtttcggagcaaaccaagcaccaaaccaggtcgtcatgacatggtcacagccaactttcgacccattcatggcggtacagcaagcatcaccaatcgggccgggcagccgaatgccatggcccaacctcacgcgcaagccgtgatttcgcccttcgccacgccatacccgcagcaaggtgccatgaacagggcagggggcgaaaaggggctaccattgagtgggggaatcaagacccgtccaatcccaccccagttcaacttcccacccgtcccacgctactcaggcgaaactgacccaaaggaattcctctccatttatgaatccgcgatcgaagcggctcatggcgacgaaaataccaaggcaaaggtaatacatctcgccctagacggcatcgcccgctcttggtatttcaatttgccagccaatagcatttactcatgggagcaattacgcgatgtctttgtccttaactttcgaggcacctatgaggagccgaagacgtagcagcatctactcggcattcgccagaggccgggggagtcgataagggagtacatgtgtcgcttctcgcaagcccggtgccaagttcaagacataactgaggcatcagtcataaacgccgcttcggctggtttactcgagggcgaactcacaagaaaaatcgccaacaaggagccgcagacgcttgaacacctatttcgcatcattgacgagttcgcaaggggcgaagagaattccaagcgacggcaagcaatacaagctgagtacgataaggcttctgtcgccgctgctcaagcccaacaacaagttcaagttgccgaaccacctcctctcgttgttcgccaaccccagccggcgatccaagcacaaccgccaaggcaaggtcaagcccccatgacctggaggaagttcagaatcgaccgagcgggcaaggctgtgatggctgtcgaagaagtgcaagccctccgcaaggagttcgacgctcagcaagcaagcaaccattagcagcctgtccgcaagaaggtccgaaaagacctctactgcgccttccacggacgctcttcacacaccacggagcaatggcgaaacattcggcaacgtggcaacgtgcaagatccaaggatgcagcagggagcagcggccgaagcaactcgtgaagtagctcaagaacaagtacccccggccgaacaacgccaagatgcgcaacgcagagtgatccaagtgattacaagggccgacccgccgatccaactgtcgaagcgacagaagaaaatgcagctgcgaacggtccacaatatcacttcggcaggcgaaggggctccgcagtatctgaaccagcaaatcttttttgggccagaagatgccgaaggagtaatgttcccgcatcacgatcctctggtgatctcagccgagatagctggtttcgaggtccggcgaatcctggtcgacggaggaagttcggccaatgtcatctttgccgaagcatatgccaagatggggttgactacccaagcccttaccccagcacccacatcgctctgaggattcggcggagaagcagttcaagttcttggccaagcacagttgatagtagccttcggcacgggggaaaacagacgcgaagagcaagtattgtttgatgttgtcgacatcccatacaactacaacgccatcttcggccgtgcaaccttgaacaagttcgaagccatttcccatcacaattatctcaagctcaagatgcccggcccggcaggagtgatcgtggtcaaggggcttcagccttcggctgcttcaaaaggcgatttggccataatcaatacagcagtgcacaatgttgaggccgaaccgcatgaccgggcgaagcacacgccaaagcccgcccctcacggcaagataatcaagatgcagattgatgatgccgaccccataaaactcgtatcactggggggcgacatgggcgaagaagaagctaagaacatcctagaggtactcgaaaagaacattgatatctttgcctggggccctgatgaagtgggaggtgtttcggcagatctcatcatgtatcacctagcagtcaagccagatgcaaagccaaggaaacagaagctacgcaagatgtccgctgatcgccaggaggcagcaaaagccaaagtccaaaaattgctcaaggcaggggtcattcaagagatcgatcatcctgagtggctggcgaatccagtgctggtgcggaagtcaaatggcaaatggcgcatgtgtgtcgatttcacagacttaaacaaagcatgtccgaaggatgatttccccttgccacggatcgaccagctcgtggattcgacagccggctgcgaactcatgagcttcctagatgcatattccagctatcatcagatttgcatgaacccaaccgacagccccaagacagccttcatcacaccgtttggcaccttttgccacctcaagatgccttttgaccatgcgtccgacctacaggagaccttcgacaacttgcgcgcaacatgtatgaaactgaatcctgagaagtgtgttttcggcgttcgcgcaagcaagctgttgggtttccttgtttctgaaagaggcatcgaggcgaattccgagaaaatcgatgccatttatcaaatgaagcctccgtcgagcgcacgtgaagtataaaagctcgcgggccgaattgcggcactgagtcgattcctctcaaaggcagccgaaagaggtttgcccttcttcaaaaccctccagggcacgggaaaattcaactggactcccgaatgtcaagcagcgttcgacgagctaaagcaatacctgcaaagcccgccagctctgatcaggccaacataaggaagcgaactgctactatacctggcagcttcgccagtggcaatcagtgctgctcttgtccaagaaacggattcaggccaaaaaccggtctatttcgtctccgaagcattgcaaggagcgaagacaatatacattgaaatggaaaagctcgcttacgccctggtgatggctcacgcaagcttaagcattactttcaggcccacaaagtcatagtgccatcacagtaccctttgggcgaaatactccggggtaaagaagttactggccggcttagcaagtgggcaacagagctatccccttttgacttacattttgttgcccacactactgtcaagtcccaagtgctagccgactttgtggccgaatggacaccggcattcgcccctgaacccgagctcgtcgaacagccctgggtgatgtactccgacggttcgtggtcgcacaagggggcgggtgttgcggcagtactcacttcgccaaatggtgtgccaatttggtatgctgcaaggctacagttcgacacaaccaacaatgcggtagaatacgaagccattcttttgggcctaagaaaggcaaaagcattggggattcggcgcctgctaatccgaaccgactccaagctggtggcgggccatgtcgacaagtcttttgaggcaaaagaagaagggatgaaaaggtatttggatgccgttcggtctatggaaaagtgcttcaccggcataacaatcgaacatttacctagaggccagaacgaggaagcagacgccctggcgaaatctgccgcttgtggtggcccacattcgcctggcatcctttttgaggtcttgtatgcaccaagcgagcccacggacagcttggaggtcctggcaatcgaccaggtcaaattgggcgaagacccatacgactggaggaccccgtttgtgaagcaccttgaaactagctggcttcaggaagacgaagcagaggcaaagcgcttgcaattcagagtcacgaagtataagatggtctcgggccagctctatcgctacgggatacttcaaccccttgcttcgctgcatttctttcgccgaaggcgaggaaatggcgaaggaaatacaccaggggctatgtggcgcgcactaaaccgcaagaacagttgcctccaaagtatttagacaaggagtttactggcccactgtgttgaaagtatgtgttgagcaaatcaagaagtgcgaaagttgctagcatcatggccgaagccaaacctcgccccagtatgagttgcagcccatcgcaccaatctagcccttcgccagatggggactggacattattggccgttcccggcggcgcgaaacgggcacaagttcgcaattgtggccgttgaatacttctctcgatggattgaggccgaactccttggtgcgatctcttcggcagcagtatagaagtttgtatggaaaaacattgtttgccatttcggagtgccaaaatagttcatcactgacaacggcaagcagttcgactctgacaagttcagagaaatgtgagaagggcttaacctggaaatcaggttcgcatcggtcgcgcacccgcagtcaaacggagcggcgaaacgtacaaatggtaaaatcctagaagtactaaagaaaaggcttgagggggtagcgaagggcaaatggccagaggaaatgctatctgttctctaggcccttcggacgacccccacaagaccaaccaagttcagcccgtttatgcttctctatggcgatgaggcaatgaccccaacagagctaggggctaactcaccaagggtgacattctctgggggcaaagaggggcgcgagttgtcactcgaactcatggagggggtaagagtcgaagcactcgagcacatgcaaaagtatgccacaggcacttcggcaacttacaacaaaaaagttcgaccgacggagctgttgcctggtcatcttgtcctaaggaaaaaggcgaacccgatagccgttagcaagcttgaatcgaagtgggaaggaccgtacctcatcaagcacaaatccaggatggaatcctttcgactggcgacactggaaggcaaagagttcgaccattcctggaacgctacctctctcaaacgtttctatgtctagaacgggtggcacccaaatcgccaacttgtaaaaatgtatatatcgttatgtaagcccttcggcactatgtaagcctttcagcaagaaaaaaaataaaaaaagaggaaaatgaaaaaagacaaaaaaaaatggatgtagggctattatccaccacggaggcccgaaccagtataaaatctttgtatcctctgccttctttttatttgtttgtgcgattgataatttgcggaaaaaccccaaggcaaacgccttatcagcgaaaaaagccaggagggcgaaacgaatcggccgaagcatcgttcgccgaacgattgaaaccgcagcagcttgtttcagactcgatcgaaaggaaagcacgagtgcttcctataacgtagaacaaaacggatcgaaaacggaaaccgaaagctgaaaagtcaaaacctatttcgctaatatatgcaaaggggctgatacattccgacccaacgaaaagcacgcgaagtgacaatgcaaaaataacgaaatggaaataaaatgcacctttattgattttaaataaaaatgtatcgaagaatacatcacaatggtacaaatgaagagaaaggagcaatggcgttacagcccggcttacagataaattacatcttcgcccccacgatctctctctctctatggagtgattgggcgaactaggttcgtcatcactactaatatcatacacaaccctaagaggagaagggggcgaaatacagactagactgtaacgacgctgggagatcgcctcctgccgatcagtcttctgatggtttcgctaaaagcgagccatgtcctccaaacgtcttgaatgaacaagatcgtagtcatctaaggttcgcctagggtgcgcccgaagccacccgggaaccttaaaaaccttatagctgcgtccgtttatcaccatttcacgataaacaggccgaaatgggcatcgcacctttggcaaatcctttaatgccacaaatttctcgttttggtttcgccaactcccagaagggggccgaatgcacaactttcggcaaacaccctggtagacagtgcaaaaagggcaaaaggagaattgcatagtaagaataggccgttaggcgatcgacctcggccctagcctctcttcctttctccaactcggattggagccacttgttttcggctttcgactctttcagggtgttggcgagggcctccatctccaagttcttgcggcctatttcgtcatccttggctcgaagacggttcttaaatccgtcaagacgagcctgcactgttcgctctgtcgaacagtgagttgcaagaatctggatgcaaaataggaacggtgaagagagcaaatgttaattatgggacatgtaaaaaagaagaggaaaaccaagaatagagaaaaagcatacccgaaccgccaagcttttaatagcagaacacccctcatcgaactcattcagttcggtgaataggctcggggtgctggcaggtaagacaagattgcttactccctcgacaaagggaataaggtctgtccgggtctcgaaatcgccaggggcgaaatggggcgccgcaagagaatactccgaaccagatgtttcgacggtcgcacccttccccttcgccttgactagcggcgaaacaaccggctgacgcagagggctaccgaagaccctcgccgcagctgtcacaatccgttccacggaggctgaagccccggcggcggcgctaccgcctgctccaactgcgccaagtgaaagaacgggggcggtcgaaaggtccaggctgcggccaacgggctaagtcagagtctcgtcagaagacttgtcgtcgctgaagacgcgagcgacatcgacgagtcctttctccttggaaatctttttgaccaaacctcccttcgccgccttgcctgccgaaaacgcaattagcgccttcgccccatccatctcctttcgacgaaggggggagctgttcgactccaccccggtctcattgtgacccgggcttggagtaggagtatagccaggggtgtcgacgcggttttcgaccgcctcgtccgcggccttttcgaccacgacctcaacctcctcctcttcctccccttcctcctcgccgtcacgctcttcgacgtcatcctcgtcgtcggcgtcggaatcggacaaaacaggaacccttcgcttcctgggcgcaagctttacttgtccgcgcgttcgctttcacgaaggtcctgcatcgtcgtcggccttgtgggggttcgcccgcggaggcaattcgccgttgtaaacccggttcgcccggccagccgcttgtcgcgttagcagctggctatactcgacgaccgacacgtcgccgatcatactgcgggcttcggcatcagcctggtcgagggtcaacactacaaaaataaagggtgtagccacattaagcgtcgaacaaagcaaaataacaaagcgcaggactgcatttcgaaagggcagtcttaccgttcgtcccttcaaggagaaccaacttcggcaaaccatcaacctcttcgccttgctcaactgcgacttgccacgactgggagaggggaaagatgcgaagcatgcaaaattcctccaccaagtcgcggcagctaaggccggagcagaccttacgtagtagagcgaaccacgcctccatagcgccgtccacggcgatcttgggctttcggttcggcgcaatcgccctgcaccgtcaccgaagggcttttgcggagtcagaaccagcctcgaaggggatggtgtggtaaaaccacctcgccatccaatggcggtcccacttcgacatggcggcgttcacccaccagagatcggaccgctcggggcgaacattaaagtttacgctcccgaacactgtcttcttcgttctagctggggtaatcaccgtcttcgaattcacggtggcgaagaatatggcgccgatgagttcggcacctggctcaaaccacgaagtccggcacgcccagtcaaagatagcgatctggaccaacgccgacgggctcaactacgggagctccacctagaaaaggcaaagaatctctggcaacaacgcgttgcacggaaaccggagccccgcttcaaaaaacacggcgaacaccactgtctggttgtcgacgggtttcggtacaacggctttccccggggcgaaatcctgtccctcgactaacgccccagagctgaccaactttgccagctcgccgtcgtctatgagagaaatccccaaataggcggtggtgttgtcgtcaatccggccggggtcgggccctttcgccgaagaggggttaggcttgcggggagccatgacgaaggacgtatgaagtggcgaagggtgtgtgcagtggcgaacaagaggagtgagcgagaaatctaaagggccaaggggtgccgtgagagcaagaacggaggaagagagcgcgagcggtgaaagtggcaagtctggcggtgaaaagataacgggggagcatatatagcccaacaaggcgacggttcgcctacccaccagtaataaagcgccacgtgtcgtgagggtaggtgaaacggtaaattcccatcgaccgagctgcacagtaaaaagcccacaaagggaaggcccattactgttcctttcggcccggtaaaaaaatgggctgcaggaa

SEQ ID NO: 4221 - DNA, 1239 bp, Oryza sativa
ccaccctcgccttatcccaccccaaaaccctagccgccgccggcgccgcggcccccaaggccccgacggcgccggccgccgtctccttcccggtctcacatgccgcctgcgcgccgctcgccgcccgacgccgcgcggtcaccgccatggtcgcggcgccgccggccgtcggggccgccatgccgtcgctcgacttcgacacatccgtcttcaacaaggagaaggtctccctcgccggccacgaggaggtccgctcttcttgctcccgttcctccctttttctggattacttctctctgttttttctcatatgcgatttgtttgtctcgctgaaatgttctgtcacgcagtatatcgtgaggggtgggaggaacctgttcccgctgcttcccgaggcgttcaagggcatcaagcagatcggagtgattggatggggctctcaggttcgacaaaaagaaaaaaaaacgctttctttcttgccttcagacttattttcccgttccatttagatggtcagtgtcgtggatgtgacatttccaatcactggttgatcaattgcacaacaaattgcttgaataatgaacaaattgatgtgaccaatgtagtgaatgggttgacaattgatttttactacatggatttctcatgctactcgggttcaggacaagaaaaccacctgtattgtgcatgacagagttaccgttgctttttcaggggcctgcacaagcccagaacctgagggattcactagctgaagcgaagtctgacattgttgttaaggtactcttatcttgtactgtattctcagttttcattcataggacactttttgcaatactttggtatgcaaatcgccctgttaactgaaagctctgaaccatggtttgaagcctcgactgaactaatattcgttctcctttgtatatggctagcttgttaaggtgcacaggctacaactgaataatccattcttattttgaaaaataattcgagttatacaatttgtcaatttggacattctaattcataagccattatatttttctcctcctcacttatgtacctttgcattgtcctgctagtccaacattctattccgccgtttcctttcagattggtctccggaaaggctctaagtcatttgatgaagcacgtgctgctggctttactgaagagagtggaaccttgggtgatatttgggagactgtttctggcagcgacctcgtgttgctgttgata

SEQ ID NO: 4222 - DNA, 1354 bp, Oryza sativa
attctgatattcatgtttctgctcttgctaccttcaggcactgtgttcagagaaccaataatctgcaaaaacatccctcggcttgttccaggtattggaaaacaccagacattattactattttttatgcaatctttcttacacttactgaaatgaaatggttgtgttttcaggatggactaagcccatttgcattggaaggcacgcatttggtgatcagtaccgtgcaacggatgcagttatcaagggacctggcaagcttaaattggtttatggtacgctaccttacgtaccttagacacacataaatggaatatttttcctagctaaacctcataatttatactccctccgtcccttaatataaggaattttgacattttgcctgcactgtttggccatttgtcttattcaaaaaaatttagaattattatttatttttttgtgacttactttattatctaaagtactttaagcacaacttttcgttttttatatttgcacaatttttttgaataagacaagtggtcaaacagtgcaagtaaaatgtcaaaatcccttatattatgggacggatggagtaattgcaacgtagatggtatagaccaattggcatgaattagatttttacctttttactttctttttttcctactgttaagagggaaaagatgaggagattgagctggaggtgttcaacttcactggtgctggaggagtggcacagtctatgtacaacactgacgaggtacagcttgccactttctattgttcgtttcaagcatgcgtatgtcattttttttttgtgattcatgctcttagcgtttgattttgtagtccatccgttcctttgctgaggcctctatggccactgcttatgagaagaaatggccattgtacctcagcaccaaaaacacaattttgaagaaatatgatggcaggtattgatgtttctagcctattctaacactgaccctttttgcccttgctgtacctttgccatcgtataatgcaattatgcattggtctgactagttgggatttatttgcaggttcaaggacatcttccaggaggtatatgaagctcagtggaaatcaaaatttgaggctgctggaatatggtacatttccacatttccttttctttccttgatttttcatcctggtatctagtgtttggtgactttggtctctgtcaggtatgagcatcgtctcattgatgacatggttgcctatgcactcaagagtgaaggaggctatgtttgggcttgcaagaactatgatggagatgtgcagagtgatttcttagcacaaggttatatacccaatttcttgcctttgcaatttgtactca

SEQ ID NO: 4223 - DNA, 624 bp, Oryza sativa
tcataatcttttccaataaaagttccatatttagatacgacacatttattggattcaaacacaagtctaaaaccatctctacacagtagagagccgctaactagattcttctttattgaagggacatgctgcacgttcttcagctgcacggtctttcccgaagtaaacttcagatcgaccgtaccaacaccatgaacagccgcaagcgacccgtttcccatcaacaaggaggaacctctcccgacctgataagaagaaaacagggaaatatcagcacacacatgaatattaacaccagtatcaacccaccaatcaggtgaatgaaaaacagagagaactgtaggtaaaaaattaccgtaccccgatgttcctccgctctcgctaataaccatgttggcagacttcttgtccttgcgatcaggacaattcttcgcccaatgcccaggcttaccgcacacaaagcagtcgcccttggcctttcctttgcctttcttcttaaaattagttgtagcctttggtttgacatcaggcttgactttcttgttgttgttgttgtgggatgcgtgagggttcttcttttgcaccaaattggtgctagaacctccctcgatatttttgccccgg

SEQ ID NO: 4224 - DNA, 11044 bp, Oryza sativa
agtggaaccttgggtgatatttgggagactgtttctggcagcgacctcgtgttgctgttgatatcagacgctgcacaggtttacttcaggctctagctgcatgattttagttgccacttgatgttgttacttttaccaatgcttgtttgaattgtgctgaatttcatggttctgttgtttcatggtcctgtttattgaattgaatctcctagttttattgtgccctctacccatttaacattttctatatgttgctttctcttcttacactttgctgtggtgttctgtcggtataatttttcttttcactttctccaggcagacaactatgagaaaatcttctctcacatgaaaccaaacagtattcttggtttatcacatggatttttgcttggacatttgcaatctgctggccttgatttcccaaaaaatatcagcgtgattgctgtatgccccaagggaatgggtccatccgttcggaggttatacgtacaaggcaaagaaattaatggtgctggtatcaactctagttttgctgttcaccaggtaagttggtttcattgaaaaacatattttcaattatagattttgtaaagacattcctctgtgcttatgcactttttttgcacaggatgttgatggaagggcaactgatgttgctctaggatggtcagttgcgctgggatctcccttcacatttgctactaccttagaacaggagtacaagagcgatatctttggggagcgaggtgagcctactttcctgtttatgttgcatttggtgattgcactgtagctaatcagttagtgtccaggcattcttcttggagctgttcatggcatcgtggaggctctgtttaggagatacacagagcaaggaatggatgaagaaatggcatacaaaaacaccgtagagggcatcactggaattatctcgaaaactatctcaaagaaggtacacaattattgatagttttatcatccctctttgttgttcacttataagagtatgttttaaaaaccagggaatgcttgaagtgtacaactccttgacagaggaggggaagaaggaattcaacaaggcctacagtgcatcattctatccttgcatggacatactctatgagtgctacgaagatgttgcctctggaagtgaaatccggagtgttgtgttggctggacggagattttacgtaagttattcctgcctaaagttcaccatacttttcttcgattgtttagtctggagttctcagagagagtaatgcctgtaactatttgttaactcattggctatgcttccacaggagaaggaaggccttcctgctttccctatgggcaacatcgaccaaactcgtatgtggaaggttggtgaaaaggtgcggtcaacccgaccagaaaacgatcttggccccctgcatcccttcactgctggagtctacgttgcactgatgatggctcaggttagtcttcccataattcctcgtcaacctctcatatagtgacaaaaccaactgacaacagtatatgcttgaatcaatagcgctcaattttccaatctgttttgcaatgtttgtagatcgaggtccttagaaagaagggtcactcctactcagagatcatcaacgagagcgtcatcgagtccgtggactcactgaaccccttcatgcatgctcgtggagtggccttcatggttgacaactgctcaacgacggctcgtctgggatcaaggaaatgggcgccacgcttcgactacatcctgacccagcaagcattcgtgacagtggacaaggatgctcccatcaaccaggacctcatcagcaacttcatgtccgaccccgtccatggcgcaatcgaggtgtgcgctgagctgcggcccaccgtcgacatctccgtgcctgccaacgccgatttcgtgcgcccagagctccggcagtcatcgtagagtgagataagataatctcaagggagcttgcatcttgttacagtttgtccgagagtattgtatgtgtgtgcgtgactgtctgaacttgtgagcttgccatcaggtgacctggaactggcctgagcatctttttcccgaataaaatgaggcccggattctgaatacttagctttctcaataccatatactccacttctctggacagattcgtaataatagacaccacggtgtgtctagtcgagtactagactaggctcttttgatttatatgaaaaacatagaaattaattttaatcctataggaaaactttaatgaatttcttcgaaacaaacgattgaatcatattctatccttaaaatttctacgcaatatacaattccatagagattgcaagggaaacccattaagaaagaaaactcattaagagctttagtcattttgaaaaaaaaaggtctatatttctctcaattgatttatgcgtattttctatggcccaatcaaatggttatttttgtgtttttcacgcgtttataatttcacctacatttacattcatctcagaattctgtttttttttcttttctatcgttttctattccaacaatttaaactcctaatatattttaatacggaggtaggagtgagcagtgaaaagaacgtgtgattccgccgaaatctcgacgccgacgctcccagccggctcgctgccggccatcggtattgtcaaccacaacatctgcgagtctgcgacgccgatgcgcatgcaaacaccgcgctaaactcccaaaaccaacggcaaatccgatgaaaaaaaaaacaagaaaaacagcgcttgccctcacctacttaaaccaccccaacacattgttcacagcccacacaccaccaagatcggcgagctagttagctacatcgatcgaggccatcagctagccatggcggcggagagggagggagccgtggtggcgaagggccacgaggaggggatgaagatggcggcgtcgctgctggaggagttcggcctcccgctggggctgctgccgctgggcgacgtggtggaggtcggcttcgcgcgggccacgggctacatgtggatcgcgcagcggaggaaggtggagcaccacttcaggatggtgggcaagcacgtcagctacgacgccgacatcaccggctacgtcaagcccaggtgcatcaagaagctcaagggcgtcaaggccaaggagctcatgctctggccccccgtcaacgagatcgccgtcgacgaaccctccaccaccggcaagatccacttcaagagcctcgccggcgtcaccaagaccttccctgttgaagccttcgccgccggccagtagccatatgcatgcagcatatatacatgcttgttcatgctctacgtaatattcttactgctatgtatttcctctgtttcaggttacctttagttaaagtccaactattctaagtttgactaattttatagaaaaaagtagtaatatttttaacccaaaataaatatattatgaaaatttatttaaaatattactatctttttataaaattagttaaacttagagtagtttaaatttgaccaaagtcaaaaacatctcgtacctgaaacgaagaaagtacttattactatctcgtttttcttttttaaacgagccgcacgacacagcgcgaggtttcctcctcctactactgctgtgtatgcatgcagtcacggtacgtgatggtaagttcatggtgagagttgctgggtatgaaaaatcgtgagttgcatttgctgcgtagagtggggagagcgcatggagtttggtttggaacttgttcggtttacatggttttcatgaaaccttaaattatgctgaataaagtttttaataatcccgtgctaattaagccatatccatacatgatcaagtgatatgtagagagacggatgtacctcaaactcgtaagaataaaagaacctgtgaaaaagggtggatgcgcactcattctgtatattgaggttatggaggtcgagagattttctgaaatatagtatcagataattaactaaagcgcgccgtcaagcagtattagtactactgtggaacagttaatcaaagcaatcaggaatgttacaggtaacaacgtactgttctctttcaatgtgagaacaataattaatgttgttgtgaggaactggcttctcacaaatcacagctagccgtaattgagacttacaggtaactactactggccactgggaagagaaaataaccgccaacccgggttaattaattgaaaatggagcttatcacgtaatcaagaatgactaagctaataaccttcggttgttctttctgaatatattttttggggtttgtcgttttgattcaaagcggcaaatccagttcaccgtggcttaattacctctatgctctatcatgcacgctagtcagtcttctatgcagaattttttttttaaaaaaaagttttaacgagctccgatccatgcataatgcatggccagaaaagaagcctaaattttgttcatagtggcacagaaagtagatgaaacgatgtgttattcatagattctgacctaaatttacaaagtaaagaaaagggcagaaagattgaaagaacattagaacagctagggtagaaatgaagaggaactaagattaagtaatttactaaaaaataataattgaagaggtagcatgcaagttatgctatgcttattcatgcagcaatagcttctttattagctgctcttcttttcgctggaggagcctaccttgtgatcgccatggcgactggcctctctccctgagccaaacctctgggcactattcagctccggtgcatcgccggcgacggcgtccttgccggtgagcctctggacgacggacttgaagtcgtcggcggtgtcggcctccacgtacaccgtctcgatgatcttcacggtcaccggcttcgcttcatcctcccctgacatcgaagaagcgacacaccaaacaatcacagagagaggatgataatgggcagcttagctacagtttcttcaggatgaggagaaccgaggaagaagaagaagaagaagataattaagtagatgatgagccgtcactggcagaaattttgactgtgattttggacagaacttgaataagaggtagagagataggtaacacaaacatcgaactactcttccttctcggtgcacttaatgacttaaatatactacggtagatcatgtagtggcactgacttgtcatcctcactcgatatactataattgaatcagtcatgaaagcccataaaaaagtacagctttttcaggctaagtatgatattatatcaactcttaaattatgagaccaacgaaaaatggtgattttcatgacggccacacgtgttaggaatatgcattacgcatgcagttggcagtggtgctctctggatttttacggaggaggaagaagaggtcgaggtggtttgcattggcgtctgctctttgggccccgtagttgacaagctaccatggtcaacatacgttacatcagctttactacatgctgctgctgtttgttcttcagtcaataccgtgaccgaccaagacactgttaccgctgtttttagacctgttcaatcataatattgcagccaacagacattggctgtggttagttctttagccaaattttttttaagtatacggacacacatttaaaatattaaacgtagactaataacaaaacaaattacatattccgtatgttaactgtgagacgaatttattaagcctaattaatctattattagtaaatgtttactgtagcaccacattgtcaaatcatgacgtaattaggctcaaaagatttgtctcgcaatttacatgcaaactgtgcaattggtttttttcagccacatttaatgtcccatgcatatgtctaaatatttgatgtgacggaatttttggaagtttgaaaataacttaacaaggccattatcaactataataagctgcagaggtcgcatcgtaaatagcgaaacttcaaaaggatgtgtcctttactcagatagtagaagtaacattgcagagctggtctattcaagcggtgcagttctgcagttgtttggtggcatgatagagtttttaatgtttgtaaaagtattcaacagattagaattgaatttgaaacccaactttgcataaacttgtgtcagcatcacacctgcttgcgtaagagtttagaaaagtttctcttagatctctttacccctctgaatttagcatatgcaggacagccggaaacggccaaatatggttagacacaaccacacaacacacgactgaactagaacctacaacaaatttggacatcctggctaacacaagaacatttcaaaaagaacgacgactaacattcgtggtaacaaggtattggaactttagaagcatcctgcttacaacataacaggatgctggagcgttctttccctaaaaacgatggttctccttcctagatgctatcacactcctcgtcctacatgccttcaaactgtcaagaaaataatgctccagtgagatttgcttgcaccattatattcatccaaaaataacttttcaatattactaatatggctaccaatggttaccgatcaagaatagcaggaaaaccaaaagtaaggggaacaaatatatcatgatacagaaatggtattaaaggttgaaaagcaaaaggaaagaaaatgcatggctcaacaatgtgcaatctagaagtgattgatttttgaaaataacaagtttatacaaagtaagccagcttccatgaaaccttaaaacaaaaccaggctttatgtttggcttttcaatccatttttataccagaaccagtcaaaggctagcctgactacagccctccaacaaaatcacagacccataatgcagcagcagaaataacaggttatgaatatgtttacagcccaaacgataatcttagaaactaaaaaaaacagttaacattttcacgctgctgatgcatcagctagtggcatactggcatgaatagaagaatggtcaaaacaatgagagttttgtgcatattgatgtagcacttgcaaaaaagataatacagcaagttgtagggaaaaatatgtgaatgtgtgcttgacaataaagaaaggcagatggtagtgcaatgtttcgttttattaaaacttggcacaaggaactatatattaccgatgatccaggatctccattaagtacaacatctttctttactggcagttcagaagctcttgaaccctttgtgtcaccctagaagatcaacaagtaaattgaataaaccttcattaacaaaacttaaagattaacaagtaatacaacatgggaaatacctccgtcttcagtaccatcaagggtaatcaacggccgttgttattcatgcaagaaaggggaaaaaactatcagtgcacgtaaaaatttgtgtataatatggaaaagaaaacaaaggaaattatatcggtaaatatctttttctggaggacaatgaaacatccttttgttgtattttatatctcactagtgattgaaattaaaaatatatgctgatgaaaaaaaatcaatcttggtccaggcactaatgtcagttcagcaaaaatgttacatgtcttcagcataaatgtagttcataatctgacaattgcaagtttgcattggcgttcatcagatatgtagctttatggacataaaacaaaattacagtccatgttaacctggccactctgccagcagcacgcctacagatggaagactacggccattttgaatcggttcatgccaataagtacaaagaaaattccacctttacagtgcatgccctggacctagaaatattgggcgcttaacattcaggcagcacattcaacctttccgcaatctactgttggcaactaaatcaaccatccatcaatttggagtgaatcaacccatgtgacagaccaagtaatactaagtcaaagccttgatataagtacaatcacgaaagctctctccttttgcacgaatcatggcctcatggtatatgcacaatccaatcagtgcagagctcgtatgagcatcagtctgtgtatcaaaagcttaggcaaactgtgtgcgaatatagaagcctacgcctacctaatcgaggtgaaccagccttcacttcccacgtagtaacatatgcatcactaggcaatacaatactaggaaacactctggaagagagaggagaggaacaatacctcccggtagagcctgaggtagagcttgagaggctcgacatagtcctcgaatccgagcgtgcccattgaccagatcaggtcgtccccattgatggtcttgcgcttctccttgaggcacttgtcgcttgctctgcagggaaagatgccaaagatggccgtcagtcacccttgccatctgcacggcaggtgcacgacaaaatgcgccgccgccgctccgaactggatcggatcaagcaagctccggcaccgatatatacagcaaatacaaaggcgaggcgacactgactcgctggtgatgaagctgatgaactcggagacgcactcctggacggactccttggagtccttggcgatcttgccgttctccggcacggcccggcgcatgatgcggccgatgttggcgatcggcaggaaccggtcctgctccttccctactccgcctccgccgccgccgccgccgttctccgtcccgtcgaacccctccgacatcgctgggccatggcagaggtcggtgagaaggagagcgactaccactactgctggtgtcaagggaaagttggtggcttaccttagtttttttaggcggagatggacggagatggcggaggggatcagcgccgttggttggggaggagggagagggaggaggacgccaccggccgccggatctcgacttgtctttgtgtttgactccgctggagacgatgctgtgccttgcctttgcttagatttcttctctttttcaacttctcttcccctttttttcctcgctctccgtttctgcttctctcgttgcagtcaaaatgggccgaaagggctagatttgttggcaagtatatgggcccgatcgagtctgctcggcccatcagtaaagtagcgggctaactgcgccggtagcgtcggcgacacttgtgtacggcggcgagtcggtaagagcaagtttaatatagccaactgatggctccttatcatctatagtcaacttaatagtcaatccattacctataaacatatactacataattaatatttagtcccacctgtcatacactcacgtgtcttagagtccgtgctgcagctggctacaaatctgtagcacgcagctcttatagctggcttatagcctgctattttacatgctcttaagcaggtacaataggagagctataaacacatctcgagtagataaaaaaggagatagaagagtagcgggctatagatttgtagccagctatagcacgaactctaagatacatatgtgtatgacaagtgggaccaaatattagtagtgtaaatatatgtttataggtaactattgtataaattggctattaagttgctctaatagtatagccaactgttgactctaaatcatatatagttaacttaatagacaattcatataatagttatatataaatatatattacataattaatatttggtcacacatgtcatacacacatgcaccttagagtatgtactgcagctggctacaaatctatagcccgctatcattctctcttctcttttatcttcttgaattgtgtttatttatagcttcccattgtacatgttcttaaacttgctctaagttgacaagtaagttctcccaaaaacaagaaattaattaatcccataagtataagatatgttaaagtgttaatccttcagacctaagtacccaactctacaggatcaagcaattaagtatcataggccggcttcccaaatgatcacctgaccatacacatagtgtgtgtgtatcgtgtcgctaactgtgttttgtcctggagcaccgtatgcatgttgcatcatagatacatatagccccatgcatgtggccgaattaatgatgaataaacatgccatgagagtatatacgagacatacacatgtgcaaaactattatattactgtatctcacaggagaatacaggatgacatcaattcaggactagctctcgatcgagacacgttgcttagcagcaggtgcgtaccactcactgttctcctaaacaatgacgaggaatcactggtggagaaaccctttatagtcccggttcgtaacccccctttagtcccggtttccaaaccgggagtatcaatccgggactaaagatcgctatctttagtcccgggtgaaataaccgggactaaagatcgagctgaccttttttttttcatggccctgttgctattttataaaaccttgtttagcaaatgaactaaatttctatatattctttcttccccacacacattttctctctcatcaacttacaactaaattttggagacaaaaaagtgtgcaaaacataggtgcaaatgtagtatgacaaaaaaaaacattggaggataaagttgcaaaccttttaggcacctccgatttatatgtaatcaccaaaataaattcaatagaaattttggcatgacctcccctcttttttgaagaaattttgaagcttgctcggacagctggaggaggaaaaagacatatatatataggggtgagactttagtcccggttggtagcaccaaccggggctaaagatcaccgggatctttagccccggttggtgctaccaaccgggactaaagtctcacccctatatatatatgtctttttcctcctccagctgtccgagcaagcttcaaaatttcttcaaaaaagaggggaggtcatgccaaaatttctattgaatttattttggtgattacatataaatcggaggtgcctaaaaggtttgcaactttatcctccaatgtttttttttgtcatactacatttgcacctatgttttgcacactttttt

SEQ ID NO: 4225 - DNA, 14910 bp, Oryza sativa
tttaaattttaaaaataaattaatatgattttttaaagtaacttttctataaaatatttttgcaaaaaatacaccgtttactagtttgggaaacgtgcgcgcggaaaacgaaaccaacaaactcactcccttaccctctcaaacgctgcctaagtatgtagagtaccatcaagcgcgtgtaaaaacgtcgctttatatatacatcgcgttagttataccaactcgatcgtaaatagagtacgtgtttgtgcgctaataaaattccgtgtgggtcgcgtcatatgcatcacagtcgtcatgatatcacccgggtggccggctgccacgcagggccacgtacgcgcgcccacgcgtgagacaagctcacgcacagcgcgacacggacggccaggtgcgtgcagtggccagtggagaattaaggtcgagtttactttcaaactttttcaacaaacttttaattttttcatcacatcaaaacttttctacacatataaactttcaacttttccgtcgtatcgttttaattttaacccaaatttttaatttaaacgtgaattaaacacaccctaacacaaggagaggcacacgcaagaagagtatcgatagatgaggtgcggcggagccatgtgatcggcggtccaaggagcaacggcgcgcgcatcgtcggcctctcgtcgcgtggcgtgtcgcgtccggttccctggtcgggcggccggatgacggggcgataaatggggcgtcaccgaatccgtggggttatgtggtccgggccagaaacccggcagcataacggccgatccaacggtttaatttgttgtcagcagaagcaacggtaggcccgggggagtctgggcttgggccgttgggcgggccacatcgggtagttgcgatggggtcggtgtgtcacacacaaggttgttgctctgtgcgctgctccaactgatagtagataggagtagtcttgtttataccaggcaggtttcagtacactctagtacccactccgttccataatataaaggattttaagtttttttcttattttatttaactactcgtcttattcaaaaaatttgtgcaaatataaaaaacgaaaagttacacttaaaatactatagataataaagtaagtcaaaaaaattaaataataattccaaattttttgaataagacgagtagtcaaatggtacaaataaaaacttaaaatcgcttatgttataggacggagcgagtagtacactctctcaaccgttaaccgtttaccggttgcacccgccatcacgacgccgcccgcgccgaccaaaccggcctgttccccggtcccgcctcttgatggcgacttggcgcgcgacctcggattgaacccgcaagctacgggcacacgcaggctaatagcgtgctgcgtgcggcgtgccgaacccacgacgcgggcgttggcaactttgcaggcagaagctagctagccaaattcgtgtatgccgcagtgtcactactcactagtgtggcaggtcggttcgatcaatccacgtacgcatcgatcgccgtcacgtacgccggccacctctatgtataatctctccaccaccttatgccgccggccggagcaatgcaaaagcggctgtctactcccgccccggacgcatcctacgggtgtgttcgctaccaagggatgggaactgtgtacggtgcgcaaggaaaatagatggtccattagcacacgattaattaattatttgttaattttttttttcaaaaatgaattaattggattttttaaagcaactttcatatagaaactatttaaaaaaacaaaccatttaacaatttgaaaagcgtgcgcagaaaaaacgagggagaggagttgagaaaagtagcatccgaacacacccgtacctacacgagaacccatggggttatatggcttgctccctccgtaaaaaaacgaaaaccctcacatcccctcctggtagaatgaatctgaattacccttttgtccaaattaagtgacctagcatgcatgccatttttaagtttttttcggatagagggagtacctaacatgcactgcgtccgagacctatgtgaccgatcggaccatcgggatcaaaggctgagttttccgacaatacaccacttcctgaaccgttaaccgatactgtcttcgtattatgttgcaagtcattttttttcaaacttattaaatattgaccaagtttataaaaattaaaaacatatatgtcagggttatgaataccacatacctaatagtagttgattaaatctcggtaggacccactacataccatgtcctatacggaatcaaccttcgaatataggaggagttccggataagaaaagacaaccagagttctacatgtaaacgacaaggactacttagattgtatccatattgttttccctagttttacttgaacaaaagaacacctatgggtataaatacaagcccccctaggaagagaggggagacgaggaacacccaacacaatcgacatagaagacacaacataaaagcctacatacgccaagacacgctgccggatatcgacttcagggataagcacgactggtaccctacggtgtctccggatactgtcaggagagacgaaagcgctatctctgatctcgccgggcacggattcgaggaggaaagctaccctgttgtcgactacgagtcagatcatcagaccgccaggtcgacaacagttagataggctaccccaaatattgtactggtgtgattatcataaataagagcaataccggcttcggccaacaggatgtagggttattacctgacaattcaggggctcgaacctgtataaaaatccctgtctccatctcttttaactcagtctcgcgtatattctagtaccaacgatccccataccatgcaaataccgtagtcgagacatcaaacgtcgacattatacaacaccaaattaatttaattaagattaatattaatatattttagtagtatgcttattttgtgttaaaaatattgttatattttttataaacttggacaaacttaaatatttttattttttactaggatggaagttaaagcgagtatattttatttatatatagaatttttttaaataattaaataaatatatttttactttatattagttagtaattaattattatgtgctagtaagctatttcgttttgcgtgctgctaatatgctcttcaatatggaggttcaaacatgtcctaatttcgttacacggtggtgcgtaaccagcaagacatttgggctccgccatcaattttttactgtccttttctttggtagtaacatttacagtataaaacatcgatcattaataaacgttactatttatcttttaggtttgacgatatcgctggctccaccagataaaacaatgaaagtaacatttttctactctatcaacgcgttacacagcttgcggtaagtcggctccaaccagcaccttaattaattaatatgttaatgctggcatgatggatttggtatggttggtactcctgggtgatcgcctaatttgagccctctctcatgtgacgcaacaacatcgacgactagtcgactaggattaagatcaggtgagctgacgtacgacatgacatcctttacttaaccgacttccccctagcagaacaaatcacaacagagtttctctcaggaaacagacctgtatattccacatttgtcacaaagatgttaactgaaacctacgtactaactaaagggaacagcctaacaatttttaaacacgggattatgatcaacgaagccttttcttatacaccgcctgcgcttgcgtgtgcaaaagagatcttgccggcactacttttatcatttccatcaccacttttatgtctctatgaccatcgataaatcatgcatgatcacaaacaaaattgtggcattgctctactaatccatggatttctttttgttgttctatccaaaacaacatgatcctgtttgtaccgaccacgctagctgatgcagacattcatagacactcacccgacatgtggtcgtatcagacgtcacaggttgtgatctccaaaatgtttgctttggtcagtggcctaaagccagacaccgagcccaattaaacaaaaccaggctacttccagttcagaaacaacaacgtctagtcgcgatgcacggattattcttctcaccggcgatacgaaatggaccgtaggacgggtgacatatggaaccggagagaatcgcccacgcgtactcacggcagacagctacgcgtgagccaactgcagcgtggcatgggcgcgaggtggcgccgcgcctggcagccacatgacgccctccctggttggccggcgtgtctcatggcccggggccccctgccctgagactcctgtcttgtcccaacgtgcgtggccggatatatcgatattccatcgccgacgacgatacgtgccgtgtccagtcgcgaccgcccgtcgtcgtcgtcgcagcagagaagacactgtcgatctcacgctgacatgatgcggatcggccaggcacagcgccgaccattcgcaaatggaaatctctctgaatcgtggccagggacggacgcttgccgacagttgcgacggagacgagcagcggacgcggcggatttaagttgacgggcgacgtgggttggtgaggatggagaggagagttgatcatggtcacttccgagtcgttacaagtctttgattttgatttagcagctgaacctgatcggcattccttcctactactactacttccacgacggttctactacctaccattgccgcgttgtctgcttcaagaggctaatactagcttaattagctaccaaccctaccgctagtatagctaattgtgagcctccagaaacagacaccagcgcgagattgcgagatcgtggagatggctgcattcagggagggtcaaatttaatttggatctgaccggccaccaagccggcaggtgcagataattggatgcatatactccctccgtccaaatataagaatctaggacagttaattagatgtatagtactagaaaatatcctattcggtcctaagtttttatattttaagacggagagagtatcacactactagtatactactatgtcctaaaagaattaaaccctgagtctgaatctatatacacatttctattttaagatatgtgtctgatttaaatccaggtttaatttttttaaggacagataggtatgcttgtgctccatatacgtacacagtgcgttttggtcttgttggtagtgagtgtaaaatacgaagtgctcgtgagggaacaacggaagaacaggacgaaacggcactagtacccggagttgctataaatatagcgtcatatgctatagtcgatttttttttcagccacttacatagtagttacacctcatttacaccccacttacatatgtaattagtatgtaattttcgaatttacatatgtaattttagtacttacatatgtaattttgagacttacattgtaaatatattaaaattacatatgtaatttagtgacttacaatataaatacatgccgactattttttgataaaaaatatggcgtcataaatatagctacccctagtaccagcgtcgatctctgtaacttgggagatgattcgatcatgcgtctgtcgcgtggaccatggacaaattacgcgactattcgatcaggatcattttgcaaatcgcattgatcgcatggtcccaattaaccgactcgttcgattgcgtacaagaaatttttaaaaaccaagagacaagatcacaccaaatgatcaatctatacctaactggccaattattagcatttggctcgctatgcttgaagagaaaacagagtcgatagtgtagaggcgtcccctgtaactaccaacggtcgtggtggggcccgggagggagggagggccacgtggttgggaggggggtgggggcccaccggtgctgtcggctgtatccgcaacgtggtggggcccacgcacacccacttgccacggccagagggtggggggcccacctacctcccttctcctgccttacgtggcggctcgtagttgtgggtcccacttttttggctcctaggatccggtgcggggccctcaaaaatgcgagatttggcttggctgcctccgtccctcccacttcactgctcccacgttgctccacatgttctcatgaatgatggtgctagtgataccaccactgttacaaaatttggtcaattatttgtatatgtacacaatacattggacatgctatacactctctctgttacactgtagacatcatagtttttttttaaaaaataaaataaaatgaagctttgggataaacttaacgttgacaaaaggttgctttcctaaaaacaatgaaaaatatactactaatctgtatgagcaaaaaggtttttcgcacgatcagtgtgtccatgttcactggagattctatgaatgctactaccacactgttagtacaaaatctggtcaattatctgtatactcatcatacgacatgctgtacactctctctgttagtgcagcgcagtcttcatatgtatttatagtttcttttgtgaagctttgggatagttaaacttaatgttgccaaagattatcatcctggaaacaccgaaagatctactagtaatttgtatgaacaaaaagggttttggcacgatcgactgatgttcacatgcaggagattctatggaatgtgcttggggtgatattcctccacggcgcacgcgcgtacgtacggcagcgattgccacgataccgacgtactgtacgtgtgtagtgtgttcaattcgatcccacagcgaaaacattccggcgaagtgaagaatccgtacgtcgacgtctagctgcccacgcatcgtcgtccacttctctcgatcgagctactaatcgtaaacagtacgaaaagtatatatatggagattctttcacacgctctggccagtataggcttcaatctccagctacaaattaatacatgtctaaagcaaagtaggaataataatttagaaccatgaatcttcttatcttccctactaattactacatcctttgttttttactataagttgttttttttacattttatctaattaaacttttttaagtcgatcaaatttatagaaaaaaattagtaacatatataatattaaacggagagagcactaacattttgttacaccgtactatatgattagtggcgtccttggaaatactaacaatttttgttacaccgtactgtatggtatgatcagtggtggttcaaaattccaaggaccacccttcgttttagtgtaggagtatcccatcttttaaatctgatgaaaatattaacaaaatagatttaattttgatattatgcagttttgatgtatatgatatatagaactacccaataaaaattcatagaaccgccactgcgtatgatgcatggcagctagctggccgagctagcacacaaaaagtgcacctatcggataagccgataacgcacttgccttttgacccttttctgcaccattaaccggagtatacgtacgtacgtggtagagttaattggtctcggcatgggcgtgagaacgcattctggcacactatgggagattggagagtatagtaaaaaagctcaaaaagtacctaatgcccatatactagctactagtattcctagttgctttcgatggaagaaagaataatacgatggccgtgtcggcccaatcgacgccacatggtacaacatgcgcgagtacgcgtgtcgtcgctctcaacgtagtacgtccatttgacgcgctcgccgccggcagatcgtccacccttgctttttttccccgggccgatcgatcgatacaaccaaaaccggcaacgtatacctgctagccagccgtgcgtgtggtgtgttcgtccatatgcgtgcaaaagctcaacgatcgaacggagaaatggagcaaaaaggcgcttttttacgcccgtctttaatcggaaagaaccgcccaaattgcgacgtgcttcaacacgcttatgtactggatctatgctgttcttttttttaatgcaataatttctaatacacgttaaccacattcttctgattaaaaaatatgttattaacatttattttgttgtcgtctgtttctattattaaagttacttttaaacatgatatttttttaaaaaatctatatcttgactttgaaggcaaagtcttgttcaaaaacatggttcaaacaatgataggatagcagtgacattggtattgggaggacgcggagggtccctacttgacacataaaaaatgatataattaatcgtataatatttatctcctgttggtgaattctacccgatattagagtttggtggtatgatttttaaaatgtaccgagatatattatatttatgcttagagactgtaaaatttctcaatccggtcggttgtccggcaggaagactgaatgaatagtttggtccagagtccaacaacagtactcaacatgtgctgccttcagtgctagctcctacattactggaccagcaattacacattatatttcacataattgggtgttaacttccaaattttccccactaaccacttcatgcccctttcccccacatgatgcatcaggttgaaaaaacacagaacatgcagctctgccacctggagttctgccttggccaaaagcagctcagtatcatctgaaacaatgtgtaatttgcatcatgcatggcaggataagcagggattaatccattattaactgctactaccatgaacagctagacaagacagcgttgggtcaattaggtgggggttctgctgcggataacgtacgtgacggaaccaacaaccacccagatgatctggacgtgcgaaaggaacgtgtagctatagcttaattagtttttggataacaatttgggcacaagctggattagggataatgatggccacggcgtcattaacattagctgcccatgcttagattaatgcaacagtactctgatgaaaggtggcatacgtgttgcacaacaccttgatttgaaacggtaacctatcagttaattatgcttctgatcatcagcctgattgaatgatggatttcgatctgacggcatggctggccatgcttttcaatagttggagttggactattgacagacaagaagtattgtcagtactcacccgtactacttcctctgttcgaaaaaaaacccaacctagcttaggatgtaatataatctagtacaacaaaactctgactagattcgttgtactgattatgtcccatcccatattaggttgtttttttttggacggagagagtatataataaaggacaatacttgactgttaatccaaatactaccaaaatgcaagccaagaatttcacttgaaaaacattgttccattaaaatatagtactctctccgtcccaagatataagaggttttagggttggacacggttattaagaaagtatgtagaagtgagtaatgaagggttgtgattggatgagtagtggaggtaggtgggaaaagtgaatggtggagggttgtgattggttattaggaagagaatgttggtggaaaagttgttatattttaggacaaatactgagggctaaaaactgttatattttaggacggatggagtaaccggtaccggatactacgaatctagatatacttcatttaaattcgtaagtactagatggtgtctataagtactactatattactatattttgaaaatgaagtactcctctcaacctaaaatataacaatatagaactgaatgagacatgtctagtcctacgaatatgtacaagcttataatatgtcacatccggttctaaattattatattatggacggatcgagtataaaacaagcgcagaagttaggtagattcgttactcttcaaacaagagagttgaccacaaagatatttttgtaaaaaagtaaaatttaattatttgggtactcttcgtttcgtgcagataaggaagatcagttcaactcttccgtcattatggctcgaactcctgttgctcacataatcagctagttaaatccatctagtaggtatagttgattgcagagttagatcgtaatctgggataggctgatggcggcaagtaggtgtgcaaacctttggcgccaagtttcaaatgctaaccatcttccaataaaaaataaaataaagtgctcatcatcttgctgattattctccaagttgctagctcacctacttcgttgtcagtcgcagaggatatcttacaggcaaaaggaagcttttcacttcacaaagatcatggccgaataataatggagaccataacgtaaaagatttcactgaaaaagaagtgagaaacctgaaagacggatgtcagcaggtcgagtaacactgaagcaaattcgagttgtgaacttgctggcagagattaggatagatcgatcgattagagagattttgatcaaagaattcaaagaaagagataacacaaaccccacatctcgattacgacgttctctcaaatcgatcgacagctaattaagaccacagggttgttactattagtcggcatatgttaattagaggctggcattgcgacagctgagcctctctgaagaacacacggttcttcggattcagaaagatggatgagattacacggttcatggcgattggagatgatcatgttttcaattgttttcaattaatttctagaatcagattcgcagtaggaaacaggcctaaaagctgctgccatagcatggtggcttaaatcatcgtagacaattaggtcaaccagcgaatatgatttttagctttctgcacttgatgaaagccttgattctctggtgaaattaacgaatgatagtgagcaaagaggaatatggcatttcttgataatgcccgacagccaaaacgagagactttcacattagacctgcaggactggatggactgaacagaactgattctgaagaaaaagaaaaaaagttagccaggtcttccaatagtcaatctcgagacatggaagcttcgtactgaaatggaggcatgaatctttaccagtgccagcagctgatcttggtacagcttttatataaagaaaaagagagaacgaatttctgtcttcttcttaggctgtgtttagatccaaagtttggatccaaacttcagtcattttcagtcacatcaacctgtcatacatacaacttttcagtcacatcatcttcaattcaaccaaactctaaactttgcgctgtactaaacacagcctataaggcaaatagttatgttgatggcaggtgatgaaagtcataaaagtcttttacatgaagctcattagtacaagggcccatcggagtgcagtagtttggtggaaaccacctgaactctcccgggagtaaaaaggttctccttttgttaacaaggactttaatttgatgcagtcctgtcattttaaaaactcaacgcttctgaaaccagttcagactaatcaactacagtcccaacttgagggtagtgcgacgggtattgtggctgctggtactcccgcagcagtaacgcagaagatctgcgttcaggaaactcatgatttttttttcaggagttttatattagatcaattcctcttaaaaccttatgaaattctccccctcgaaactagcactaacgtatgaaacgtacaaatgcattgtcaatgtatattcttgttgggtgggtatccaacacataagaatttagcttgtagctactaatttaggcccccgtcgtatggctaaatacgaataagcatatgacgtattaacaaaacaataataacttatactaaaacttatatatatatatatatatatatatatatatatatattctcagcgatttaaacgtcaatgctgaaaaataaacttcaaaattaagttttgaaatttatattttggtattggctgatgcttaatagaggaaacgattagtgtattattaatttttagattagattttgtagacaatccaggccttgcttgaggaagtttcgaatcttcagttctcacaaagattatgagaatcatctctagttctcacccaaattataaaaatttataactataggacctgttcggttgtccagcgatcaccaataattacgcgcatacataaggtagcaacatgtttcaattgtagctattgtagccgatcgccgaataagggcatagaattcagaaaaaaaatatataacccaaaagctagaaaaccaaccattctaaattccaattcgttctttctcgggaccctagactcccataaatgatgattgacatgtggggccccaccactctcgggtccacctgtcagtgaccacgtcagaggatccctttcccctaaataggtcttatactgtttgagtagctgaagattttagcgatagctgttctgcaaaagaagggagaaaaaaacatacaaaatcaggtgtggtcctccctgatgctagattttcacagtgaataaattatgaatgacaagattaagagtaaattatgaatgagaagacagagagaaaggggtctctgatagtctgatttttttgtcctttctcatcaaatgagtccaaactccaaacaaaggccaaagccgcctatttaacccctctcctcctccctccaaacctcctcacacacatcccaaaaaccaaaaaccaaaaaccaaaaaccaaaacctctcctcttccctctccttctctaccctcttcttcgtcctcctccatccgagaggcagcaagccagcaactgcacgagcaaccacccgtagtcagtgacctaggcggcggagggagatcggccggcggcgagcgacgacgatgaagtacgtgctggtgacgggcggggtggtgagcggcctcgggaagggggtgacggcgagcagcatcggcgtcgtgctcaaggactgcggcctccgcgtcacctccatcaagatcggtaactcccgccgctcccgcctccgccgccgcccgtttttctctctcccccgaaacgccgccgtacttggcgggtgccgtttaattatttttttcctcggtcaaaaataggccgcagcgtaatgggtggccacgtgatcgcacagagcacgaacgccacgcatccccgtacatactagactgcacttctaaccatatactaataccgaatcatttttctttcatttggttaaactagctagctactcctcgagatcactaaactggagaaaacacagttaaaattcttgtttttttttataaaaaaattgttttaaagatgatgggctcttggatggatggatggataaagctctgatctttcttgttaacgggaatggaagtgctaacctttctgcaatctcaacagtgccatgttgcacttttagtgatcttgtttcctcacttctctttcgctgtagttcatcttttattattattattattttgggactaacaaagtcgttccctcctcctccttttgaaccaaccatttcatgtttcatttcttttgaactgtaattatactcgtcgttgctcgctgatgaggtggccatctgatactgtgtcagtgtcactgtcttggttccttgaaacagatgagtttctatattttatatgggtgtagtaatacaggtcaaatttgtcatctcgtgctatgaaaatttgtcttaactgatagctttgtctcttcatccagaggccaggtgctgcgcacctttcttgggtctagtacttaacaaactattatttttcttgtctcgtcacttgcaacctccttgactgtttgtgttcattttttaggtactaagtctgtacagtatgttagtaaattagtgaacaagtttatgaaatagttttggctttgtcatgtgatgatcgatgacccttctgatcttttacctttgttactgctttgctgcagatccttacctcaacaccgatgctggaaccatgtctccattcgagcacggtgaagtgtttgttttggacgatggtggtgaggtagcagctctgcttcaccatctcctttcggctttcacttagctatttcattatgagatagtcgcagagagtgcaccataggttacaaaatgcacgccagaaactgcactgcactgactcgagcatattctcctcatgcttggcttgaattatcatggactagcagttggtcactagcagcattccatgcacttgtcctgttgtccacttgtttgtagaaaggaggttccattgtagagtgtgtgtttttgtgataactacaaaattttctttctttgactaaactgaacttcatttcgttctctctttttgtctaaggtggacttggaccttggaaattatgagcgatttctggacatcaagttgactcgtgacaacaatataaccacgggaaagatctatcaggtaattggaataaagagtctctatctgagtgcgcacaagactttcagtatgacttgctttctagtccaaagttagtggtttatatctcacaccacagatctttttctattccgtttatacatgtggacaatatcctggttctgtagtctaaaggctggtgatagacatgtcgatattgaacctgtcatagggtagattcaccgtgagcagtttgaatgtcaagctgcagctgtttgctatcatgcaactgtcggtatttcaggaccacttgagtattatatgcttctatgagcatagataccctgctaattatacctatttttctaagagtaaatttaaacttaacaagaatttatcgtctactaattattaatatttattcttgtagggctgcaggaat

SEQ ID NO: 4226 - DNA, 631 bp, Oryza sativa
agaagacgagtacggcggcggcggcgtcgggttcgagccgacggaggacgagctgatgctccacttcctccgtccgcagctgcgcgggttcgcgccgcgcgtggcgggcgccgtggtggaggccgacccctgcggcgcggcgccgtgggagctcctggcgcggcacgggaggcgggaggaggggttcttcttctcggcgcgcgcgcggaggaagccctcggtgcggcggaccgtggcgggctgcggcggcggcggtggcggcggtggcgcgtggatgcacagctccaccaagaacgggcagtccgtgaccgacctcggcgtggtggtgcggtggtgcaggatcaactactgcttctacgtgcgcggcgagatggggcagcagcggagcaccgggtggatgatggccgagtacgagatcaccgacccgcggtgctaccgccgcgccgacgacggcgaggaggacgacttctgggttctctgccatgtcaggaagagctcgaggccccaagccgccaagatctctccagccaagccagcacgacagagcaagcccgccgccgccgccgccgcggatgtccgggctgcgtgatccggccgacggcggagatcacgaggtttgcctcgcgttggg

SEQ ID NO: 4227 - DNA, 550 bp, Oryza sativa
tttgtgtgtaggaacatggttcaaagggtcatcgtcgaattgggttcatcacttttcagagtgcaggtacgtttgcagaaatcctccatcatttattcaggcgttcattttaatttgttgttggggaagaataattttagcatagatgagtcttcatttatataaaatggcatcttgacctgaaacctttacttcatgtctgtgttctttagggatgattgcttttttccccagtttgatctttaagcttgatatgcattttgtaattaccttattcaatgcaactgtaatgttacagaatctgtggacagtatcatgcaagattcacatgaactggatggcacaacagtagttgttgaccgcgccactcctaaggtacctttgctccaaagcacttgccattggtggctgcatccaatagtatcttatctttgagtaggctctgtagtaggacattctatttactgaagtagttatgtacttgttaccacctgaaatccatctgaaccaggatgaagaagtcagatatcctccaagcaggggggcatct

SEQ ID NO: 4228 - DNA, 635 bp, Oryza sativa
taacacgaaccgggactaaagatcggtcagccacgtggccggctgatccatctttaactgggactaaagatctatgtaccatttttttttatttacatggccctgtttgctgcatggttgattatatatatatatatatatatatatatatatacatatatatatgtataaatacatatatacacacatatttataatttaaagcacttaacatttaacattttatgtacatatatattaccaaaatatatattaacactaaagtaaatgtacgtacatatatatacatatatatatatatatatatatatatatatatatatatatatatatatatatatatatatatatatatatatatatatatatatatatatatatatatatatataaatatatttgctctctcgctatagctaccacttccacgccggggttacgtcagaaaaggaaggaccgacgttatgaattgtcgatccgtcatagtagaactcaccatcgggattaaggacttcttcgttgaagaaccccatcacttgttcttgaacacccgcgataaattccttatgtgggagtttttccctcatgtgaatacgctctcactcgaaaaatattgacatatcaatatatgaaat

SEQ ID NO: 4229 - DNA, 603 bp, Oryza sativa
cataggcacaacccccgcatcgcgagttttcacaattcattttattttcaaacacaccgacaccacatgtcgggttttgaaggcttcacaaacccatttcccaagttttcgacaaacaacggtgtatgtgggatatttggtatacgcgctcagagagcacgaataccgaggtaccacaagggtggagcgacaaggaatcagggtagtacgacctacggaaattagtgcgactactgggtaggtccgtcggtttggcacgcaaaccgaggccaagcaagttaagtgctgatgaatcccctaatgattttggtaaaaatcattaagttaaggtggatacacatcttgtcatatgatcaaatggtttcgcgaaaaatcaataatcagacaacaagatgtgcgaactcgatattttacacgactctctttaccaattctgccccgaattacacttaaaacgactcaacagcttaacgttggcttgccacgcattacttgactgtaaaactctcactcttaccgaacttggccgtaacctgccaaccaaagcgagaacaaaacataacatcaaacgaatcgaccgattgttaggtaatcgtcacctcc

SEQ ID NO: 4230 - DNA, 598 bp, Oryza sativa
cttaaaaataaataaaaaaagtacattttgcactctcgaattgtttccagaaagcgcagaaatctctgacgctccaatcgctcgttaactgctcctccactcatcccagtgggcttgcacgacgagcgtggatttctcgctggcgcagcttctccaggtgatcatcttgcttgccacaggaggcgccaacggcggcggctacatggcgtccaagtacgtcgtgttggccatctactctgtcatcctcatcctgcacggtctcatcaacagccttcccatacactggctctcctggtttggtcaacttggagctttctggaatgttgcaggtacagtcgactcaacgtcccgaccgtttcttcagatattcagtctgaacatttacatcatcagatcatctgatcgtgatttgatctttgttctgtttgtctgtatcaacacacgatccaggtgtgtttgcgctgacgatcttgatcccatcggttgccaaggaaagggcgagcccagagttcatctttacccatttcaacacagaaaacggcatgggcatccaccagaaggcctacattctagctgtggggttgctgatgagccagta

SEQ ID NO: 4231 - DNA, 1247 bp, Oryza sativa
tgtcgaaacatgaattcggcaataataaaagggggtagcgtacgagacctaaagtggatggatgcagagacaaaggatttagacaggttcaggccctctcaatgagaggtaataccctactcctgtttggggatttgaatccgccgggtgtagtatagatctgacgatcaggttgtgtcatgccccctagagggcctcctgcccaccttatatagggtggggggcaggattacaagatagaaaccttaaccaatacggtatcggtttcctaaatctactttacaatattatcaaaccaggactttaggctgttccgtaatatataaggaaacgtaatacccaagtcatgatcttatacatattccatatatataagttatcccctataactagtcggataactatgccgtgtgggtatggggtacccataatctccacacaactgaacccaagtaaagcttgccgccgcctctctcaatcacctccgttggcctgacgttcttcggccccctcaactcctgcaagatcttccccttgcgaccgatccttacggcgaggaggtgggtgtccgagccatacggcgtctcggtcttctcgcggtgcagcgccacccagtagcctcccttcccatcgggcctcacgttgtccgggtagcccggcagctcggcgaacggctccgacgtaccggccttggggccctcgatccagtgcctcaccagcttgcacggccccgtcagcgccaccacgaggtgactccgatcggcgctaagggcgagaccgttggggtacgtcattccggactggagcacgtcgaggtagcccgtcgtcggatcgtacttcatcaggcggcccgtggagtcgccggtggcagtgaccctctcgtgctgggatcgctggaagcgcgtgctgctgtcggtgaagtagacctcgccggtgacctggttgacgtcgacaccgttggtgaacttgaacggcacgccgtcggcctccgtggcgagcaccgttgcctccccgccgcgcgggccgacacgcatgaggcccctgtacgcgtcggcgatgtagaagttaccggaggtgttgtggaaccggaggccgagcggccggccgcacttgctctcggtgagctccgcgggatggagcttgggagccatgcacttggcgacgttgtaccccggggcgtgggagtacactacactggtcaaggtcacctgtgacgggcccaaaccctcacctttgacggttttggg

SEQ ID NO: 4232 - DNA, 939 bp, Oryza sativa
catataaagcagggatcatatgctgagtcagtaacccctgtttactggcagcagcagcagtgtatggtaagctggagtctaatactatcagcatgtgggtgttgtaagcagttgctgaacaaaatcagttaggtggaaattttgtacacttactgaatactcgtgtcagagttcagataactttcttgtagaattttgtatcttctactactgcccattcaacttaaacgttgaaataatctatgcttgccaggatacgtggtaatgtgctacggagctatgccgtttttatgctgatttctgtttcgctgctatattttgttaccaattcaggctacaattcttacaaccaagaagaatgcttgacaagttacagatggcaacaccccaattaaattgttagtttggaccagcgatgtgcatatgcaagcgaatgctgctgggctagcatcgccccgatgaaattgtttctttggtttgacagtttttccttctctaaacttgtgatgtgaaatgatgcttctgaatatgaatgaattatgcgatgattttgttcagaacttttggatttctcccttgttttctgataatcgcgcctgcttggagatttagccgtcaacaacaactcaagattgaatcatacgtaagtgcttgctgatacaatatcaacatggagggtacattgccggttccatatgaacaaacataaaaacaccgaaaccccatatggccattatgccgatcctagcctagcttggcgaggacatcgccaagagcagatttggtcaacgtgtagtacttctccgcctcttcggggctcttgatcttggctgcatggtcaagctgcacaaatcacaaagggggattcttgtcaacaactcagctgagcaacagtaatactttttccgtgttcatttcatattataaattgtttgtcta

SEQ ID NO: 4233 - DNA, 677 bp, Oryza sativa
cgataaagctaagtcatcatttattttattctttatatgatatttttccttttcctctgcctcactacaccaattggccttccattgagtagtgagtcgggggctacagatgttatatcatatttttcataacatttatcttgattgcttgcgacataatctgagtacaaaagtacctatcgagttatggagttctatcttcctatgctttccgtttggtttgccaatggatggttgcctttgggtcgattcctagcacccgggggttcgttggatggaccgagtaacgcaaggtgctaagtattattcggaataaatcaaaagcatagagatgagataaatttattttctgctcttaataattgcaaaagtacctaagtagtaaattctgatccgtgaaactttgttccgtgatactactcatcctatatgtttgttctgcaggatccaaatccaaatatgcataaaagggattcatggctttaagcttatctcttacgctccaggaatggatcagtcagaacatcaccaccggctcgccgtcgtcgccgccgactggagtcttcacctatacggttggttggaaacaccaccgttgttgggcgtctacgtctttaccgactggccgcttcgtccaccgccgactggtgtcttcgcctatacggatggttggttac

SEQ ID NO: 4234 - DNA, 578 bp, Oryza sativa
aatcttcatttaattatgggacaggctgcgagaaaaaaggcacttaaaggatgggatccaacattcataaagagaaattttttcccctactggagatcagtattaggggcccagctgtctgtatccaatggagcagcagatgagaagtcaatgcttcatcgtccacagttccgtaattcagtagtgagtaacgagtcttcgagtctgaaccataatattagtttcttgggaagaattcagcaactgagtggtactcatgaatcgagaaggtacagtactgctgcattcagaatgctcacgaaggtgctaaagacatgagcaaaaaggtatgtcgtgagttttgtttcagtctacagttactgaacatgtggaaatcattgctgtgacgcctatattattaattgagcaatatatcgtaatgtcaagttgttagggtacctcaatagaatttcacttgtttaaatttacagtaatattttcttgtttttcttcgtgcaggtgcctagtggcatgttgctgttgataaccataggtctgcaaagtattatgctgcgcacgtcttttgcggacaccttaag

SEQ ID NO: 4235 - DNA, 545 bp, Oryza sativa
ctaatgccacatcgcatgttcctaacttggctatttgtttcaatctttcatggatgtgcagttcccagatgtatatgttgctgacaaagggatagcagcatgcgggttttcctcattatttatggattgcttcaagatcatggaaaatgtactggagaaacaagagtaagtccaggatctgttcctaattattttacctcacattattatttcctgttactttgctttggaagatcaaacatgcagtggttcaccccctatgtttcaatggcttgacagtgaccattctatttcatctggagttgcataagccttaccatggaaacgatatggccttatgttgaggcccagtattcaagtaaggtagttctatataaacacctttgcaactcaaagccaagttagtgaggcctaacaaaagggtcctcaactctatttttttctattcctgcatctattttcatgtatcctgggttgccccacattttgaggaagcgatcctgggtatacctggaaaaatttgccctttcattaaaggggggggg

SEQ ID NO: 4236 - DNA, 658 bp, Oryza sativa
cccctgacttcgttttatccattaaaaatttgaatttcaaaacttcaaataatattgtgaagcagtaaataatttcagttgaaaaagtcatcaccaacaaaagttgtataacttatcaagatctataacttttattttggtcatttcttcatccgacaaagtgatagtaacattttcacaaaatttacatatctctcttatagtttagaaaaccatataagagatatgtaaattgtgtgaactatgttattatcactttgtcggatgaagaaatgactaaaataaaagttaaagatcttgatgagttatataactttgttgttgatgactttttcagctgaaatcatttattatttcaaaatcttgtttgaagtagtcctaatttgaaattcaaattcaaattgttgaaacacagtcatatagaaaaatgttcaaaacgaaagttgtagatcttgataagttatacaactttgctattgataattttttcatttgaaatcatttactacccaaaaaattgtttaaatttcttatattttaaaatttaaattttacatagttcaatcaatctcggatggagaaataaccaaaagaaaattggtagatctcaatgaattctataactttgtttttgacaattttttcacatgaattgtga

SEQ ID NO: 4237 - DNA, 746 bp, Oryza sativa
tacaatgccaatcatgtgcagcaaaaaagtcaatatcgctaatactccatccatcatgttttatgtgcagtgatagctagcttgtagcctgctattatacttgttcttattgatgataaacacggctgatagacacgcaaaattcctaacagatagtttcagatcatgtagatttcgtttcgagttttgactctagaaattaattcaagatgaagttcattgacatcatgacatgcaagattacttatttattatttcagaataaaatgaaagctgcaactagaagcaaaaggaacactcagttttggatttggataatacatgtctgctatcaaagattcaagaagtggcttagttaaggaagagaattttgatatccctcgaggggatatcccctcgagggattaaaacagtttccccttatttaatagaatttgctccaagaatttcgctgaccacacgcttgagcgctaattcatcggacatgacacccttgtgcgtcgtgttggggatcaaaattgacttgaagtaaccctgatccgggtcatcaccgatcaacctttttaatgccaacacggtgtccaaggttgatctgcccatcgccgtcgccgttcaccacctgaggctttgccctgaagttgccgtcccaaaacaccagcttatctaccgttggcacaccgaccccgttgatggacgtcaccggcacgaccggggcccggaaatccagggtcaccggcagcgccctc

SEQ ID NO: 4238 - DNA, 8136 bp, Oryza sativa
tagttcttccattaatctatttctattgcttacagatcactcgcgctccctcggctgctgcggccgttttttaaatcgattggcgacggcacggcatggcggcgtgctaacagatccacccacgtatcagatcaaagcagagatgatcgcggcgtttcttcatccaagcgcagccgagtagccaatccgttgcactagtcagcgtgcttcgtcccttggtcgtttccaggcgacggtgccagctgctatcggtgccacgccatgctgatggcgatgaagtcgacgatgcactattttctgggatagatactactttttcctcctccttttttcaaacaactatactcctttttccatcaatgataaaagtagtatcataacatactgcttttgttttgaatatatatactatctttttttttgcgggggaatatgtatactatcaatttcatctagtatacttcattttatggctcattatataaaccattcggtgaaaccaagtgatataaatactattttcttaattatttaataagtaccactcggtgaagtattatgtacttcattaattattttgctaataatctaataaaaaggtgcatccatacataccttctatcgacgatcgatgtactacaatactgcatactaggtgccattaaaaaatagtatatactgcttcaatgaggatttcagtatatgctggatacttttaaaaaacagtacatactcattaactaaaaaagacagtacatacttctcattaaccgattgatttagtatatactggaaactaaaaaagacacaacatatttctcattaaccgattgatttagtatatactggaaactaaaaaagacagtacatacttcttaaccgactgagttagtatatactggatacatgataaaaacagtacgtacacctaattaaccgatcgagtactggatacttagaaaagagcagtacatactcatttcaatagatcagtatactaacgttaaagtaaagaaggttatatactgatactaaataataaaaagtatgcattcctacataaaaaatagtatacatatactgtactacctccaaacaaagttgtatatatgtactgctacaactatttaaaaggtactccagtatatacggcaactactactacgtaaactagtatatatactgctacgcattgcttaattttttgacggtgaaaaagtgctgatacagttcattctgaattctcagtatatactcagtgacgacactgttaatttatgaatctcatcagtgacatatactactttttaaacagtacacgaggaaaaacaagtatatacttgcccgctacctcaactatatcaaaatttgaacctaacgtatgtccgtatgtaccggcctaactgcatgcatccagaattcgaaaaatacaaaagtgaacggtaatttattttcccatttaatttaattatttattatcaactaatggatatccactaagaagagggagtacatacacctgggagtacaaaagagtcgtcctatatatatatatatgtatatatatgtatatatatatgtatatatgtatatatatgtatatatatatgtatatatatgtatatatatatgtatatatatgtatatatatatatatatgtatatatatatgtatatatatgtatatatatatataggacactcatatggggcaccatggtgcccgggcaccatggtatctaatgcacaaaatcactcaaatttttcaaaattttcaaattgtgagtatatacctagttataataatttgattcatacctatacttatcaacaaaacaactcaaatttaactttatttcacaatccatgattacatacctaactaattatatgtatggatgctatatacctagaatcaaaatctaacaaaaacaagttcaaattcagttcaaacttgctttaaactagttagtaaagtagttaatgttaatacctaggtaattgaaaaagtttcatactcatttgaattgggtatatactcaatttcaacaatggtgcccgggcaccatggagcaccaaacaaatttactatatatatatgtgtgtgtgtacctgtccccacctcacatgaaggtttcgggtctcaacccactaacggttggagagaaaatatccacaaatccacttttcttgaaaaattggatcactgcgctatatgttctgcatgctgaggcatttgaatgttgtgcatgcatggcttgttgatccgcacgcatgcaaggccgtgcgaccaggagagtagtttgtgtggaggttgctacggagactccatataagtttacggtgatgtagggtagaagaggagtgagcagaagcatcctttggagttgtgagcaagcagatcatttctgcagatatttgatggagcagaaaccctccggtggaaagggcaaaacatcgtcggcgagttctgttccgtcgccttctgcggtgccagaagacgtcaacgcgtgatgtcgagcggcagaagacggtggtagccgtacgcgcatcgtcgcctgtgagttctagcaagcagcacaatccggcggaggcagaagtcggaaccacttcagctaatggtgtcatgcagcagaaacctgcccgcagattggtacatatcggagattattttttgtttatgttctgttgaaaatttttctcttgtttgtttgtttgtttggttctgactatttggtgcgttctttggtcaggaatgattttgtgcattgcatggatactgctgcccggagtaaagagatgaatcactctctccagaaatatgacattcatttggatggatgtcatcctcttcccatgagaaatcctaggaatagatagatgcgcttggtgttcacttcatgatattcgtgcagcttacaacatgaatttcagaagcagcgaaagacctcggcgcagcagtaatggttgcgaacatgtgtccaaggagaacatgtagccagtagtgaaatgatcagaaaatttgtaatatacctcaaaataaaatagcagaacatcaattgaaagaaatcccaggaaaaaaaaattgcatctcaacaagaaaatctactgcttctggccggcagaaaatatatgttagctggtcaatttaaaaaactggcagaacgtcagctaaagaaattggcagaacatcatcgccgttaaaaaattgttggcagaacaaccacctaatttttctctatacccagtttttaatagcagtacatattctgcctattgcaagctaacagaagtacatattctgcctattgaaagataatggaagaaaatcttctgctcagaatttaatcacaaccgcataaaagaagtatgcaagttcgtgtaacagaaagctaattaagcttccgttccaaaatcaacggataggatagcagaatagagtctgtgagctgtgaaaggagcagaacatcggatggaaatggagcagaagattaaattcaaagaagaaccttcagctcctgctcctgcaactgaatcccatcatgtaatatgtgtcagtgtgaacgcaaaatatgatcttgcggctaaacctaaagtcggcaaagagatattttgtttagggcgatcgctacagtgatcgatctctcatgaacatccctgatcgggggataaccgccatatcctagtgtcggttccccctgtgtgcagtggctataaatagaaatcgatacttaagtgcaaaccctaagattcgattgctacccgatcaagcaaaacccactgagaacacggggaagaaccgaaacacatctctctctgtgcttccaaacaagagagaaagagagaagaacaaagacagagaatgggaacctctggagatcaaggtatgactcaatcccatttcaatttgtagttccactttgtgccaaaccgatccaaaacaatccaacaatggtatcagagccaggtttggcctcaaattggaactcaataagtgtttatgttcaagttgttcttcgttttcatgcccaaatccctctgttaaagttgaattgagccaaaatcatgcaatcccaaagcataagaaatggaattaggccttctagggtttcggcttgaagaaattagaagaaggggaaggaaaatttcatgcaaatctcagacaaatccctaagaaccgaaaccctagctgaagtaagaccccaaaaattccccaaatcatggaaccctaaccctaaaatcatggggaaaaggagcgcggcgggcttacctaagggcatggtggccggcggcgacctccgtgtcgccaccgacgcaataagaggcgagcgcgcgcccgaggacttggtccccgagcggcctcgcgacccgccgtgctggcccggctcctcctctttgcgtgctcgtctcgctgacgccgcttcgctgaggtagccgtcgccgcctcgtctcgccgtcgccgccgcggatcttcctcgcgcgagcgaccggcgggtgcttagggcaccgtcgagcaacgctcgacggggatgcgcgccagctatggcggcacgcagccccggcgagcaaggctcggcggcgccatctccaccccgtcgtgcgccgcttcgccgtcgtctcgctcaccgtcgccgcgggcgtgagagaaagaggggaggagagaatggggctagggttttcgcggggggcggccgcgcgccggttttgtcccgcgcgggagcgatcccggccgtccgatgagatggacggctcggatcggctcgctcccgacgcgggctgacgaggccgtgcgggaggcggcaaacgccggcccaggcccaggttgatgggcctggagcccaggcggaaggcggcgcggcaatgacgggccaggccgagtgcggcctggctcgagaaagtggcccagttcaattttgtgtggctgcatagtaacgggctgcatggtaatgggcctaattaaagattgggctaagataatattacaattaattttttccttttaaagaattatgattatgatcattgtgtttaaacattaaagatattttattatgttttaattaatgataataagaataataagtgactttgttatgtgataaaattatctttcatttatttattttatgatagttacattatatttattacttaaagttattattgttttatgcattatgagtttatttccgctacaaataaatattataattaagtgtgacaaataattgtcattctggccaaagctgattgacttttatttgatcacaaaattttattaattcaattcaaatctggccaaagctgttttgattgaattaataaaaggagttttaaacaaattgataaagtgtggtttgtatttattattctggccaaagctgattaataaatacttattcacaaaattttattgttcatttgcttctctggccaaagccgttttggatttgatcaataaaagaaggtacttatttagctgctgataatgggcaatattcagggatttgatcaatattcacaaattgccggaataatgggcaatattgaacaacttaatggaagtaattatgcttcatggaaggagaagctggaaattactctagccctgttggatattgattatgccctccataatgatcctccggttgagcctagaccagaaaatgataattatgagacccataatgaaagatatgacttgcctgctcagaatagtccttattcttgatataattcttgatcaaccttcacctcctggaagttgcaaacgttgcctcacgactaaccgatacacaaggtctataatacgcgagaaaaaccaatattcaacaacaatcaaatatgcacaacaaaatgtactattcgtgtttgctaatggattccaatcatgctaagggctaaagtttcttaatctttctattgtcatcgtggtctatttaggagttaaccaacatagcatttatggtatacatatatatttggctaatcggtggtttagtctatcaaatggctatggaaggattatggctatatatgcatctatctaaatagcacggttacataccagaggttctgttgttagatggatttaggatcaatcaaataacgaatcatttgtattattatttaattgatggaggctttactttaattatgaacatattttacttgtcacaataaattataaaaggttaataattatccatgctttgtatgttagagttgtttaggttaatcatattatgattacagattatcccatcacataattttacaatgaataatcctaatttacagttgaactataattataattatatgaggtcaagatttataactactatttatctactattcatgtttgttatatactccccagtttaatatatgaaaaagataaattaattgtataactataatgggatatacaatatatgtgtgcaacaacgtataaggttttggtcgcctactgtacatgagcttatttagaaagtgtattactcaatgctccaagtgattcctgaatatattatagtttaattatacattagctagtttctatgagtgatattgtatatgtgatgcgacaagtttaagcactggttctattgggtttctaataagtggtaatcaatttaggcatatatatgctattctatatggtattgcatcgattaatttacttagtgattcctccacatctagctctgttattattctcctaaacaggttaaagattcatctatgtgtgtttatattttagttacataatcacaaggctacacttgatttaaataacctataagccataggtttaattatatggccgtcgaatattaaataagtagtagtattttcctatacatccattcatttgagacatcacttaaaattagtttgtgtggttgttacagtggcaagacatgttagagacaaatgttattacatctactctactgtacaatactaattctatttattagcatatttttaagttgaccataacctaatcatatgatattaattatttaataattataaatatattttatttaatagtaaattatataccattggaaagcttatgaatttagatgaatttaggttcgagtttcactcaaatcggagttaaaatgagcgagttatgctagtttaaagattcaatttcgaattaatccgagaatattgtgaaaatgcactgttcataaatgatttatttttaatcggaaacattatccaaaacccactgtggttgacatgtggaaccggtcccggttgacttagggtcaaacccaatttcgatctatatatcctaaactattttgcgggtataaatattttgttatcataagtttttaatttaatctacccgagcattatatccatataataggctagaaatttctatcgcgatctaaatattggatggaaccctaaaattatcttataatattatacgatttaatttagtctatgactaaacgattaaatgtaatatacgtctgaaattcctagtgattaaatccgaatttctaccgtgaatcgattacttatagagattacccaaaaataatctataatagtctataagaattcatctaattgtttagttattaattacatttaaattactaccgcgaattgatttcttatggaaattaccaagaataatctataataatctatgattatagtatcattttgcaaatactacactttagttaatcctataattaattccaaatattttaaatatcctaaatctcctcctaattcctatttatttcccttttcttttcctcactttctttttctttttccttcctttctttttcttttctttttctctttttctctcttctctcttttcctttccttttctctcctccctcccggcttctttctacctctctctctcggctcttgctctcccgggcggtgacggcggtgggcgcgaggtgagggggggggggagggaagacggctcaccggcggcggcggtggcggcgacgacggcgacggcggcgcagtcgcggcacggtgcggcggcggcgcggcggcacgacgacgatggtgcgtggagaaggggaagagggagaggaggagggaatggggtggggtggagaagggggg

SEQ ID NO: 4239 - DNA, 11114 bp, Oryza sativa
ggtaattttccaccggtagaactcaaatccaggttgttacttttcaacatgttcttggcattatacaaattatcagtctgggtacacaacaccttgcagcaatcaggaaatgtagaatgaccaagatattccacatcaggagaattctaaaaaaaaaagcagaaaaaaataattatagaaaaaaagtaacttaggacaatatataaatatagtcaacaagaataagaacatacagtaacatcatcaaaacgcctcttcttcacattctgaatacaatgagttctgcttgttccttcattattatttataccaattacttgaacaggtgaattgtcaagacagtgaaaagatataccaggctacaacaaataaaaaaaataagagaaagtcaaaaaataaagcatacagaaacatgacatcacaaaatctattcaagaatttttaaaaaaagaaaagacacaagccaataaaaaaggaatacctgtgatgaagaggaagtgacatatcgagggttaagatattccttttgacatgaaagtgacttagcataaccaacagcttcatcttcacaagaatcaattaaatcagggaacaatggtcctcttttgtcatcattgttgagttgagataatcttgatttaattttatttgcaacattcctaacagcagcaacagcagatacagtaggacctgaagctggcaaaataactatgataagaactaacagaatttacaaattttcgaaatagaaaatttaagataaaatctagcaaagaaaaatcacaaaccagatcgagaatgttcaaatcgtgaattggagttattagcatatccaacttcaggggttagtaagccttgatctaggcaaaaataaaaaattaacagcaacgcaaacttaagaaaataaaaaattaacaatgcatcaccaagtaccttttttaaagtttggtgaaagggaaaatctaacagcagatttagagacaataacagaatcatcatttacctaaacaagaacataaagttagaaaacttaagctaaaaaaataaattataatcataagaagcagacacatacccccaattccttatcatgagaaggtgtatggcgaaaacttgtttcattagctttactagcaacagatttattggtacctaaaaaaaataaaacatcaaagaacatataaatagaagaaaaattaaaaaatataataaaattaaaagaacatagaagaaaacttacttccattgttatgagcatcacaagggatttcattttcaacatcaattgcatagttaggctgaaacccagggttgatatcatcaaaaattaagttttcatcaggatcaccaccatctctagaaccagcatgttcacatagcaagagcataatgctgatagcaatatcttcacaagactcactgtcaacaatgtgattggcagaacaatgactaacaaccattgaataaattttctccttaatgaaagcaggtaacatggtaccaatagcagactccaatttatctctgaatgtattaattctattttcagggggtacaacctaaaacaaggaaaattttaggttgtaaagataaatgaatgataagaattaatttataaaaagaaaaacacaagtaaaaataaataaaactaattgaactgaacatgtaccttgaaataagttgtatcattgaaatccttaatgggcctaaggccaaagttttcttcatcaactttgtcaaggtcagaatacaaagtaatcatattattcttccagtgagaaattctaggaaaaccaataggaacattcttgtcaccaaactcaacataatccagataaagcacctagcaaaataaaatatgaaaaagcaaagaaaaattaattaaaaaacaataataatatggaacaaagagaatggaaaaaaaattaataacttactgcccagagaaaccagcatccacccaaggtattaaacttttggatctttttgatggaagtcatcatccattcgtacacaaattttgaccaatcatatgaccgaagctcatcaacattctcaaacacagtcaaatacttggtgctagggaccaaagaagagtttggacaaagaaaacaagccattgcaacaatcaaaaatgaagtaataacttcatcatcagagagagtttcctttcggatgaacatatcaccaaagaatctcacagatggaagagcgctcttgccaaactttgaaagaataaaagactttccagcatcacaatcagttgggaactccataccaccaataggcagacccaaaatatgatgaacacattctttattaattgcaatgactttatctttcaaaacaatttgagaagacttcacatcaacatgatttgcaatccaagaagcaaatttgtttgggacataagcattgtcaaacatcagcaaagaattaaaaccatagtcaccaataatacgcttctgatcaggagataaagaagatagaactgttgagaaatattttgttgagaatctgctatatgagggctcagtcttcgaatgaactttagatttcttatcctaaaaaacaagtgtagaagtgtgttaaaaacttatttactaaattagaatatttaaaagctaaaagagaaagaaataataattacaattacatataccagaacagtacattagcatgaataaaaacaaaaaaaaatcatagggaggtagggagtgagggggtaaccatataaagcctaagaggcaaccatatacactcatgaacagaaacatataaaatttggtcccggctgtatagcctaacatttaaaatcataatatatctgaaaccttactagtaggaaactaatccaagcaaactaacacaaaatcacacatcaaaacagatatacttgagatagcacccaatcttaatagcaccatccatgctgccatacatatgcaaaatcaaacactagaagtagaaattacagtgatttgaaattaaaattacaattgtaaattcaatgcatatagcatgtaagtgtactgtaattttagtagaaattgtctgtaaaattttggaaacctaaactaagctataagtgcagaaaccatcactactgactattattttgcaaccttacaaacctgcacagccccgaaaaaaagtttaagctcatatcatattaaaatctgctgcgtgtagaactaaaaaaaacacttgagaaaactaatccaagcaaactaacacaaatcacacatcaaaacagatatacttgagaaaaaattagacacgatgacacacaaaaaaaaacatatccataacacgtgttatggtggctatgtttgcataatactagattgaattagttacatgggaaacatgaatatgacgtcgcatgcatgaaagctaccaaggatacttaggtgcaggatatgtgaaagaaaacaaagaaggtattagtgccaaacaacgagagaagaaaaaacaaaaaactcaacaacgttggctgcactgaactgtgttgagagaatagatacgaatctgtatagtcacaactacaacctgaaaaatactcacatcttcaacataactaatagtagcctataatagcatggtagcaaggttcagagtaccgcattgtacacatggaccaaacagaacaaatataaaattttattttgcaaaaaaaaaaaacagaacaattccaatctgaaaataactatccacttcattagtactacatttcctttgaccgaattaattctccgtttcattgataagttaacacaagattataagcaacaagaaacccaataaaatagaacaaataaaatgccatgcataataaaatatgctaataaaaaaaagatacatacaatgggattgtgaaaattgacagaagaagtgtcaaccaaattctttttcacttcttgaacaatctacaaatatgaaattgagcaacccattaaacaatataaaattaaattaacacaactcaacaaaaaaatattcacataccattttcctgagcacaacagagagtaaaccatcaatttcaccatgttcaggaccttcatcaacctaaaaaaaaagaaaaataatgtaataccaaattaaaggtaaacttaaacagcataatacaataataaaaatttaaaatataacttacatcattaccaacttcataatcaacatgaaaatcttcacctccatcagaatcaacttcaatgggatttttacccaaccttgatgtttggacacgaggcatctgaaagaacaataaataaacatcagcttggacatgagttaaaatgaacaaacaatacaaacttcactttacaacaaaaatcatacataaaaaacacaatcatgtagaaacttcactttagcacaagtacaacatccagatccatttacattgacataaaaaatataatcactgtgaagctttacaaagtaatgaacacatcatgtatttgctggctaccaaatttagtaattcagtaaaaaaattcactaatacaaacataacaaaaagccatgtcatgattctgaaaaattgcttcacgcctagaatttgccactaaatcacacatcaacaagcacaaaaacagaaactggatttgctaagcaaaaagcacccctaaaatcaaaagcctcccctaaaacccccgaatccgcgcgctaaacaaccattccccaactcaaaagcaacgctctgcagcaacaaaaacaacaaaatctcagatccattccgtgaacgcttcccacagcctaggaagaacaaatctccaaacctggaaacgcaacttggcgaagcagcagcagcatcacgatttcaccgaccaaaaaacattggatgccacacaaaaacgatgagacaaactaaacaaaactacggcaaccaacgtctccggcgagctctccatcatattacatcgattcaaaaacaactaaagccgagattgaaccctaacacaatttgaatcggacctacactgaatcaaatcgaacaaaaacaactaaaaccgagattgaacccgaacacaatttgaatcggacctagactgaatgaaatcgaacaaaaaaaaatctagacactaaatctcgccagcgaccaacctctccggtgagcaaatcggacctacactgaatcaaatcgaacaaaaaaacaactaaaaccgagattgaacccgaacacaatttgaatcggacctagactgaatcaaatcgaacaaaaaaaaatctaaacactaaatctcgccagcgaccaacctctccggtgagcacgcacaccgacaagacagtcctctccggcgagcacttacaccgacgagacaaacctctccagcaagcactcactccgacgagatctctctctcgcctcgcggagaaaacgagaagagaagagaagaaaaggggaaagcgagagagagaaatgcgaggagagagcgggatcagcgaggggaaataaaaaacggctacggacaagcgcggaaatcgaaatttgcacagtgcaaagtaatcgggccagggaatccaacgcgaggccctatccacgtatgaccacgtccaccccattcctggcacaaatctcggcgcagatccaacggcaacaaaaacgggaaatagcaacaaaaaaatcacccgacagattcctagcaaaatcgtatacatggtatacaatgaatgttttggaagttgggccaaatcatgagcacgtgggctacaccgttgacttctgggccttgttgctgtccgtctcatgggctgcctcttctccagttgggccgtactggctgaggcctggagcctggagggcaatgcaaagcggtttcctgaacggtccggagccgccctgagatgcgatgggtagaatcgtggatatataataaatcgaagacccaccgattggtggactcgatccggagcgaggaggtgtcgtcgctgctgctactgcctaccatggagggctcgagtaagcttcccaccgattgttcatctctgctgcattaggctagtgttccggccggtcgccggcacctgtaacttgttcttgatatcacttttccatccgttgtctcatgccacaagaactcccataattttagagttgatttgggggttttctattttccagtatatttttaaattgctaaaataatgtatatatatttttaaaaaaattgcttatattttttttggcaaaattccgcttataacaagtataagcaataccatgaggctcaaaagttatttgaccgtaagatcttcttcactttggtggatagcaaagtgtgctcattctttctgtatgatttgagcaggctagtgtagtgctccagcaatattccttcttgttccaatgtggattatatttgattatatcagaacatttaagattaagaattcagtgatcaatcaacggtactagccaatctgctcatgagtcgccatgtttagagaaaccaataaccatactccgcaagaaaaagttccaggtgtaaaataaaagggaaaaatgttaagctcgtgtgctttagagcaagtattaagtaaagccaactatgcgcttatagctcatattagagttaacatacatggtagatgagctttaagcttatttttatttttcttcttctctctctatctctcatctatgcatttaatgtatttatcttgaattacgtgaatagttagctcttacatgggagctagctctctttattttttaaactattatacttgctcttagtttcttatttttcttctgttattatctgcagtattgatgaccatatatgacatgctgcagatgaaaaggtgcacactaagccaaggagatgataattttcaggttgataaaacattaagatattcagggccagacctcccagaggtatgtggctttatatatttcttatggaagacttatataacaagtaaattatcactatccctactctaactgggcatgtgaagttgtgaactatgcttgctaaatataaattgcgtgaacagatagtcaagtactttattgcttttttttttactgacattcatagtatgctctagtttcctcataactaatacacgatcacttatgtggcaaccataaacagaacctcttttgtttttatggggattaaaatgtaaagtttccaaaaaaaaagaaagaaaaataacatggaccaaccacttcctaggaagagttaacaaatcattgtctatcagtttggtgcagcttatttatccaagcaatgttactcagagcacctagggtagaatgttattatactccatatgttcatattgttacttagttggtgtaatggtttgtctttagagtccctaacattcaacaattatttccgtgcttgtgcaggacatttggcatcatatccattccctaatgccattgcgagatgctgcccgtgctgcttgtgtatctcgtgcatttttatgtaactggaaatgccatcccaacctcatcttcactgaggaaacactgagcttggaacaagatgcacgtcgaaagggtggtaaagcacgcgctttcgctagcaaagttgaccacattctgaaaaaccactcgggcattggtgtgaagagactcaagcttgtaatatgttattctggcaagatcaatgtaagttctctcaacagttggcttcagatagctattacaccggggattgaagaaatcacccttcttctgcctacaaaatatgagggaaggtacagttttccactctcacttctatgtaataggagtggaagctcaattcagtatattcacctcatgtattgtaacttacgtcctacggttggccttggttgcttcacaaatctgacaaagctgtttttatggtttctgtgtattacggatgacgagttagtatatcttctttccaagtcttttgctttggaggagttggatctcagatattgcagtgagataatttgcctgacaataccatgcctactagagagagtcggttgcctcactgtatttgagtgcagcaatctgcaaatgataaacagtaatgctccgaaagtttccacttttacctttagtggtgacccaatagaactctcacttggagaatcatcgcaagtgaagaagctagatatgagctgttcagatgtgcccaacttcatatattattccattaccaagcttccctatattgtgccaaatcttacaagtctcaccttatcttcagttaatgagctatacatattagatatctttgtgatggcataatcagtaatcatgcactcatctcctgggatatgattaatttttacagggtattaatacaccaacagtagctgccaaattccttcatctcaagcacctggatatttgtcttgatgcagataaggccttgcccccagaatatgactatttgtctttggtttcttttcttgatgcctctcctgttttagagaccttcatcttgtgtgtaagttatcattctttctgctgacatctatggtaaaccaatttaaagttcagttttggggattttttctggtgtgttgttcacagccacacacacactatttcacttagctacatatgcaagaaggtccccaatacaagagcatattacatcaacactccccctcaagatgggcaaaagatatcaatcatgcccatcttgttacacattgactcactctcactaggacctaatcccttggttaaacaatcagctagctgctcagaagatttaatgtattgtagtctaagagccccactatcgatcttctctttgatgaagaacctatcaatttcgatatgtttggtgcggtcatgttgaactggattgtttgcaatgttgatagcagatttgttgtcacaatgaagcaccacggtattatttctgaacaaccgtagctccaacaatagattcttcacccacaacatctcacttaaactcaatgccatggctctatactcagcttccgcggtagatcgagccactaccgcctgcttcttgcttcgccaacagacaacattgccacccacaaatacacaatatcctgatgtagatcttctatcatccacactgcttgcccaatcagcatcacaatatccttccacatccaagtgttggttctttctaaaccacaaccccttaccaggagttcctttcaagtacctcaagatcctatgaaccacctctagatgagttgttctaggatcatgcatatacctactaaccacactcaccgcataagagatatctggtctagtgtggcatagatatatcaaacgtccaaccaacctctgataagtttccctatcaactggatcacctgactgtgcactcaattggtgattcctatcaatgggagtagcacttgtacgacatccaagcattccggtttctgttaacaaatcaaggacatactttctttgagagagaactatcccctttgatgatcgagcaacctcaatcccaagaaagtatcgaagaggtccaagatccttcacctcaaaggcctctcctaatcgctgctttaagcatttgatctcttctacatcatctccagtgatcactatatcatcaacataaacagccaagatagtgatgtgtgtccccctatgtctatagaaaactgtgtgatctccattacattgtgaatatcccatattgcacaatacacgcctaaacctgtcaaaccatgcacgtggggattgtttcaaaccgtacaaggacttcttgagcctacataccttcccaacagtctggctatttccaaatccaggggggaatctccatatatacctcctcttgtaaatcaccatgtagaaaagcattcttgacatctaactgatgaagaggccatccaaagttaactgcacatgatatcaaaatcctcaccgtactcatcttagccacaggtgcaaatgtttcatcatagtcaattccatatgtttgactataaccttttgcaactaatcttgctttatatctatccactttcccttcaggggtttgcttcactgtaaatacccatttacatcccactgctcttttccccattggtagtttcacaagttcccatgtcttattcttttcaagggcacgcaactcctccttcattgcatccttccatcttggatcttgttttgcacatctccagtcctttggaataggcactatttgcaatgatgcaatgaatgctttatatgcaggtgaaatatgagagtatgagatatagtttgcaatgtcatgtctagaactaaggtgttcaaaaccaaggcgtataggaggtcttccagcattagatctagtttctctacgttgtgcaagaggtaactctacttgttcaaggtaggagaaatgttaccacttgtctcaaggagggaggaacttgttggagagaggctagaggaggaatctgggactgggtactcaaactgttgcagctgttgtgactccttgtcttgctcttgcataggctcaccacttctctccccctgattctgaatttggctcctctggtgcacttgctccttccctgtcaccttatcaacttggttcttgttccttctttgatatactctcatttcagtttgttgtacttccacacgctccagaggacatgggattgtcccgacaactaccccctcatccttgtcacaactaatgtctactaccttctcaccaatgtccacaaccttctcaatagtatcaccaacaaaactcggaattgacccaataaccacatcctcatcaccttgcttatgtgcatcaacctcaactatctcccccactcgactgtcgatctcgatgacagttgagaactcctctagaaattgatcaaggtctcctcgactcctgtaataaggttcaaactctcgaaatgttacatccatactaacaaataacctcttcccaatagggtcccaacacttataacctttctggttagatgcatagccaacaaagacacattttactgcatgaggatccaacttgccaacaaaaggtcgatgatctctcacaaaacaaacacaaccaaatacctttgggggaactttaaattctcgcttcccaagtaaaagttcagctggtgatttcataccaagtatcctggatggcatg

SEQ ID NO: 4240 - DNA, 580 bp, Oryza sativa
ccgcctgcacggctggcctattatgccaccgttgttgggcgtctacatcttcaccgccggcctgcctccgtcgccgccgattggtgcctccgtctacacggctggcctattatgccgccgttgttgggcgtctacatcttcaccgccggcctgcctccgtcgccgccgactggtgtcttcgcctatatggttggttggtcacaccaccgttgttgggcgtctacatcttcaccgccggcctgcctccgtcgccgccgattggtgcctccgcctacacggctggcctattatgcctccgttgttgggcgtctacatcttcaccgccggcctgcctccgtcgccgccgattggtgcctccgtctacacggctggcctattatgccgccgttgttgggcgtctacatcttcaccgccggcctgcctccgtcgccgccgattggtgcctccgtctacacggctggcctattatgccgccgctgttgggcgtctacgacttcaccgccggcctgcctccgtcgccgccgagtggtgcctccgcctacacggctggcctattatgccgccgttgttggatgtctac

SEQ ID NO: 4241 - DNA, 3510 bp, Oryza sativa
tgggcatggtccccaaacatcagaatgtattaatataaaaggttcacaactacgaagaccaattccagcatatgtagaccgtgtatgtttgccaaactcacaagcatcacaaacaagtctactcttgtccactttggtaaagaggtcaggatacagcttactcaaactctcgaaagatggatgtcctaattgacaatgaagcaaaataatctccttctcagtatctcccactactacagccaatcccatctcctcttgattgatgtaccacagcccattacgcctgactccagtcccaatcctcctcccagtccccttctcctggaagagacatgaattctcatcaaatataacgatgcacttgaattgatcaatgatagaactaacagagaggaggttgactagaaaggaagggacatgcaaaacagatgacaagctaatagatggagtgcactctactgaccctataccatgaatgagttgagatgaaccatcagcaatttggatagtttcagagggagcaataggggagtatgaggagaaattattaggcaagcctgtgacatgttttgatgcacctgaatctattatccagtctacatgatgtctatatgtggatgcaagtgcatgtgcctgagtaccttcgcccgtgtgggcgtagttggcaaagttaccgaagtggctggttgttgctttagcagaattttgttgattggagtccacggggcccttattcttttgcattcctcccattgtgcagcttgttcacctgttagagtgatagatgagctctcccccatgacaacattggccctaggaccacctaggcctctacctcgacttccaccacggcctccacgttcacctcctcggccacctcggtctcctacatagccaccatagccaccacggctcccattgaagccaccatagccaccacgtgctcctccacgagctacaccccgaccattattgttcctaggagaaggacaattgtagctcacatgcccctttaacccacaattataacactccctgtcattaattgtgatgtatgcagacctcacaggattacttcctttcatcactttctgcctcatctcctcctgaaccatggctgaaatagcttcctccatattaggtaatgtagcttggtgaaacatagctgctcttctatcctcaaactccttgttcaacccctttaaaaaatgaatgactcttctcctttgcagccatttatttccaatcacaatatcatcatcatgctttaattgtaggggattataatgatcaagatctgcccataaatgttgcaactcgctggcatactcttgaactgttctcccttcttgcttcagattatctaccttgtcttgagcctcaaccatcatcataacatttccctctcctgaatacatgttgctcaatgtcttccatataattgttgcattctgaatagcttctatcatcctagcaatagatggggacaccgaagtcatcagccatgctaccactgtagaattagtggcattccacatcttccattccacactagatttatcaataggttcaacacaagtttcctccaaataatgttctacaccttttgctctcagcatcaaccttgcccttctagaccagctcaagtagtttttggtcccctccaacctcacttcatttggcattacttccaattttatctcagatggtcctatcccactcctaagacccatcatacctgtagctatgaggtcctacaacagacttttcatctcacctttagtgaaaaaagaagattctcctgccacactttccttcttcccagcctgcagtgcagcatcctcctcagcctttctttgttcttcagtaccctcggtgttcaccatcttctctgcactccaaaaaccactctcaatagatcactggtaccccacttcccttgcttccccttatcaacaatggtaggaaaaactctcctctaatcttggataaaagaaaaaaggaccaggcttcttcccctcacagaccacaagtcaaatgctcctccatccaggcagtagccaaaaaacaagcaaaaacaagagacgtaccacctccttcctagttcctgcagcaaacaatcctcctatgtcaccaagtctgcagccaagccaccatcctccttttcccttagctgagctcctcacatttcctgtgtgagcagcaggttacaacacacgcgctgcgcccgcgcggccgcgcgcagcgcgcgctcaccagcccctcaacgtggctgtgtgtagaggctggtcaggccggatgagagcaggggcgacgtgcgacgacggcagcggcgacggcggcggcgatggacggcggcggcggcgacagcaagctagggttagggctctgataccataaagttcagttttggggatttttttctggtgtgttgttcacagccacacacacactatttcacttagctacatatgcaagaaggtccccaatacaagagcatattacatcaacacaattattcaagtgccattatttttttattttatgcaggtacaacaacatgacatgaagcatgagtgtgtttctgaagatgcctcacatacgaggcaaatgcctgaacacaagcattccaaccttaagaatgtgatgatccttggcttctgcactgcaaagagcatggttgaactaacatgccatgtcctggagaatgcaacagcctggttgtttagttccagtccattagtgcagcaagcgggagcagcttgagttaccataatcgtgctggtggaactgaaaaactgaaagtgtttgatgtgtccatcagtacgtttatgtgccatttgtttggcacaagatagtaccaatatatagtcacagcaggctgcagtcatcaacagattaagatatcctgagtatttttttgtaaagaaataaatttggaacttttattcatgtagcattttcaaagcacaatgtgccatacagagtacattaacattcaaccaacattaattatttaagcatggattattcgtctatggaaatccttattcgcattgacatggtcagccgctagttcggaggaaacgtaatcgggtagaccggcgtcttgtcaggattgaagagcccaaaatgcctctcggtctcatccccgggcttctggttctcgttgaacatggcgaacacgtacgtctccagctgcccgggccgcttcggcgtcccgttcttgacgttgtcgatcacgccctggttgtgattcctcgcgttctccacgttcgccgcgaaccctcccgccgacggccacccgctctccgacacgacgacgcggacgccgggcgcgccggccttctccagcgcggcgtacacggcgtccaccatggcgctgaagaggttggtgtaggtgaggccgctgtcgttgtccctcaccgtggtgcccggctggaacgtggcgtatttgagcgggatgtctcgcgggttgtccctgtaagccaagtaggggtacacgttgac

SEQ ID NO: 4242 - DNA, 502 bp, Oryza sativa
gcaaggccggtccggcagaaagtgcggcggcaagccccggaacgtcaagctttcaccgcgaggaggtggctagacttttggaggccgggttcattcgtgaggtcatccacccggagtggctggcgaacccggtggtcgttcccaaggcgaacggcaagcttcggatgtgcatcgactacaccgaccttaacaaggcatgtcctaaggatccttaccccctgcctcgcatagatcagatcgtcgactccactgcggggtgcgaccttttgtgttttctagatgcatactctggttaccatcagattcgcatggctagggaggatgaggaaaaaactgcgttcattacccccgtaggaacctattgttatacatcaatgcccttcgggttaaagaatgcaggtcctacttttcagcgtactactcgaatttctttgggtagtcaaataggacgtaatgttgaggcgtatgtcgatgacttggttgtaaaaacacgcaaccaaga

SEQ ID NO: 4243 - DNA, 603 bp, Oryza sativa
ggaaggtggaacgtgtgcgtctcaggtctccagcggtctacaagagcggcaaggagtgaccggtctgcatcccaccgcttcgctgggtcacggtcgtccgccgccgcctcaacaagcctacaaagtggtagaaggcctgccgcacgcaacctgtatagagcaaacttcaaacatcagtgcaaaacaaagcaaagttgagttcaaatgtgaacatacgcgtaccaaggaacgtgacgggggtcgacacgcaaccactcgcgcgacgtgcgtggacggaaggtgccgagctgtgcaccctcgactgctgacaggaacgagcggtggttcctgtcaatcccacggttcaatagcgccggtgtgtcgtacgccatacctgcatcaaataggttgatcagaaacatataaataattagttcaacataagtaataaatgttcataagcgaattactaacacatattaaacaaaagtacaaacaaacaaaagtgtttagtccgaacactaatcacgataacattatgacacaacaccgaatagttcgcaatactactagtacaacaatagtcggaggtactcattacaacaagattgaattgaaattaca

SEQ ID NO: 4244 - DNA, 512 bp, Oryza sativa
caagtccccggtggttccatccggcaaacggcgaggtgaggccaagcagaaggcccccgctgttgacatcgatgatggtgatgatgacctaggtttccaagaacctggggccaccattgccaccgtcgatggaggagcgtgtgctcacgtctctcgccggagcttcaaggctatgaaacgagagcttctggccatggcccctacccatgaggcgatgcgtcgggcgcggtggtcggaggtcgctctcactttcgaccagactgaccacccaccgtgcattgcccggggagggcaggttgcgatggtggtttcccccaccatctgcaacgtgaagttgggacgtgtcctcatagatggaggagcggctctcaacatcctttcccccgcggcctttgatgctatcaaggccccggggatggtgctccagccgtctcaaccgatcatcggtgtgacgccggggcacacgtggccattaggtcacattgacctaccggtcaccttcggtggacccg

SEQ ID NO: 4245 - DNA, 661 bp, Oryza sativa
aaattagaataaaaataaaataatatctaaaactagaaaaaataaaagagagttcaaataggaatacaattttgaaacaactgaaattgaaaataaaaaataaaaacattaaaataacacaatacgatattaactaaaattttttaaaaaaattctgaaattagaaaatgaaaaataagatatcaattaggaatacaatttataaataactaaaatttgtgataaaaataaagattattgaaagaaaagaccatctaaaacacatgacaaaataaattaagtaacatgcctataaagaagtagagtggtggcggttgatatgagatataaaaattgttaataaaacaccaaatagaatcctaatgacgattaaaaggagagacgtcaggcaggccgtgaagcaaatgagtaagacgattgccgggacttctagaaagtaaaaaaaaatcaattgataatcatattcaatttttaaaatttcaatgataataaaaaggagaagcagcaggcggggcgtataagagtatagttgcagagccgccgacggttgacaggacttctagaaaataaaaaatgaattccaacgacagttatgtttgatttttagaatcacaacaataaagagttggcggcggacgggctgtagaggggcattgtagca

SEQ ID NO: 4246 - DNA, 912 bp, Oryza sativa
atgctggagcaacgtccttgtgctgaaatttctctgatagacatgcatgtgaactgaaattcgtctgtttgtgattgggtaaaagaaaggtagacttttttttaaaacagtagaagcctttctttggggcatactgtataatgagagtatgagactaatctattatttatttattttttttgaaaggagagactaatctattattaatttaggatggtaaattacaggctcaaatttggttttcttttttctctacctctgaattacctgcttaaggccttggattctcctttgtttctgaaatatttgtgtgctagaaaagtagatataataacacattataatttgcgtgctttcagttagttttaagatttttgatagctattgtgtgtacatacaggctatcttcaagccaccaaaagcgatgcgaggtggaattcccatatgctttccacaggtactgcaatattccctatatgtttgcagtgaaaagtgcacatctgcaccagtttgggagatggattttcatcccttgaggggatgcaattttacttctgaactggtgaaaaaatgaacgtttttaactgtaaaactttgtcagtttggaaattgtggaacattggagcagcatggatttgcaaggaacaggctatgggccatagatgatgaggctccaccactaaatcataatgataacaacggcaaagtttctgttgaccttctgttaaagccatctgaagatgatctcaaatgttggccacactggtatgataacttattctggggacatatatatttaactgtccttgagtagtttgtctgttacagctaggtgagtaaaatgtccaattctggttagctagtgtgtcagggaggtggttggttaaatagctcaggccataaagtaataag

SEQ ID NO: 4247 - DNA, 812 bp, Oryza sativa
  unsure (1)..(812): unsure at all n locations
acggtttccatccgaatgacacttcgatgggacagcccacacctacctccactcccggcggacacgggcgcaacgtgggatcgtggctgcccgttgctgacgcgaccagtgtcagactggtcattcttgtccaccatgtgtcattttaacaagatgcatgtttgcccttcttcgtgtaacaccttgcctgtaatggttaggataaagcctggtataaatctaaccagggctaacgtgccatctctaagagataacacgctagctccggcttgagacgagttgcctagaggctttcgtcttgacgggatggggcaaggcgtgcgtcagaccgccagtcgccacctaacccttgatctgaccggtctgtgactggtcacagaccggataaaagagcgtgctgtactgcgttacatgcagcgtgacacgcttgaccagactgtaataaatgctgttaggtgagcacagctgtgctcacttatcccatatatgtggcgcagacttctttaaggggtcggggtgcctcggccataggggagagggcaagngaacccgaccccccctcgggggaaatcaggaggagggcggacacctcaccctcgggcccgacgtccccgaaggtgccaggccacgcgggcgattgtgtctacctcaagcctctggtcatgatactcccggtcccatatcaccgacaggaacattgagcaaagaacacagacttacggagcaaagcaactacactattgattcaaaccatggtgtttatgcagctgcataggattgccaggtcctaattggctgattctgccactaac

SEQ ID NO: 4248 - DNA, 1614 bp, Oryza sativa
ttcaaaaatagattaatttgtttttttaaagcaactttcgtatagaaactttttgcaaaaaaacacaccatttagcagtttgaaaagcgtgcacgcggaaaacgagggaaaggggttgggaaacttgtggaaagaacacagccttaattactttattatggttacttttgttcagagctgcttgtttagtattacatgcaagcatttattttcggttggactaccagtgtaatactccttggaatatatgctctatatatttttaaacgttcttatgatccataattatttttcatatacgatctaaataattaaattaaacgttcaaatatagtacggagtaagtatatacttaggcccatatttcgggtattgtgcaaattttacgtcgactaaaattaggcccacgttgagttgtagctgttccaacatttgggccgtaaacaatttcgctaggtcttttgaagggcctgacatttggcccacgtacaaacttttatctgggcactggcttcttccctcgaccgcaacggtgccggctgggcgcggcggtgggctgggcgaggggctctccggcggagaaaagagcggccgacgcggcgacggcgaggcgtcacggtagcggctgggtggcgggggaggatcttgggcggagagaagagcagccgccgcggagagggcgaatccccctccagctcattccgtcgacgggtggtgtctccttcccccgttttttttctcttttgcatcccttcgttttgctcgtctcttttcttataaggaagcagaatgtttatctcgtcgcttaggtcatttggttcagttcctatatatggttgtccttgcgtaagaaaatagtaacagggagagtcaatgattatactggaatcgactggtttagggatgtggaaatttgggagttttcttcgattgctgctgtactgattaatcgcaatgcgacttgcagaaaatttaatgcgccatagttttggtctcaatatataagtatataaccagcgcagtatatgcgaatttgagggttttgtgttcactcgcctccaaacaggcatcgtagtttacaaaaatggaaaaccaactactaaaatcaaaatcaggcatcatgtcatgcattattgacatggcgcatgattcatgtattcatggttgttcagttgagttcgccagggagggactgtactccataagctgtgcaatgtgggctgctactggcttgcgttgaatggggctagttgctacaaaagataactcaattttcaggtgtcaaaataaaccacagattttaagaaaacaattgatgccaaaactagtacacgtgctagagcctggcacaggaactgcaatctatatattaccagttatgcattgttcaccccaagagatgataatgggacaaatcatcattagaaaagcaggcaaacatattacaatgcagtactaatgaggttggccgtgtacatccggttggatgtagaggtcgggtttattccattttctaaaaagaaactaatgaggtacaattacaatagtattttctcatctcagaggcaaatcgtgttctttctagaaaggccatgtgcacattcacttttttct

SEQ ID NO: 4249 - DNA, 883 bp, Oryza sativa
ataagtgagcacagctgtgctcacctaacagcatttattgcagtctggtcaagcgtgtcacgctgcatgcaacgcagtacagcgcgttcctttatccggtctgtgaccagtcacagaccggtcagatcacgggttaggtggcggctggcggtctgacgcacgccttgccccatcccgtcaagacgaaagcctctaggcactcgtctcaagccggagctagggtgttatctcttagagatggcacgttagccctggtcagatttataccaggcttcatcctaaccattacaggcaagatgttgtgtgaagaagggcaaacatgcacgttgccaagattacacgcggtggacaagaatgaccgatttgtgaccggtctgacactgaccatatcgtcagcgcacagccatgttcccacgacgcgctcacccccggcggaagtggaggtaggtgtgggctgtcccatcggagcgtcattcggacagcaaccgtgctgatctccgcccattcaagagaaaaagaacagtccagtttggaaagagaagggtgcatgtggtatccccttgaagtataaaaggaggaccttgcccatagagagggggttgttggttgattctttcccagattatgagcttagaacgggggagaagtcagctcacacttgtagctcattcatacgcagatccaccaaaacacaggagtagggtattacgcttctcagcggcccgaacctgtatagatcgtcggtgtctcgtgttttctggctggcatacgatatttccacatacagagagagcgagagcttgagatttcaccctaagcccccggccgaactggcaaaggggggcctgcgcggtctcccggtgaggagccaccagctccgtca

SEQ ID NO: 4250 - DNA, 633 bp, Oryza sativa
ggatgcccgcctcaacatcgggcgccggcgtaatagccggcgtactccccgcgcaacggagggcgcctcttcgtccagagtgtcacctcgacatggacgtgaggaccagccctccgtgccccggctggtggtgtcggctgtagagcctttgtggcgagtcttcggaatgtccgttggcccccaaggttccggcccaccatcaccgagaagtatgatgggagtgtcaaccccaccgagtttctccaggtctatacgaccgggattgaggccgctgggggtgacgacagagtcatggcgaatttctttcccatggccctgaagggacaggcgcggggttggctaatgaacctgccacctgcgtcggtccactcttgggaggatttatgccaacagttcactatgaactttcaaggcacttatccgcgcccaggcgaagaagcggacttgcacgcggtacagcgaggggatgatgagtcacttcgctcgtacattcagcggttttgccaagtccgcaataccataccatgtatccctgcacacgcggtgatctacgcgttcagggggggtgtgcggcacaaccgcatgctcgaaaagatcgcttcccaaagagccctagactactgcggagctttt

SEQ ID NO: 4251 - DNA, 2927 bp, Oryza sativa
ggacgccatgtactcggcgttggagaaggccggggcgccgggggtggccgtcgtcgtgtccgagagcgggtggccgtcggccggcggctccggcgcgagcgcggacaacgcgcggaggtacaaccagggactgatcgaccacgttggcatgggcacgcccaagagggcaggcgccatggaggcgtacatattcgccatgttcaacgagaaccagaaggacggggacgagacggagaggcactatgggttgttcaaccccgacaagtcgccggcgtaccctatcaagttcagaattagttgaaaggtgttctcgtgaaggaaaatcttgaaaaagagctttttaatttcaaatacacatagctgttgccagttaagtatagtatgagtatccggcatcatgtgtgataagctggtagcagtaacccagcaaattatccgctactgttgttcttcaggttttaataaagcagtggctatatgaaattatgaatgtccatgtgttctactagctagtgtgctgctcgtatgatcttcatcgtcagctttgttcttatatgaacgtatatatgatcgtacatatacgttcttatatgttctttcgtcagccttcatatatacgatcatataatataagaacgaagtgtaacaagttgagatcgatcgagatggaaataataccagctccgtgcctccgtcagatggcggaagccccgccgtctccctctcgtcgccgtagctaagttgatatagtttattgtggccatcacgtgcgaatccgcacactggattaacaagctaaactgagacagtagtaccagaatttttttatcgatttctctaagatttctctccgttttctctgttattcccttattccttttcctttttttctagcttttcttacctttttgttacacttcgttcttacgttttttttagtatttctctgccttttcgccgtttggcagcctacttaggaatgttgtatcattttgacccatcattaacgcaataggtagaatctctgtaccttttcagagtaaaaataaccttcacacctggcgtagctccggccgccgccggcggcccgaaaagcgcaaggagcgagaggaggtgagctgcgcgccaacttgaggacattgtaacgacgctatcccgtcgggtttccgtgaaccgtgggatttgaagtttacggtccacaataggaataagtttactgaggttacttgtgaacaaattcgattttcatcattcaaccagaaaaccagatacgacgggtcccttagctatcaagaggacaatctcctcagcatcaggtcgattccggtgctggttgtcttgctgatgttgttcttctccaccatgcttccgcggaaatagtcgcgcggttcatcagcctacttgttgttgcaatgtgatgcagcagcatgcatccgaggctgattgtaacgctccgcttttcgtgaggcattaaaaactaattcggcaaaatcctaattgcgaaaattttcgttctttgtgtgcgagtctaagtcatgccaagatctcatttcaaatcccgttgttccctctcatcgaaatcaaaatcctccacctcaaattcctcttccgattcaagtctccaaatcaaattccgaaattcagtcgcatcctttgaatcctcgctaaacgctcactcccaatttcgaaaaataccaaactctatcttgagccttccttgattcctccctgaaccctcgagttcgaatatcgaatttgaatccaaatacaaactccaattctctccaaatcagccttctctgtgaaagtctattttacctccctctggctcggtgggccgactcttcttccccggcccatctcctctcagcccgctcccctcctcacgtgcgttgcacgtgccctgcctgagagaaagcgcctctctctcccgcgatctctctctctcgttttctctcgctctctctcgcctgcgcttcgcgccgccgctttgtcgttcaaacccgccaccgccttcgctctttcccgcgcgtgcgcgcgtggccgaccggccggtcgctgccgctgtcagccctgccgcgcctgcgccgcgcagctgcccggccccgctcgccttttgccgacgtcgccactgtcatcgcctggctccgatgcccccatgccgcatccttccaaaaccagaagacagagctcgtgctcctctctctcgttctcacatcctccttcctcccaaaatagcaagggagcaaagctcgtttccctcctcttttcacctttttccttagccggcgtcacgcccgtgaccgcctccgccgccgcttggccgctagctccgagcacgaccgccagctgccaccttgaccgccctaaggtcggtttgaaccgacctcccgcgcgaaccgacctcgcctccactataaagccgagtccctcctctcaaatccctcccactttagtctccaccgctacagtgccatcgccgccttgctgccgccatcctcgccttcctccgccgtcacgtgtgccgggaagccggcgtgcgcgcggagccgaagaggactccggtcgccctctctccctccctttccccggcccgagaccgaggtgatcacgcctatgccgtcggacactcttcccagcgatctcccgacgcggtagcccccgttctccctccccactcttcctctcccccctagcttgcgcgattgctagcctagaccttcccaaacacgcgtggacgctgccccgagccccgccgccacccggcatggcctcgccaccattgccgtccgctcccggaggccgccgctcgtcgccggctctcctcggtgctcctctgtcccatccggcgccggaaacggattccttgaaccccggatatgctcccaccccttttaatcgaacccccgttgctccggtgaagtttc

SEQ ID NO: 4252 - DNA, 573 bp, Oryza sativa
atgaaccaacttgagtcctgcacgtttcggatattggcactctatggctcgatgatgaggggaagagacatttgataaaaacatatatttgttaacacttccatacatactagtaacggaacataggtaacggaatggctgggactgtgccctaatccaaaataagggacaggctttatcgaccactataggagaatctgaacttatgacgttattggtagcctttacaaagtaggatacaaacggagagtgtgcgtgcacacttatatatagtactgccgggcagcacttcgtgggactagactagtaactaccactgtcctgagtgctttattggggaatcaaaaagaacacagctatgtgttcacatagcttctttagcttaattaaacgtactacaagcggatgggatacacgggcgacttgatagggtaggagagcccaaagtttttcttggagggatccccgatcttctggctgtcgttgaacatggggaatatgtacgctctccggcggccccggcctagtgggcgagccacgcccgacgcggtagaacagcccctggttgtacgc

SEQ ID NO: 4253 - DNA, 532 bp, Oryza sativa
tttttttttactttctagaagtcccggcaaccgccttactcatttttgccttactcatttgcttcatggcctgcctgacgtccctctttttaatcgtcattaggattctacttggtgttttattaataatttttatatctcgtatcaaccgccaccactctactcctttataggcatgttacttaatttatatcgtcatgtgttttttagatggtcttttctttcaataatctttatttttatcacaaattttagttatttataaattgtattcctaattgaaatcttatttttctttttctaattttagaatttttttaaaaaaaattagttaatatcgtattgtgttattttaatgtttttattttttattttgaatttcagttgtttcgaaattgtattcctacttgaactctcttttaatttttctaattttagatattattttatttttattctaaattttaattaatctcgtattgggttcttatatagattcttctttcattattgcttattttaattccgaatt

SEQ ID NO: 4254 - DNA, 1046 bp, Oryza sativa
agtcttccgctgcaaatagatgaaattgatgaaaattagtgtttctaaaattaaatttcgaaccaacgggagaatttaattttaggaacattaattatgtgctatgatgttgtaattttctgaccaacgttgttaaatgcaatattatagttatggttatatgtgttatgtctaattctgcccaacggtgatgtaggcttaatgcataatattttaatgttaattttgttctcaccgcacatgattatttcaggtggctactccttgatgggttgcattaaagatattccgaccctaaaaggagataactacgcagaatggaaaagaaaactcgaccttgcttttatcttgggagaggtggactgggtattgactaccccatgtcctatagaacctgctgaccttgtcagaggtgaaagtgagtcagatgctgactggcaaaagagacatagggacaatgctcctctcgtcatgtcgtatgacattgaacaaaagaaatggtccttagccaacaagaaatgtttggctgtggtaaagaatacgattgagcctaccatattgggtcgatcccagagtgtgacgctgtctcagagtaccttgaaagaataaagagtcagtttactggctcttcaaagacttatgctacacagctgatcaagcagcttgtgacagaaaggtacaatggaggtggtgttagagaccacatacttagaatgagcaacatggcttccaagttgaagccaatggatttgggcataacagatgactttctggtccatctggttatggcctcattgccaaagcagtttgacaattttattgtcaactacaacataagtccagagaaatggaactttgagaagctcattgctaattgtgtgcaagaggaggagagaatcaaagaatcaaatggtggttcaataaactatgttaaagataagaaaaagaaccacaagtctcccacctcaaaaggtaaacagtctcagcatctgcctcagcaacaacagttcgctgttgagaaagatcaatgtctccactgcaagaag

SEQ ID NO: 4255 - DNA, 567 bp, Oryza sativa
cagaagatcattgatcccgagggactagatgaactacaggcagaacttgtgagaaccctatgtcatcttgagatgtactttcctccaactttctttgacataatggaacatcttccggtgcaccttgtgaggcaaacaaagtgctgtggtccagcattcatgacgcagatgtatccttgcgaaaggtacctggggatccttaagggttatgtacggaaccgttcacaccccgaggggagtatcatcgagagttacaccaccgaagaggccatcgaattttgtgtggactacatgtcagaaacatcttcaattggattaccacgatctcatcacgaagggaggcttgacggtgttggtactgttggaagaaagactattaggttggatcgtaaggtgtacgataaagctcatttcacggtactacagctgtcggtgatatgggaccgggagtatcatgaccagaggcttgaggcagacgcaatcgcccacgtggcctggcaccttcggggacgtctggcccgagggtgaggtgtccgccctcctcctgatttcccccgaagggggggg

SEQ ID NO: 4256 - DNA, 668 bp, Oryza sativa
aaagaatatatagaaatttagtttatttgctaaagaaggttttataaaaaagttgagaaggaaaatatagtgaaagttaatcttgaataatagaaaccaaagtaaaatgccaaattaaaataagtccaacacattaatattagtttaaaactttataaatagtaaatatataattattcggtgtaatatttcataatatttgtaggaataatgatatgtcattattgtgtgactgttgaaagagtttgtaattattttataattattgtatgactgtcattattgtacgaataattatgtgtgtacgattttttttcatgttatgtagatggatcggcaatggatgtacgctgaccggtggtccaaagagtttattgacggcgtgcattattttttgagagtggccgaagctaacatgcaaaagggttttatttgttgtccatgcaataagtgtaagaatcagaaggagtattctgcatgcaggactattcatttccacttgtttgagtcggggttcatgccaagctataattgttggacatcccacggagagcaaggtgttgaaatggaagaagatgaagtggaagacgacaatattccggactttgctcagtacgctggatttgaatgaaatcaaacgggcgaggaggaaagggatgctgatggta

SEQ ID NO: 4257 - DNA, 578 bp, Oryza sativa
ttgccgacttgtgtttccgtctgcacggctggcctgttatgccgccgctgttgggcgtctacgacttcaccgccggcctgcctccgtcgccgccgattggtgcctccgcctacacggctggcctattatgccgccgctgttgggcgtctacgacttcaccgccggcctgcctccgtcgccgccgagtggtgcctccgcctacacggctggcctattatgccgccgctgttgggcgtctacgacttcaccgccggcctgcctccgtcgccgccgagtggtgcctccgcctacacggctggcctattatgccaccgctgttgggcgtctacgacttcaccgccggcctgcctccgtcgccgccgagtggtgcctccgcctacacggctggcctattatgccgccgctgttgggcgtctacgacttcaccgccggcctgcctccgtcgccgccgagtggtgcctccgcctacacggctggcctattatgccgccgctgttgggcgtctacgacttcaccgccggcctgcctccgtcgccaacgagtggtgcctccgcctacacagctggcctattatgccg

SEQ ID NO: 4258 - DNA, 724 bp, Oryza sativa
  unsure (1)..(724): unsure at all n locations
ttcctgcagccccgcctacacggctggcctattatgccaccgctgttgggcgtctacgacttcaccgccggcctgcctccgtcgccgccgagtggtgcctccgcctacacggctggcctattatgccgccgctgttgggcgtctacgacttcaccgccggcctgcctccgtcgccgccgagtggtgcctccgcctacacggctggcctattatgccgccgctgttgggcgtctacgacttcaccgccggcctgcctccgtcgccgccgagtggtgcctccgcctacacggctggcctattatgccgccgctgttgggcgtctacgacttcaccgccggcctgcctccgtcgccgccgagtggtgcctccgcctacacggctggcctattatgccgccgctgttgggcgtctacgacttcaccgccggcctgcctccgtcgccgccgagtggtgcctccgcctacacggctggcctattatgccgccgctgttgggcgtctacgacttcaccgccggcctgcctccgtcgccgccgagtggtgcctccgcctacacggctggcctattatgccgccgctgttgggcgtctacgacttcaccgccggcctgcctccgtcgccgccgagtggtgcctccgtctacacggctggcctattatgccgccgctgttgggcgnttacgatttaccgccggcctgcctccgtcgccggcgagtggtgcctcc

SEQ ID NO: 4259 - DNA, 745 bp, Oryza sativa
aaaattgcagaccacgcaatttcaagtcctacaacatgaccaacaattttgtagcctttgtatagcctaatcaaatcttcggattttgccaatgcaagatcgacatgaaccattaaaaattcatttcctagctcaacacctccaactctgcgtgttggatcacaacttacaatagtggcaagagccatgtttgtattccgatttttccaactttttaagaatactttagttccaacctgaagtgcataaatacatccatcaatattatcaatgtactttaagaaattcaagtatcataaataatttcacagtaaaatacctccattgaattgtcagtgataaagtccattttgctgcactgttgtttctataaaaaaaaatttggatcatggtttgcaatttaaccacaagatagaaagaaagaaagaccaaacagagccaattattgttctccaattcaatcataatactagtgaatcatgcatgttatagtttgaatggactgatatttgtaaacatggtgaataaaaaaacaaccttgtatgcaccaccaactttatgtgcatgtaccatatggctgtcctgattgtcaggtttcttgttctataggggagggcaacaaatcagtgctaaaattatatatattaagaaattttactttcaaacttttctatcaaataacttttgaactcaataagaagtgaaaactaaccttggcacaaataatctccatctgtttcccatg

SEQ ID NO: 4260 - DNA, 2647 bp, Oryza sativa
ggctaagcacaatttaatcctaataaattttatgtgcccacaattaatattaagagattaatatcatcttaaaaaccaacgtggagggatctcaacttaaataggccgctataagagagcacaagttgcgcagttaatatggtggtgggattgccacacgtgcgtgcgtggtgagcttgagccaagggcatggcgtggctggctgctactctagctaacattatgttttgatggaaaacataaccgacggaggcactcattattccattactccttgattcttctgttcctgcggttaacagacagaaaattctatcgggttgattcaccgacggatgcgctcgttactctttgattcttttgttcctgcgctgcgcttaactgatcgggagttcaattggattgattcttctattcctgtattatgcatgcctctgtatctcattgttttttccattgctacgcttaacggccggggaagaattcaatcggattgattcttctgttcatgcgttgcgcttctatatctctggtaaccgcggcgttgctcttctgtatctctggtaaccgacggaggcgctcataactccagcagcaacggatgcggaattgaatcggattgattctgttgtcactcctgtaacggatgaagaattcaatctcgatttgattccttccggaatgttactctctcgcgcactatataactcctacctccgagatagacagagtagatacaactcctctcttcatcctctcactctattttcttcttggcaaaacactttgtgtcttctgttcctgtgttgcgcttctgtatctcggttccaagcacccgcccgcataggttctcaggacgagcgcctcgggatatccggccgcttgagtacctcccacagtttggcatgcgatcaagttcttggagagttcattgacacacgactgctctctgcactgcatcggttactttctttgcatcgacatgtcaaccggcgtcggcaatggttgaaatggcggcaaccggcacaatgctggaggtgatggcaccggcactagtggggccagaacggcaacaccgatggatgcatcaacactaacactgcctcatccagtaccatagcgttctcggggtatgtcaattttattattgtagtagtaaacatgcatgttactagatgatgcttattttattatcagtatattcatgtttagtactatcactagattattctactacatacacgtcatacttagtatgatgtttttctggattaaaatataccgattcatgactatatttccaacaatctaaaaacttgataggtctttcccgtacttggctttgctgcatcactaaaatttcatgcatttgatggttcaaactataagagattgaaaccacgtgcactactgtggttgataaccatgcaatgcttctttatttttcatggggcaagacaaccgaacgacctttctcgcctgaggaggaggctaagttcgagtctgcagattgcttgttccgtggagcattgatcaatgtattagctgacaacataatggatgtgtacatgcacatgccttcagggaaggacttctgggatgcatttgaggtcaagttcgaagtcttcgatgttggcagtgagttgtatgtcatggagcagttctatgactactagatggtcgatgtctgttctgtagtagaacaagctcttgagattcaaatactggcaatggatcttgagaacaatagctgccgaacaagttcatggcaggtggcattattaccaaattgccaccttcttggtcagactttgccacttctctaaaacacaaagaggcaagagttcaatgttactgatatcattagttctttgggtgttgaggataaggcgagagcaaaggacaaccgcggcaaaaaggtcgagagaactcttatgcatctcaagataacaagaagatttcaaacttaatactacaaccaattttaagaagaaatgcaagagaaaggcatagcgccacagctttatgtgcggtgagtctggtcattggaccaagaatagtcccgatcgcaaggacaaaagtctgcaaacatggttaaatcagtgatcctactatatttgtaaaatccaaacaagagtaataatagccctatctcaacctacgtggtagttggtaagctgcacgtctattcggcaaacatgggctgtaataaaaaaaatattgaagcaggtttggagacgatattaaatattggggaataagagacatggggaaagaaaaaaacttctttaaagaaacccagtccagtaatttattcctgattgattgacatgaccggatctgcaagacaactgatcacaccaaacaccatttagaagaactcagcaaatttcatcaaaatttatgttgcgctcgaaagcataaactacgaggacgtttgattaattgtccttgaccttgcacaaatttctcgtctcatccactactaagtgatacctacttaggggtgaaaacggtcggaatcggtagcatctgtttgaaaacgacgctcgatcggccggtaattgaccatattgatcttttacactacgtaatatcgacattaatacaatgcaaaaataaattagaaaaagaacaagaatcataa

SEQ ID NO: 4261 - DNA, 3012 bp, Oryza sativa
ttatataggcatataagtttacatatctcataaaagtttttgaataagacgaacggtcaaacatatgctaaaaaatcaacggtgtcaaacatttcgaaacggagggagtaatatataagtgagggaatcccttatctcattgactagcttttggggtgggaaataccctttacgatcatataaaaacatacttagtactccaccagaagcatggccccataccacaaaatgtttgataataagcatcgtgatacatgaagcacatgaaaaacatggtgagcattactgctgatattcaaggcaaaacaaagaatataaaaatactccctggtttgatttgtgaaaaaggttaaaattcatggggggttgttctgcctgacatgtttagagattttggtttgcagtagctgggtcagtcttcgtcgtagtaattggtgtaggggtgttaaagattcaaggcccatatattcttccgtaatcatacctatccttgaaatattttagttaaaaagcatttaaaaattaaaaaaacccaccctattttggacccaaccctcaaattctatagtcctgccctatagtaaaggttgatgaggcacattaaattttatatagtcctcaaattttacgatattgcatgtactcatacacattaaatggaccggcgcttgagtatatttgcatagcctcgtcacgacctacgcagggcctgacaatctgtccgctcattggcaaataggcagcgataggtaaaacataatcatctcgcaaagacaaaaacaagaaaataaaaaaagaaaaacatatatattcagtgtccaagcgggttaattggagaagaataagaattaacggtgggcaatgcgagacatggggaaggaacatcgttacacatcagttgtaagcaataaagatggcattcctaccgcacatttgaacaatctcagcgacgtccaagagagctgcagttgcggaaagctgcaggcaggctcactgctgttcgtgggatttatgcggttaatgtctaggaacactcaaaataatttgcctgctgatgctacgtgctgaactggtgaacatgctgatcctactgattacaagcggtgaactcaattggttagtcgatttatacagtgtgttagtcgatatcatattggttagtcgagctcataagaaaaaaaagggaagatggtatagctgccgtttagcaccagaaagaatgtttggttaattagcttgtttcccccttctgcctctctgcttttcagcttctttactttatatactttatctatcccaatttaatcattccttaagcaaatgacaccaagagctatgagaccgaaatatctatcattttgaaattaattcttatcgatcaaggtgcaatattgttttgtgtccaacaaaaaattaatttacgttttaaatgttgtatgcacgcaggatatttcacgatgcaaatctactctttacataaattaaaaagagacattttggtaggtgatgatcatttgcagaaaaatctcaaaagtattagatgatgatcaaattggaatgaagagagtaccatataaaattatcatatctatctattatatactattatatactaaaagtccattaaactttctacaaacgctcataagccgtcacgtggcgctcctataaacgctcctagatcgccacatagcattgtttaatctacttaaatttgtggaatattttagaccattagattggatatattattttttaaaaaactaatacttttctcatgttaactgtgggctgggaaagcatgcaaacaaaaactccgtatatgttgttatgaaatatttgggtgatctcatccatctatatggatagagcagcaatccacgacggttggtcgtgccccacacctcttctcgcctcacggcgattctagcaacggacgcgatggttcccaaaccatcgcgtctccggttgccaccactttcccatctatatattgtaccgcattgatcaataaagattccgctcattcattctctatattcttgtgtgcaattctctctctcactcaatccctctcgctcaatcaatcttatacactttcaacacgttatcagaactttcgctctcgcgaaggagatctcgaagtgaaagaaagaaggaagaaacctcgcttttttgatctacaggaaaagcgaagaacagaaggtatgtctacctttatttccatcctcgatgccattctcggcatccctcgccatgatcacgcacgccgtctttgccatcttcatcgacgatcgacaaggaggacgcgccgggatctcatggtgggggttggtggccggcgccactaccctcgccgccgtatgtctgccactccgatcgtgcctgccccgctggtccctgacgcgcctactccttctccaccgatcgctgcaccttctcctccaataactgcctcgatgaacgccggacctcctaaccgcgtccaagtccagggggtacagtattgtaccacccatggatggacggcggtggcctctcccggtggcgagctttgcaccctcccactggagatggagtcgtcgccggctccgttcgtcgctgtctccgacatccccgacaccgcccccacgacgacgctgattcccaactcccacgccaccggtagccgctcagccacctccactgccaccacgccgaagtcgcttccccactcccgagccgccgggctacggccggaccgggacacttgccatgcgcaggggggaaccgccgctcttcactcctccttcgtcgcgcccatacgccggtgccgccgctgcgcgccgtcccgtcctccgcgccacgattgtcgttccccacggatctcctagccggaccctagcaaatggggtcatggggaactgcatccgggtccggccggcctccgactccaatgaggaggggggggtgacggcctaacccggccggcaaatcgccggcgaaccgagggatggctgcggcaggagacta

SEQ ID NO: 4262 - DNA, 5046 bp, Oryza sativa
acccaatttatcatttttttatatattttctatttttagcagcaattttcatttaagtccctgtgttttattcaatttagtataagcagttcatcagttatacaaattactatgtaatgttcctttagaccactgatgttatatgttccttaacatatgtgcttattaaataccctgctttactaaatttatttgttgtcttaataacatgccttttgcatattatttcaagacacgctctacttcctcgctttattaatttacaaaattctataaattttgtactttgatttagcaaattctcttaattatgtacaacatgattaatggaggatttaatgcgtgttcgactgcacattttgactcagaaattactcacatgtagatggagtcctacaaattggccacactggtcataacttagggagcgagtatctcgcccatcatcaagtggtctacattttgagatgattacccgatggagtcctacaaattggccgcactggtcataacctaggcagcgaacatctcgcccatctcacagaggtctacatctcacgatgattacccacatgtgttattttccgagaatatgttttgaaaaatgagattatttgaaatttggttgaacacaaggtagtggagtcctaaacattggctgcggtatattcaccagaatatatttgcctagagaccatgttctaggcagcaagtataacttgcccactattaagggatctactccactatttaattacttggagattatccatattgtgccacctaatttcgaattctaactcaaattgtcaggtctgtaacctacatcttcaaaacattacagaatatgaaatcttatatttcgcattgagattacaaccacaatatcatgtttttattaatttacatctgtaaattaataatgttaatcatgattatagggacatggcaactatagagttcgacgaactcgccctcgatgggagtaactacccaatttgggcttccgatatcaaaataaatttttcttctagtgggatttcacatacaaataaggaaccaaatgattgggatccatcagttgagaatagaaagctatatattgcccttttccttctgaggctttacatctataaatatctcaaacatgagtacatgttggagacaagccctgtcaacctatggaaatctctaaaagagcgttatgatcagaaaaaggaacttatttggcctgaggctaattatgagtgaattcatttatgcctacaggattttaaaaattgtggcagaatacaatcatgttgttcatagcatttgctccaagttgaagttttgcgaaaaagagccaacggaagcagagaagatagagaaaactctatcaacaatgtttctagaggacatgatactgaaccaacagtatcgcactcaaaggattcaagggaaattcctcgaataaccctaagaatctgactggaaaacgcaaatgcaacaaaggcgcaaatccaatggtcgacagaaaggtaaagggaagggtaaggcaccacaacctagtggcaatagcaacaagcattgcaacaggtgtggatctgactatcatgtcgctaaagattgccgtatcccaaaaaacatcttgttctcctgtatcagaaatccctaaaggagaaaaagtcttctgaggaactaagatttgaagctcacttcaatcttacaaaagaaagacctgaggttgaaagttctcactaggctccttgaaccagagaacaccctcgttcttctcccaaaggataccgctacactttctgcaatggatgacatgctcatcgaatactgctcaacggacccacttagagatttactgtaatctcagtgcatcccacttagagataaagctgctttactctcagtgtgtttgagacattatattgatatcctatagtttgtcaaaacaatattagttgtaataagtagataagtacaaactcccttatattataaggttgtaagacttgacagtccttagagtatgtactataaacctatgtaaacgtcatactatgtgtttgatgttttcattattgtatgtatgtatatattgtggataaagaattcttcactaagcaattcttctttcactatagatgtctaaggatatcgctccgattggagaggaattatgtcttgtggacagtggtactacaaactctatacttagggagatcaaatactttcaaactctcaaaaagagagaaggcaaagttttgactatcgctggacgcgatactgtgttagttggctcaggacgagcaattattacactcccaatgggtacacaaattacaatcgaagatgctttattgtatcctgattcaactcgtaccctactaagttatagagatatccgtcaaaatgggtttcacattgaaacccatatggataatcaagaagaatttcttctcttaaccaaacaaaacggatatggcaaacgcatttgtgagaaaattccatctctcacatcgggattgtactatacatacattaagcccattgcacatgttgtgtacaaagtaatttttcaaaatgttgatgcattccacacttggcatgatcgacttgggcaccccggtatcgagatgatgagaaaaattattggcaactctattggtcatcatttgatcactgacaaatttccaaaatcctctgatttcgtatgcactgcatgtgctactgggaaactgattttgagaccatcttatctcaaaattagagccgaaccacttaaattccttgaacgcattcaaggagatatctgtggccctattgtgccaagatctggaccgttcaggtactttatggttttgattgacgcatctactagatggtctcatgtgtgtcttctatcgacacaaaaccatgcctttgccaaattaatgtctcaaattataaggctgaaggcaaattaccctgaacataggattcaatcaatccgtatggacaatgctgccgaaattacatcccatgctttcgatgattattgtatggcattgggaattcaggttcagcactctgttccatatgtccacacacaaaatggtttggctgaatcgctgatcaaaagaattaaacttattgctcgaccattattgatgaatttcaaattaccttcgtcgtgttggggtcatgcagttctgcacgctgctgaccttgtccaactacgaccaactgcatatcatgaaacttccccaatgcagttagtacgtggaaatcctccaagtatttcccatttgcgtaagttcggatgtgctgtatgcataccgatctcaccaccacagcgtaccgctatgggcccacacaggaaagtggggatctatgtgggattcaaatctccgttgatcataaagtatttagaaccgttaacaggtgatctatttactgcccggttcgctgactctatttttgatgaggaacatttcccggcattaggggaagacttcaagtaccagaaagaatgccaggaaattgattgggatgcccaaggtattcccgcctcagacccacgtactactgaaactgaacttcaagtttagaaaattatacatttgcaaagacttgcaaatatcctgccagatgcatttaccaattataaaggtgtgattaaatctttcattcccgctcagaatgcgccagaaagagtggaggtaccaaataaaaccactcaacttccactgactaaaaagagaggaagaagtatggccactcagcaagaaacaattgctaataagcaaagaaagacggtaaatgcaaaccaacctttagttggtgcacaccaaattgatactatatatcaagcagatcgtgatagtctgcaacctagctcggtggtgcacaatactaagactaggaattcggaagaccatagacacattgtttcgagagatcacaatgaatctataagggttgatgaaattgccatcaactactctgaaactggagaatcttttgatagaagagctacaattgtcgacactaatttttctgaacaaattgctgattgcctccaagttgatccagaacctaggtctataaaagagtgccaaaagcgctctgactggaacaaatggaagtacgcaattgacgcagaattagcctcgctttacaaaagtgatgtattctcggctgtaatgcctactcctcgtggtatctttcctgtgggatacaaatgggttttcgtccggaaacggaatgaaaacaacgaggtggtgagatataaagcaaggcttgtagcacaaggttttacgcaaaaacatggcgttgatttcaacgaaacttactctccagttatgagtggtataactttctgatatttaatatcattggcggtacaaaattgtctatttatgcagttgatggacgtagtgacaacatatctttatgggtcacttgattctaatatttacatgaaggttcctgacggaatcgacatcccgaatcagaaggtaaatcgtaacatgtattgtgttaagttgcagaagtcactttatggcttaaaacaatcgggcaggatgtggtataaccgattaagtgaagaatacatcacttaatagcagaaacttgacatgagagtgaggtcactggttatgacaatctagcatacatcttgtcgtactcacgtccaacatatacgtatgatatctgccgcactagaaccctcccccgaacctaaacaagaaaataatacttgaaatctaatttcaaacaactacgatgctacatactaaaggaaacccactattacttccctgatagagaattcttaaaaacatgttgaaatcctattgtctctgtttttgccataaaattaaaattgctatatctaactttagcttcagacatgtccattgagactattttcaagacaggacatgatatgtcataattattgcaaaaaaaaggattaaatggaatgaaaaaaataataagttaatgccatacaatagaaatcaacacagtaagtaggtaaaagtaatttcatcatcatgccaagcttta

SEQ ID NO: 4263 - DNA, 4710 bp, Oryza sativa
tggtcggggggcatataagccccagcccgaccgttggtatgaaattccgacggtttctctctcataaacatccacaaaattaggggggaaggttttcgacctcaaatctttgattgggttccatataaaaggtgtagagcttgttctcctccttcatttgcttccatttttgtcagttttcatcggtggaatacgaagaaacttgcacttttataaatggaatagtgtaggcacctttttgttttttttatttttttagcaaatacataatgattccattacatgtttataaaagtatttagtacctacattgaaaagttgggtttgcctctattaaatttattttcatttggatgaaaggatgattttttttcattttttagaaatggacagtattttattaatgcttaaaatcactgtgcggctatttaaatagttcgtaaaactttaaattaccatgtgattcgttccctccaatttaaatacattcgtgtttgaatcgggcatggatgtattaatgacaagctttattgtaagtcatggatcagacatggatgtacaacacgaaaagagctcatccaacgttcttgaaggaagcagccaaatttgttgagctcgcaaaggcacatgctgtgagggagaatttgaggaacattttttgcccatgcaaagtttgtaagaatgaaattttgctgcaagatccgaataaagtattgtcgcacatcgtagaatgaggatttaagaagggctacgagatatggacctttcatggggaagtcaatggtcgtaatgaagagttagatgatttctgttttgatgatgcagaaaattttattgtcgaagacatgtcacagggaaacatcccggaatacggtggctctggtatagagaatgaaggtattgattttgatctggaagatatgttgcggcacgttgaaccagagatcctaactggtacaagacgagggttggacaattgggaagcgttggaaaaagcagcgaaggagcttctgaacgacgaagccaaaggatgcgacaaggactattcggtcctgcgctcggtgctcgaacttctcagattgaaggccagacatggatggtcggacatgagcttcaatgatttgatggatcttttgagagttatgcttcctaagctgaacctgctaccgacgaacacatatcaagcgaagaaattgatatgtccattgtctctaggtgttcagaagatccatgcatgtgaaaatcattgcatactgtaccgcaaggaattcgcggatttagactcttgcccaacatgtgggacgagtcggtacaagacgggcaacggagcctccgatagagaggtggtcgacaaagatgatgcaccggtggatgagaaaaaaaagattcttaggatggtgatgttggtacctgccagttaaagatcgcctgaagcggctattttccaaccatgacgacgccgagttgatgagatggcaccaggagggtaggaaaaatgacggtaagatccgacaccccgccgatgttcgacagtggaaaaactttgatgcactacactcggaatttgcaaaggacccgagaaatgtaaggtttgcattgagcacggacggaatgaacccgttcggtgccctaagcagcacacacagcacctggctagttctgctaacgatgtacaacttgcctacatggatttgccagaagcgaaagtatattcttttgtctatccttatacaaggatcaagacagcctgggattaacatagatgtgtttctggaaccattgatggaggacatgcaagaactgtgggaggaagggttacgaatgtgggacgagtaccgtagggaacattttactctgcatgccatcatattcgttacgatcaacgacttaccggcaaacttttcgctctcgggctagtttaaggggaagttcggatgcctcctatgtatcgacaagacgtcgtacaagtacctcacctcatcaaccaagggtgtttacatgcgtcatcgtcggttcttacctcagaggcataggtggcgtgcgaaggccagattattcgacaatacagtagagaacgatctagctcctgaaacacgaacatgtggctctgtcttcgagctgacaaagaacattaaggttgtcttcggcaagccaaaaaagaagcccgtcaagaggaagaaacggacggatcaggaaacaactgatgcacctttagaggaaagtaacctgccctttaagaagcactcaatttttttcaggtatcttgattactggaaagacctggaggttcggcatgccatcgacgtaatgcaccttgagaagaatgtgtttgatagcaccattggcactttactggacatcccgagtaagacgaaagatgggttgaagtcccggaccgacctcgtcaatttggacataaggcatgagctttacccaaaagagctgccaaatggaaagatcgatattcctccggcttgctactcactaacacttgacgagaaaaaatctttatgtagatgcttgcatagtgtgaaagtcccgactggtttctcagcgaacgtcagaaaacttgtatctttgaaagatttgaccatttctgggtacaatgctcatgattgtcacaagatgttaacagtcttcctaccgattgctataagagcggtcaagccagttcacactcgattagtgataacaaagttgtgctactttttcaatcgagtatcacagaaggtttttgatcctgaagagttaggcccccttcaaaaatttgcaatcgagacagcgtgccagcttgagatgtttttccctccagcttacttcaacatgatggagcatctgattgtccacatcgtacctcagattatcgagattggtcccctgtacctacaccagatgtgggcgtacgagaggtacatgtccgtcctgaaagggtatgtccataaccgagctcatccggagggatcaatgatagaggggtacacaactgaggaggtggtagaatgctgcatagattacatgaaggacgccgaacccatcggtgtgaccccccctttacacgaggggcggttagctgggatggggatcgtaggcaagaaaatgttctatgatgaggactacaaagatgtagcggaagcacgtagcagcgttttgcaatagctcgccatcgtcgagccatacattcaggaacacatgaacgagataagagcccacaaccctagaagaacggccatttggatttgtaaagaacagaaacggaaatttcctgaatggttgaaggagaaagatctgccgttgggtgattcgctgaaggaaaaaactttgcgcaggctagcaaatagcccaactagccttgtgacctcatggcaagggtacgacatcagcggatataggttttacacgatgttcaaggacaggaaaagcgcagctcagaacagcggagttcgggtggaggcgtttgacgcatcaggtgagaagaagtcttactacaggatcatacaagacatttgggagctggactatggccttaacatacagatcccagtgctacgatggcaatgggtcagagacacaataggcgtattcgtcgatgactacgacctgacggttgtgaatcgtagcaagctaggacacaaggatgatccgtgggttcttgctgagcgtgttgctcaggttttctatgtcaatgaccctccgacgataagatggccattgctgtaccgggaaagcaaaacatcattggcattgatagcattgaatatgcgtcagattacaatcaatacgacgacgtccctttgttcacagattttcctaaccggatcaaggaagttgagacaagccttgacgaagatctgttttcgtgtgtgcgtaccgatggtgtttccaaaattgtgaaacattagtacatattttggagtgtacaacttagcttgtaaacaattaatggatgagacttattttgcgaatgaatgtatttctcactttatctggtcaaatacttgacttatattaatcaatcgatgatgaattatatgcgaattaaattcatgtgcttaattctttgtgggttgaaaaatattatttgattaaataattacttgattactttattacataatttatttaatgtaggttgaataatttgtgggttaattaacccgaactatttttaattcgtggtttagtaatgtacattaaatatatttaatttgtggttcaataattatatggattaattaactacaatttatataagatttattaattaaatgtatttaattgtgctatattatacattataattaataaatgccaactaaattaaaattttgcaaaaaaaaaatggtaggagccttcccgtgtgggccacttaagcctattatcccgtgcgggcgtattaggtcacccgcacaggatgcccatgtatatatagaggaggcgggtagaagggctgaaattttctaagtccactccaccgacgctgccaggctgctgaaaaatccaaccgccaccgccctcccaaatccccctcgccctcgccgctgccgcctcctctcctcctcggccttgccgccgccgcctctcctcgagctcctccccctcgtccccggttgccgcctcctcgacgccggccagatccgggccggcgccgcctcttctcctccccccaagtcgccctccgcagccaccctcctctcctcctcccctccccgc

SEQ ID NO: 4264 - DNA, 11508 bp, Oryza sativa
gttagcctaaggattaatattaaagctcggctgtcagtacctttctctgtctgaacgctcggttcaagaatttcagctttgcgttaattactctacgtgcagattgaagagatcatagaaaatcattgacagttgcatcacatcttgttatgtatgattccacttgagatatagtactataacttggttgatttcaggtcaactaccgtaattagatttgatgtgcctccaaactcgacggaaaaccttactctctgtttggggaggttgttgtaactgtagtttctcttgaaattttcagctcagcttttcatccgaaatctaaaaatacgatggtatagaatctaagacgtaaactagaagccaacagttgaaaaactcaatttatccaaattctaattagctgcttctcgaaatcttcagctcccttgaacatggtctaagtcagatctttatgtcatgaatttgtggtggtctagactctaggatgtttttcttactttaacacattacctgcttttaattttttgcgataatacatcacctactttttttcgataatatatatgttcataaatcgctagtagacttgctagtgtttgtaaaccgtcggtaattgttggaaggtaatttttcaagaattttgcagggaaagataaatgcaggaatttctgcaaagtttgtaatgaaaaccactttttgcggttaacacctactctctctgtgaaaaaaaaacctagtactaaatatgatatattctagtacaacgaatatggatagaggtatgtccatattcgtaatgctaagatttgtcacgtctagtactaggttgatttttatggaaggaagtaagttgaaagcattataagtctaggggggtatgtccattgttttttattatttgtcttgaagttaacaatgtccgctaggcgtgcaatttatgatatactatacaattaacctctctaggtgctagcttcaagagtgtgtgtgtgtgaacacaaacacacaatttgtgcaaaaagtcactgtaccgtatgaactcaaaaccatggaacttgtatatcaattactcaaaatttgactcttccgtgtgacggtggcacaggttgatggtgccgtaccgactaggcgaggtagaatagcactgacacgatcgcgatgcaatggttggtttctctcatttctatatcagaaaacacaattcggctgacctgtcaggaagatgtcacattggcaattggcaagtgctagtttcaaattggaggcgcctccaatccattttgtcttgatggtccatgcatgtatgatggtcatacatatgtgttggaaccggttctcatagctttaggctgtgggtgcactaatctttcccctcctttccgaactcacttccctagttttttacgcgcacgctttccaagctattaaatggtgtgttttttaatttaaaaatttctatacaaaagcttctttaaaaaattatattaatttattttttaaaatagattagctaatacttaaattaatcaatcgtgtgctaatgagttactccgtttcacatgggtagggattagtcccaacaccaacgaaagaagacagcctaataagcaaagcattgccttctgaaagtatgagccttggataaagatacaatggcctactccctcggatttttaaattaatagatgacacaacattcatcttaaaaataatattaatattaaaactgtaagtcatactaaaagatttttaataaaaaaccaagtcagaacaaaataaataataatcacgtaactttttagtaataaaacatatgatcaaacgtatggcaaaaaataatagcgtcatctgctaaaaaacgaatggacaaacatatgtgttcatccgtgatgtcgaggctgaaaaaaaacgcataaactttttcgatactaagtagaaattctcactataggggcatatttggtttcttttgcttaatcaccgatctagtatagcttattcatgtttggttttcctttgcctaaccttggcggaatctgccgcagtagagaacctatccgtgcaaaagcagacaaaaattatactcctccgtgagtgtacatatggtttgatggttgtgaaaacgaaagggagaaaagaaccggaaaaggttcaggccgttttggggacagttcacacgcacgcagggccagcagccacagccaccaattcagcgcctgtctttagttcgcgaaaagaaaatttttaagtgtcagatgtcgaaaagagttttcggacacgaatgaaaaaaactaaattcataactcgtctggaaaccgcgagacgaatgttttgagcctaattaatccgttattagcacccccgcaaaaaaaaatccgttattagcacatgtgggttactgtagcacttatgactaattatggactaattaggctcaatattcgtctcgcgatttccccctaactgtgcaattatttttttaatctatatttaatgctctatacatatgtttaaagattcgatgtaatgttttcgggaaaaaattttgggaacttaaaccaggcctcaatctgcatgaacaaatccaggagttaaaaaggaaaggtgagtagcagtagcagtagcagtagcaggtagctgagggtaggcaacgtgcgatgcactacactctcacatcatctcatcatggttggttggagcagagcagtttgccggtggttcggctcaaaatcgatcccttattcgcttggccgcttgctttcatggtggctggctagctcatcaagcccccgtccccattgtgccggtcgccgtcgatcgggtttatgttatttcaggacgaaaattaaaaacatttcagcatcaaaatttcaggcaaagattgaatatgtcataattttttaacaaattgttgacgaccaaatttagcgttggaacgaatttgtagcaagtttgaaccaaaaattttaaaaagatggagcttatgcgagaagaccggttcaatcttctttatggtttgagtggcagtatgagtgtgatccaaccgataaaccttaaatccgatttcaattgttgtagatcccgtgtttttttttttttgcttggatccgaggttttcttgagttctgattgatttctaaacttactggaatgtacaaaagctctggttttactagagcaatccttttatgtggactatgaccagcttaattggaaacaatcaaccagaatttcacacgattaaccttttgaatgatgtttttcatgttccatctagttttgtccctacttcatccatatttatcgatttgcgctataaacgttcatctttatcatgagagcgcggattacttcgtaggtttcaaaacctacctttctgctcacgagatgggtgtgttatgcttgtcccaatttatctaagggatgtttgggtgggagggactaaatttcaggaatttgtaaatttttggcaccgattatgtgtatgtgaaaaccgtattctgataggttcagtttgttcatggggaagagggcgggagttgaccttctcgaaggcttaccatttccttggtgggttttgaaagaatatatttgactctgaactccttttatcagttgacaacatagtttagtggtcatactctcatagcatgatatatcaagcaaagtcggatttttaattcgacttttcttcactgaaattatatggtgctgcaccaaaagcatgtactagctaccgtgcgcggaattcaccaatatgggctgtattttgaccacttcacaacgatcattagtgagatatcaggtggaacttagaaagtataaatgggacaaatggcataaagtgttcatcatatggttctctttcaaagatgccaaaaaaaaattatgtgaccaaaatgagtaaatgcatgggatagtaggatatacagataagtaccattctttttcccgcatccaataggggtgcaatagtagggaatacttgcaatacatctaaacgtaaccttatacttgttattaataaactgtctaccaaccctgtatttctcaatggtgatagtaattaataactgaattaaattaaatagcacaaaagcatgcaatggttgaaggtaaagggaactgaattatattgcacaaaagcatgggatggtgaaatataatgtttcccatgatggacaaaatagcgaactgattgagtataatatagaatattatcaacatctgatgacacatgcaaatacaccggttattttcttccaaccatggacaaaaagaattgaagattagtaattttactccatttgagtttgtaagtttttactcacaggatgattcatcacctgcaaaattttgcacttgttctgtctctactttccctgatattttgtaattttgtggtttgtgataaaaaagaattccagtctattaaagaaaaataaaaacatcatctcctccatataacctagttagaatcttctcatgggagatcttctgacctactgactcactaccttcctttttgccctgtttttcaggaatgaccatttaataaatttatatgccttaagacttaagaatgaaactttcagctctcacgtgggcacaagatgctatgtaaaaatcaacttatcttaaaactcaagcggagcagttttagttggtctagcttttctacaagataatacaagagacgcacatgctctttacaaatcgacgtaccctaacttgcgaattcatctttccttctcatttcctgagatgatgctttttattaaaaacaaaagctctgaagctagagaatatataaatgtgcattttctgagggcattaatgcaaataaaaggaagcattctgagaacagcactatatatgcctacatataccagaccagctcttccaaaatgataacgcctttgaggatgaagcaaatttaacatttaggcaaacatctgaatcatataaatgatgttgaatcatatctttggttgtaagcgtggctcttttcctgttaaatatcttggtatcccaatgcattatagaaaattaaataataaggattggaaggtgattgagcaaagaattgagaaaaaacttagtagttggaaaggaaaacatttatctgttgggggtagactggttttgattaactctgtgctttcaagtctagctatgtttatgatatcattttttgagatacgtaaaggggttcttcaaaaaattgattattatagatctcgtttctttttggcaaggggatgattataaaaaaaagtatagacttactagataggatataatttgtcaacccaaagatcagggaggtttaggggtccataatttggaaatataaaataaatgcctcttgaataaatggttgtttaaattgattaatgaggaaggggtctggcagaccttattaaagagaaagtatctttataatcagtctataacccaagttaataggaaacaaggggattcacaattttggtcagggctcatgaaggtcaaaaataccttcttaaatatgggttcttggattgtaaataatggaagacaaataaggttctgggaagataaatggctgggtaacttggcttttaaagacaaatatccatctttatattctattgttcgaaggaaaagttctactattgctagtgttatgagttctgttccacttaatgtttcctttaggagagccttagttggccataatcttacatattggcatgaattgtgtacttctattatacatattcaatcgaaccattcttctgattgctttagatggaattatcatcagagtggtagtttttttgttaggtcaatgtatctagctttaattaataatggatatatcgaaagaaataagattatttggaagcttaagatgccactcaagattaagatctttatgtggtacttgcttaaaggggttgtgctgactaaggacaatttggcaagacgaaattggaatggcaatttaagatgttgtttctgcatgaaaaatgagaccatacaacatctttttcttgactgtcattatgcaagatttgtttggagagcagtacaattctcttttggtttaaaccttccaagtatcatatctaatatgtttgatgggtggcttatgggggttaataagaagaaatgtaatctcatacttgtaggagcatctgccatatgttgggccctatggttgagtaggaatgatttagtgtttaacaaatcaccatatactttatatatgcaggtaatattcaaggtaatatattggctccggttttgggcaaagctgcaaaagtgtgaagaggatggtgaacttatgaaggttgcatgtcgcaaactcgagacgacggtgacgtaactctttgcaaactatggatggagattcacaaatagacttgaataaatgtgtactctttatcttggtttgctttttattttgttgagtgtgtttgattacatttgaactacactctttgtatgagtgatactttgtaataattggttgtaactctgttgagtcaaggccgggatataaattccattatctaaaaatataaatgatgttgatatatatgctagttgaagctgaagttaacaagcattttactccaattgtctttccttttccctcctcttttcacacagtgccaccaaagatgttgatacaaagctaccaaggtgaaaaatagcatgctaacacatgtggattaaatcatagtaagacacgtcaaagccattgccatcagcacctgaaaacaggacaatggtagggtctataacgtcaagaatagaggccttgttctggggaaaggaggatgagctgaagttgttaatcaaacaaaacaccaatgggacagctctagatgctagctagctgaagaaaaggaaaaaagaaatgtagtttcaaattaagctacagctagtttgaagtgctattgtgtattatactgtttgagctctaaatcatggtcacagtcataaagttagtagtaactagataagatgctaacctttcttttcctggatggaacacaggatcccagctcctatggagaatgtggtaaggtggttgtcaattgtcctcctgaagatcctgccccagtgtcatcttctgacaaccgccgtagaattttaagagcactgagttctggatcatacgccacaaagataaagaacacaagagcaaccatagtagcattcaccggagcaacctccaggtcatgcaaggcgatgagtcatgattcaagtggttcaaccaagcagcatgtgagtcgtccgcaggtaagaggaaatggcaaaaagaaagtgttgaggtaaatagagatgattaacaagatatctgtgatcccgtatatcatggttatccttcgtattttctgaatggactgcttgacatcatgggccatgagaagttcagtccaaaactcctaatatcttgttctgaaagatgacgactgaaaaattgctatcgctacttgtttataatcaagctaattttcatttgtgtatgtttctaaaatatagcggttgctcacatttgtctgtattgcatggcatttgaacacatgttttgcaaccataatgtaaatagacaacccaccaatggagaaaactgttgagaattactacaattagtcacacaatagtattatgtttcagtagcatgtggcaatggacttcacttactagttagaaggtacagtaccgctgttgattcctcatttagggcatacaaaagattcctcagatgctatatttgtttaatcctaagttgaatcaaatcctttcgaccacagggcagagaataatccaaattatataagacatgggtatgcattgaataccacatattcaaatctctttaaaagcctaatttgctactgggagtggcacttgttgactgcatgtatcatataatctagtgttaaacaactaagaatgggttcatacgtaaccgtattgaatgttcaaattaaaaatgagtatagcaaactacatttgacagcaaaaatgcactgttttcagtttcacatatatggacaatatgggcaaaagtattcatatgaaagaatagtaggatcacaatgcagacatgagaaggtattcagtcatcatatgaacagtgaggagaagcagtacagccaacatcaaaaggatcttccgatccacaacaatgccaatactggaacactttgcctgaatctggagtatccagagtcccacccgcatagacactttcaaattttctcttcgtttctcctggatagacagagattggccattcagatattagactaacacaagcagacaatgttaactagttcaaaataaacaactcagtcagaatttctgtctaggtcatatgccaatagcccctcggatgtttggattttccataggaacattggactataaaatatccttaacacaatttttcccctcaggattatgttgggagaaaacgttatgcacccaattctactgaaatctcttgctaaatctcgaattcgtttctctcaaagaagccctcagctacacatatgaatagctcgagcaatcaaatgaatctgaaagaaactactccagcttccttccatttctccgacgagttcctcacctccgaagtgggcggtgtggtggcggcacgccgaggggtggttcgccgccgggtcgtaatgcttcttgcagttcttgcacgtgcgcagctcgggccctcctccgccgccgactccggccgaggcggccacgggtagccggactagccgacggcgcgtggcgagctgggcggcggggcacgcccggggcggagcccgtagcaacggcggcgcgcgcgcttgcggcgtcgccattgggagggatgagcaagtgcggcggagagggagaaggggttggtgggatcgggtcgagaggcggaaccgagagcgacaaatgcgggtgggccgctagtctgtagttgggctcaaatgcgggtaaggatcagaagcagcccatgaagcccacgttggaatcgtggtagaggtagcccatatgcaagcctagggattgggtgctcggcctaaaattcagactatcaaaattgataaaatttgctatataacacttaaagtcaccgaaacaacgcgtatcttcttgtgaacagcataaaaatattataattagctagatactcaccgcattattttattattttgggtggaaacggagagagaaactttcataaaagacgacgagtttgcccgtggggtcattgtgtataaccctcacgccggtgaagacgttgacggccggccgcgaatcctcgccacggcgcacgggtcgacggcgacggtgacccagccgccgtcatgagcgccgcacaagcacgtgtcccagacgccttccaggaggctgaggtggcgggtgaagccggagagtcggagtagaggctgaagtaggacgatgtgtcgtgggacgggaggagcagccacgggagcccgcagtgcagggcgttgacgaaggccgcggcagtgcgccatgggcggtagacggccgtgaagccaatgcggtcgacgaggcagttcagttgcttgaagatgacgccgagtagcttgggcaggaggccatctgaccacggcagccgtgacgaatgcctcggatctgccctagctcctccgtcgcgcgtcgccggctgacggcgaaatttggcactggtcgtcgacggtgagcggcgagctctgaccctgcgcgtctctggcggggatcaaccgaccctgtgaccagcgtttcggctatcgccggtcaattcggtacatttatcgttctttctctctctccgttccaccaaaaataataaaataatttagcgagtgtcgggcaactaattttcacatttttgcgatgtctacaagaagatatgtgttctttggtgtcttacaacaaaaaccacaattttttagtgtcctgtaacaaattctgccatcatccccgaaaaaaaaattctggcatcaatttgacggattaagttataaaaaggtgtttagtcattgagacatctgaaacaagatatatgagaaattatcacaccacaaagctagaatacatagttaaaacatctttaaaaataaattcattaattggaacattataacattttctgcaggtatggaacatacaaaccaaagatgtaaaacacggttccaaacatatctctctcgtgcttgaagtatatttatttcaaaagtagaataatgtgaattgttgtttcaaatatttaatttaatacacgacataattagatcgcatatcaaaataatcccccatccctacttctaacccacccaacaacgttgcgcctccctctcgacctcgcacctgtactgctagctacctactcatctgtggtgcaccgtctcaggtgaaggccgccgactgctctctccacgctaaatccgtcccactgatctcctctgtttccaatggttcacacccacccactccaccttctaatcactctgcccaccacggccgccgccgggcacgggcccgccgcccgcccgcccgccgccagatgggaagggaggagggggggagaggggaggaggaaggggagggggaggaggagagggatctgtgaagaggataagtgcgacgaaggggaggaggaagagaaagggatttgtgaggatgtggttgcgattgtggaggagaggataagtgctaggaattacatactacgcattgaattttagtcccgattagtattaccaatcgggattaaagtggtgatctttagatccggttggtgtcaccaaccgggactaaagatcctcggtcccctgacaggggatgaactgggactaaagattgtattaccaacagtaacctcaaacagtatttacgtcagaggtactgttttacactgtagtgctaacttaaaaaaactgtgcgcctctgacgttaccgtccaaagtcagaggagccggttcccgaccagtgtatctatgggtggaagtgcaactaccaggataccattccctactttattttattaactggcgtaatacaaagcaacaattaatatatccaaggtaacacacggtagtctatagctaggcgcacttgaaaccctctggcacgttgcggccgcagtagttgacgaggagcgggaggtcgacagcgacatcctcgagcttgacgccatcgccgagcacgctggccttgatggcgaggcagaggcacacggcagcacactgctagaaaaagcattttcatcaatattgggtatttattttcacatacgaacatgacccttagagccaaacagccacctacaaaaatataaatcgggcgtgcctacgaaaatgattttcgtagacggaccacatgaggtgcgcctgcaaaaattagcgtggtatatatatatgacacatcagttgatatttttctaagtgtccttacctctccccttcaccctcctctcccctccccttcacctctcccctcccctcccct

SEQ ID NO: 4265 - DNA, 633 bp, Oryza sativa
attatacagggtgatagagaacaatcatcaggaagcaagacaatggagaaaatctattgcagaacatcaagagcatccatacaaaaacattaggaccattgacagcaccaattgacaagaaggaaatgaaaagagcacccatacaaaaatttctgaaataaaatacatctggatcattaagagcatcaggagcatcgtacaaatcagtagcatcctgtatagaacacttcatatcatgcacacaccaaatttcatttccaccatacatacaaaacactgatgaatcccctaatgattttggtaaaaatcattaagttaaggtggatacacatcttgtcatatgatcaaatggtttcgcgaaaaatcaataatcagacaacaagatgtgcgaactcgatattttacacgactctctttaccaattctgccccgaattacacttaaaacgactcaacagcttaacgttggcttgccacgcattacttgactgtaaaactctcactcttaccgaacttggccgtaacctgccaaccaaagcgagaacaaaacataacatcaaacgaatcgaccgattgttaggtaatcgtcacctccacaaagagcgactcgctgtataccgttggcatgctagct

SEQ ID NO: 4266 - DNA, 1454 bp, Oryza sativa
ttaaacggctggacggttttatagcattgagcacatactaatacatgttcttttaagtaagtgatgtcattaacttttttatgatgtttgatcatcttatttttttaaaaaaaatgattcagtatcatttattttgttgttatttgttttatcattaacggaattcaagaatgactttttttaatggctgtagtaaatttttgaataactgaataagacaaatatttaaatttcaatcaaaagttaacaacgtcatctattaaaaatgagatggagtatcaatgacgtacctacatgtaactacccgatgtccttagacaccaggtagcttgtctatttctagctattttatatcatattaatcatcatataactcaaaaattagactataagtaatttttattttgagttcaccaacggaggatattatgtaggcacacgaattaattagttggagtaaccagtgatcaagaaaaatggtttccaaacggatatatgttgagtatcgtgtaatgtcccttcaggtcaccaactagctctcatatgattattcaacagagtattcacaccttgttaacgttccctttctgtttctattttacagtttctccaccagccggcttccatgatcatccccacagaggtttgtgatttcttaatccccgttgatacagctgtgcatagttttatatttacacgctaatctcatgaacaattaatttagcttaagttttaataaagtatagttattatatgttattcctgaattctgatcttacaattttcttccattttgtatgtggcacctgttccttcaggattcgagaatgttacctacatgctcgaggtaactaattaacagtttgattcatttccatcaacaatattgtagtattggcgtatcagttgtaataggaaaaccaccaagaatatatttaatctgtcacacaattccatctcattctttctaaaagaatatttagtgacaaattaactgttgttcttaactaattttaatctgttgttttcagggaggcttcagttaccatgacttttcaggccacaagggcaccatcaacacaggagatgttcaggttaggtctccaactgtaccattaaacttagagttggactactcagagcaatatcctttataacttgtccctgttttcctttttccttattttcgttgaaattaacagcctaacaacaactatgaatagtgttatagtactgttcttcaagtaattacttctccatttcaaattacttgtcgttctaactttatctaaagccaaacatttatatcattgacatttactttctaaaagttcatataatttaacatcataagtttattttttagattcaccataaaaaagactttcataatatataattcacttgtagttataatagctagacgaatttttagaaatatatattaatggcta

SEQ ID NO: 4267 - DNA, 1712 bp, Oryza sativa
gccccgggtgtgtgggcgtagaagctggtggcgccgtcgatgggggcggtcgctcgtcgtcttcgtcgcagccgccgttggcgtcgttgtagtcgcagccaccatcaccatcgtcgttgtcgcagctaccgccgccatggccgctcgctcccacccgtctaagcccgccgccgccgctcccgagggcggagacggccagatctgctgccgccgagccgccgtcgcctcccctcccgccggatctagcggaggggagggcgtgacccctgccgccgtggggccaccaccgcctcccctccctcagtcgggcctccagatctggcggagggaaggcactcccaccatccgccgcctcctcctaccgtcccgccatctacagccgttgcacctccacgccgtccgccgccaccacgcctcctttcccgcgcctcccctctcgcccctgccaggccggcgccggcgccgctgctacacacagagaaaggaagaaagggagagagaagtccagagaaatggagaaaagagagagaagacagccttatctcctctgagtgtgggccccaccgggagaagacatatctcctccggctcggcttgggaaggtaggtgacggcttcgagtatatatagtgggacaactcacctcaaacggtttagggtttgaacccgtgtgaggtgagtaaacctcacctctgacgggccatccggttgcatctcgtcacaggtaactagtcacatgtgacgggccggaagtagaaaccgtcagaggtgaggtttaactcatctttgacgggttccgttttcgacccgtcataggtgactagttacttgtgatgggtcgcagctgaatagctcaccgatgatgaaatcctttaggacccgtcaaaggtgaccatcatcactgactaccacttatgaccgtcacagatatgccgtcacaggtgtgaggatctggtgtagtgagccaagatgtatatatgcacgtcattgatttttttttatacatacatatcttggaagagtacatgtgctttgcttgaccttattgagattagatatatatttgccaataattaactaatcgcatgattgagtttgtcctacatggctcattgaagagtcgttcacactggaacagagcttagcgtgctggttatagatagagatccaacaaaataaagttgttaagttctcaaaataaaaaggctgaaaagaggcatatctttcgtgctctcttttcctatagacattgggttgtccccaaggaagcaaatggttggtgcagattcaatgcaaatataggaacaagacggaaattctgttcaaacagctcttggctcatttttatgggttttttcgctttgaactaacattgagttaaattgaccttagttaagccgcaaaacaggtctaatttattagttggaatgtctgttagcatttgaccaaaaatacctctaaaatccagtgaattcaggaccgtaggactgctttgagattcgtgcaacaacatccaatcctaatacatctttcctctccccccagtcccgattcccgtcgccgccatagcttcgcttcctcgcgcacgcagccgaaagacgtcaacgatacccctcgaccttgatagctagctgaaaaacatcaacagctccagcgcggctccccttctccccttctcccctctcctcctcctaaagctgccctcacccccat

SEQ ID NO: 4268 - DNA, 3202 bp, Oryza sativa
ggcgccatcaccgccgtgccgtacaacgggagcgtgctcgccgtggacggcctcatcgtgccgtccgggttcgacctcgcggcgtcggagtcgcggccccccgccgccgtcaacatcaccaaggtcctcgccgacgcgcgggccttcaacgtggcggcgtccatgctggaggcctccggcgtggcggacgagttcgaggccgacgagcgcggcgccggcatcacggtgttcgcccccaccgacgacgccttcgccggcctccctgccggcgaccgcctccagtccctccccgccgagcgaaaggccgtcgtactccgcttccacgtcctccactcctactacccgctcggctccctcgagtccatcgtcaaccccgtccagcccacgctcgccaccgagttcacccaggccgggcgcttcaccctcaacatcacacgcgccaacggctccgtcgccatcgacaccggcgtcgtgcaggcgaccatcacacgcacggtgttcgaccagaaccccgtcgccgtgttcgccgtctccaaggtgctcctcccgaaggaaatgttcagccgcagcgactccgccatcgtcgccgtcgcgtcggcgcccccgccggccgcgctgccggcggaatcacccgagagcgcgccgacaaagctatcgtcgccgccggcgctgcgcgacaccgccggcaacgcgaaccacacggcggcggctgcggcggtggcggcagcggcggcgacgacgaaaccgacaattggccggtggtgtatagcattgttgtatctactactactaccactactgctacctctggtatgagatccggttcgtttgcttgtccattaccatccttgttgagctcgaatttttgcttttcttttttcttttctttttttttgttataacctgtacactggggaaggggagaagtttgagaagaggtgaattcagattgagctgcaaagcagcattattattattattttcgctttctttttttctttttgttcttaccagctgcttcatgttggcaaaagggaaataatagtactagtaatgtaccatcctgtaaagatccaatcgattccatgttcatgttgtgcctgatggctgatgcttcatcatattcatccccatctttgcttggaagatttgcatggggttgggggaagaaggtggtcaagtgaccggggaggtgacgggagaggaaaggagcagggtggggggtggcagtgagctggctgggtaggggacgccgcggccgtcaggccggcgtcagcgctgccccgttagattcgatcgcctttttttttcccctctgctcgcgtcgtcgcgctggcccttcccttgcccttctggcacttgttgcgtctgcttcttgtctccctgccacgtcaccgcccggcaggaattccaccagagctgatagccccaggaagctgatcggacggctgagatgcaaccctggtagtagtactcgcgtgcatcttcttgtgaaacgtgtgcactcttcagctgttaatgtaagctgtgaacctgtaatttagtagtaagagatactacctccgttctaaaataagtttattttcacacatatcatgtatatactaatatatactaatataaaataaaaaatagaatatttctacttcatcaaatcccaattcaattattcattattttatctacttcgaatacaactagtcacttagttgtgctttgcgtgactctgagcgtcagcataacctacctatataattaggccattgatcatgacattaattgaaggtaccggttttgtaagtatgttaatttcttcgttctcaaatgtactccattaattattatatataagtatttctagtttttttagtaaagagtaagattaaggaggaatgatttgtttcaatcacttactattaaaatttgaactgctccaattggctctttccgaacatctgattggctaaacatttggctaaaaatgtttagatatgcattgaaatttgtttcctataaatgcttatatttgtatgtaaaatttgaatgatagaaaatacttattttgggaatgatacagtagctagagatgtaaatggtggaatgttgtaattgattgacattaaaaagaaggcgaagaaattaaataggatatgactatgttggttaagatgagggagtagatgtagaaatagctatattttacgataaattttgaatgttaaaggcacctatattttagaacggagacatcaaaaaacatttaatgctcctaagtccagggtgtatgtgtgtgtttatagggattgttttaaaataaaattggtacatagcggatgctgcttagctgttgtgtgttgctccaataccaagcaaaacaagtgtataacagagtatttacatgtacactcttgtacattatcgatataaacctgcatataaattcaatataaatttatggctaaggcttcatattttttcctttatttagtcatgaaattaattaagcaaacgtatatatagtgtaaaaagacttctttttaaacagcggtattaaaaaggctaagtacatgtctgctttttgagatctttagtctgggagcatccggattggtccaacatgtttccattatcatatatgagcatgatgatccaacggtgcatttttatttaccagttcatctaatggtccttaccattgtagatgatgatgtgggtcatcctcctttcagaaagcttgttgctttcatatatttagactatcgctattccatgaatttcgatgcaatgattactttaaaaataaatttattttagataaatgaaacgggctaaaattgaactcattacggaaaggaggtagtatttacagtacttatcctaaagcaatgtgttccaagtagtcaaggggggccctaacatagtcagtcgatgttactctacgtaccagcgagtatgggtttgcctaacatccgtgaagacaagatgcttcttggttcagtgtgagctggtgatgttttgggtccattcgccgtgaaatgtcgcgtggtggcgcgagaagacttgtagccttgcagtcttgcgagggttcgcgcccgggcagtgcatatgcgtgctgtggcccccccgctttgccggcgtttgccagcctcgcatgtgctctgctttcaggcaccggctgactggtagtgcccaaccctaattt

SEQ ID NO: 4269 - DNA, 2539 bp, Oryza sativa
tgaactttttttttaaaatttttttaccctcttccttttatttttgaaccttttaaattttttttattataagttcaaaatgcttatttcaccttcttatttttccttttttaaagttcaaaatggatattttaccctcttctttttcctttttgaacttttttttttaaaaagtcatcacaagttcaaaatgtctgtttcaccttcttattttcccttttatattaaaaactaaaatggttattttaccctcttccatttatttttgaaccttttaaaatttttttatcataagttcaaaatgcttatttcaccttcttatttttcctttttaaaagttcaaaatggatattttaccctcttctttttcctttttgaactttttttttaaaaaaagtcatcacaagttcaaaatgtttgtttcactttcccttttttaaattcaaaatggttatttaccctcttcttttcctttctaaacctttttttttttacaaaaagtcatcacaagttaaaaatgtttgttttaccctcttatcttttatttccaagttcaaaatgcttatttttaacctcttattttccctttttttaaaagttcaagatgcttatttcaccctcctatttcaccttttctaaaattcaaaatggttattttacccttatcttttcctttttgaacttttctttaaaaaatatcataagttctaaatgtttgttttaccctcttttttttttcctattatcaagttcaaaatgcttattttaccctcttttttttcattttttttcaagttcaaaatgttttccttttttttagaattttgtaatgcttattttaccttcttgttttcccttttttctaagtccaaaatattaccagccttccctctcaagcaccgtcaacacagtctcacttctttggggagcgtctgtgtcatggccgtttggatctagccttcctactagtggatctagggccctaccaccactctgcaaccccagagcagttgttgtcaagccctccaccacctctaccctacgccgctgctgctctttcgctgagatgtcgcccctccctcgctccagtcacgcactagagcggttgcttctaaacaaggacaataaggagcttctatctcaggagagaaaggagaggtagaggaggataagatcgaaactgagtgttgggggagggcttctatcgtgggacttagagagtattttatgtttgttaaccatgccacgtcgattcgttggtcattgcaaactctatatatactatatagggtgttgcctgtaaaaattgattttgacagacaattccttaagagggccgcttataaaactgttcctatttttttcaagcagtcctcttaaaactaccaggtagggctagaattatggggtcttcagttattttagaagtggaaattttatagtccgccttataaaaatcaagcctagatgctgtgaaaaatcgtttttctggtagtcttctcttcatctttctttttttggctaacaagttcaaaatgttttctcttttttttacaagttcataatgcttattttactatcttattttccttttttttccaatttcaaaatgtttattacagctcatacagttttattgctgccctctttatttcaagttcaaaatgcctactattgctcattcagttttgctggaattgtcagctcaaattcaccatgcaaaaccgggacgaatgcaaagggagaaaaaaaaatcccctacgcctgctccatctgggtgcccaaaatttccgcccaattcttgggctttggtacctcagccatatcggttatctgagcccaatcaaaacgccctacacatctcccatctccacccgtccatttttccaacgttctagatccatccaccgatctgtggcctctccctcacgaccaatcatgtcccacctctcccctctatatatcccccctcccccatcccataaatcaatccccacaccatgtcgcaacgcatccacttcctctctcgttgccaattcgagtcttctcaacctctcgatccgggcgtgatggtgccgaaggcggagaagaagccggcagagaagaagccagcagaggagaaggtgcccaagggggagaagaaacccaaggcggagaagcagctaccgacgtccaagtagggtggcaccggtgacaagaaggggaagaagaaggcgaagaaaagcgtggagacctataaaatctacatcttcaaggtgctcaagcaggtgcatccagacataggaatctcctccaaggccatgtccatcatgaattccttcgtcaacgacattttcgagaagctcgagcaggaggccgcgaggcttgccaggtacaacaagaagcccacaatcacctcccgcgagatccagacctctgttcgtctcgtcctccccggcgagcttgccaagcacgccgtctccgagggcaccaagggcgtcaccaagttcacctcttctaaattggtagcccttttcctttcggtttgtaattgtcaaca

SEQ ID NO: 4270 - DNA, 5216 bp, Oryza sativa
acaacaaatatttaccactgttactgtggaagcagcagctgaaatatcctcaatttctgcaattggagacatcataggaatcatcaatcttgttaagtcctcttccttcatgcccactgagatgatcccagaaccattcctgatcatgaatgcaatagattctgggtctgccagcgtagctgccatgacaagatccccttcattatcaccgctttcatcatctacagcaataacaaactggagaagaatgaatagttaactttgtagctaaatttaactacacaagggaaacaataataatgtgactgtacaacagtacaaatgaaacaacaataatgcatatgcatgggtactgtcctgaattttgaagtgtgtagagccttgctagttgctacacgaaaatttgagtattacagtatttctattcagcttatcattttgaatgaaaatgtggatgaaaattgaaacagcattataaggacagcaatatggtttgctattgcataaatgcactacagcttggtttcacctcaccaagcaaagaatattgtgatggaaggctggattgctggaagaaactaatgtcactgtgcatgtatttggagtattattgtgcatgtagaatggccttaactttggtcttgaccatacatggtccatgtccaagaagtacatgagtggaactattttgtcttaaactaggctgagattggtaagtgaaaagagaagtactgagtacacagatgaaaggttaaagacgtgaatagatattacatacctttccttcatgcaatgcgcctatagcctcatcaatagaggaaaaaccatcagttggtttgtctgggtcaccctctgcatcgctaacaaagaaatcaccagtttcctgagtgattttagcaccaacagtccgaaaggaagcactagatccattgaatccttgcaaaacaggtccattattgctttcctttaaaggatcattcaaattctctcctcccccaagtccaccaattgcataacatctcaattttaagctcccctttctgataacagcaaatcctatgctgttgataccaccgcttccttgttgaaccctgaaagatcagaataaccagaaaattacagagaagatatgaaattttatgatcccagaaaatttcaacaagaccttttgcatagacaaaacaaagcgggagaatcataccttgtgttaacaaccgtttgtgatgacaattgagagctcagaagaacacggtcatttggtgatcccggtaaaaccgatccacgctcctcaggcttgtcctccgagatattgcttatatacctttatcttctaaagtgtcacaacacctctcagcctatcatttggagttatctgctcatgaggataacacagggaaaatccaacaatgtggaggcaaaagcagccacatattcagagctgcaagatagcagctgccgaaccggcacatcacacactttcaggagatgccaagataatggcatttgattgtactcttagactccagtcaaatgcaactgaagttggacctgataatgacaggcaggttcatctttcattcttttttggatgatttatgccccccataatgacacttggaggccaatggctcaatgcccatatgatgatctcaagaagttattagggacttgagaatttctccagattaagccattttctgaggcaacagaagatcaccagattgccaaatgagtactcaaaactttcagaggcacacagcgagagagccaagcgtcccatcgctctgaaacttgcatagtgtgtcgtcctagtactacttcccctaagaaatgcaggtaagcgaggtcgcgccccgccgcacctgccgatgccggggggcgcggtggccgtgcgctgagccagccgcgggcgtcgactctccgagggcggcggagagagcgcggcaccggcgatggccgccgcgccatgggtggagaaggcagcctaggcgccacggcgacgccacgccgcagcatctccggtggggggaagaggtggatttcgccattttggcctttttgggagagaaggctctgcttgatgatgcttcgatgatggatggggaaatcaaaaggggaccaacaaggattatcgcaaattctgtgatatcatacgagataacgactcaccagatgaacctttgattctgtacatgagttagactggaaaccttttttttttctttttggcaaaatgtgctaaaacttgcttcctctgtttcataggataagactttctagtattgcctacattcatttagatgttaatgaatctagacatatgtatgtgtttagatttattaacatctatatgtatgtgggcaatgctagaaagtcttacattgtgaaacagagagagtaagtagtactccgtttcatcggatgctttgaactttttctaagtcacttcttttactttgatctgagtttatagaaaaactaatttgagtagtagattctaacacatactaacactgccatcatattagagggtgaaactccactctgacaacgattagtgaacatggatttgtaacagacattgatcgctaacagaattatcatatagaacaagtatcttgcataatgttattcatgttctaaagatcaaaagaacctctcaacaacataaaataaagctagagaacgctctggtttgtcataagccttctgctccggagttctggctgattttaggacctgcccattgtttgctggcgagtgacttggtccatggatcaagagggacccgctgaggtggctgtggtgttgcaggttttgcctctcgaagttcattctcccggtcgacaaacctgtgtatgatgacatggccaattgaatctcatcagtcatcatgacagtttcctgattgaagttggttcttttacagtttactagttaaaaaacaagatgaagaaaacaaaaattcatttcagagagtagcagtgtagcaccactttctaaacatgaacaccacaaaaagtaaaccagtgtatcgatatgaacttgaagtcgataaacggatttattagaaagaaaacacaaaaagggatgcttgccttctgcaattcttgatttagtgaaagaaacggatgattttttttttgaatgcctgaaacggatgaatagaatagacatgaagggtacttgtctgttagtccaatagttacaactttgaaatgaatatgaagaaaacgaattgcatcagaccagaacacttgcaacaaacagcaatgagaaattcaaatgtaaattttgaattttcctagttatggtaaacaaggaaaagacatactcaatgtatgccattggtgcagcatcgccaacccgtatcctagtccgcagtagtcttgtatatccaccagctcgatctctacaaacaaaggaaacataatggacatgcataaggtaaatcttgacagccaagttcctttagacatgctagccagaacaaaaatcaaaatcaaaagtgaaaccaactcatagcgggctaaaagttacttgtagcggtaggcgagttctgtgaataacttgtgaacaacattgtcaccccgaacaaaggctgaggcacgtcttgctgcatcaagcgtaccctatagaataatagaactttctaatgttaacataggaacggctttgacagtaagaacattaagagattaatatatctggcaaggacatttagctcatgatgctctagacaacataaacgatatttcaaatccaagaaattccccacattagaaatctgtggactctctacctcattctgactgagcaccacttggataattggaatgtgacaagttagcaacattaagaaaaccattttccaagattccttgcttacatggatataaagtactcgcatcgtcacaaaatcagttacttttgaagcctattttttcttaagccaaagaatttgaacaatatacctcacgttacatagtcagaattttcatcgatctgaatcatttactaatggcaggattaccaacaacttgtaagtaaggtacaatcactctatattatccggtgatatttttttctttccttttgttgtggtcaaatacataaggtcaaatcatgtaagtctgctaccgcctacggcccagcaaaggatgagaattcagaacaagagttgcacaagaacgagaatttccagcttgagttttcatctcgacagaatgtatacctctttgccgagctgcaccatctgatccgctttcgtccgcacctccttcgcctgaaacgtcaagaagcaacacacagaaaagaaaaaaaaaaatcaaatttcctggcgcagaaaacctgcattcccaccgctaggtgttcgacgaaatgccggaaccacggagagacaggacgcgggctaccttcgcgacggtggtctcgatccgctcatgcttcaccagctgcgacaccatagtcctgcccagggaaagggatagagaagggcaaagagagagatagacggacagccgtgggtcagggccatgacttcagcgtgggtgcgacgaggcgaaatggagaccggggagatggggttggagaggcggagaagccagacctgagcatggagacgcggtgggcggcgtggcggcccagcttggcggaacttccccatggcggcggcggaggggggcggcgccggcgggagagcggccccggcggcgagcgatcagacagtacagtgtgaaattcaccaagttgcactttggtaggcctcgtcgccgtttgtgacagagtgctacgtttcatgggcctttacagggcccaataattctaattgggccatgtcctaatgtacagccaacctactactgcctctatctcagtttgatcatcgtcaaaaaattttaaggtatttttttcaaaataatcatcatttaacaaagtgtctattgcttggttttgcaaagagtaaatgtgcatcgtggaatgcccggtatgcgcgcaaccaaccaaaaataatttctgttggtttaacccatgcgatatttagagtgtgaattaatttctgttggacacgatcactttcatcgatgatgattaattttagaatgattgatgttttagtgtcattgttcttgttgttctttacttaagggatgatcatactgggatagagggagtatacttcagaaattcagattttgtttggattgaagcggggg

SEQ ID NO: 4271 - DNA, 2634 bp, Oryza sativa
catgcaggtacagcttcatccacagaaacgggtagactgccagcacagcctgcagcatgaggaaggtcagctagcgatcgaattgcatttccatcagcagtgttgcatgcttcagtttcatcacattatctgaaaaaaatgtttcagtttcatcagacattcacaggctatggcttgacctaccactaggaaggaatggtagctcatggagaacttcccaaagaagccagagtagagtttcctctccttcacaaatgggagagcttggtacatagtccacactgcggagatggcaagaaaagtatatttacagcaaaagactgcaagattagtaggtgtaaagagaggggaagtttggtgggtgagaattttggaattggcttactttctcctgggcctactccaattggatacagcggtataaaggcagtgtacctacatggtgcaaataagtagaaagggttaattagtctctgatcaggagaacagcagtcacctggaaaaaagaccataagcagcgcggtaaaactagggactggtaagcaacagtagtactgcagttaaacattgtgatccattattatatcatgtaaagaaacaaaatcaacatagcagcgatgtactggcgattttggagtaggaacaatattagatgaacctggatataaaaatgacatgcatggtgattcattttaatatcccagttaatagttccagctcagtgatctttctgtagcttactcaatacggttattgtaatttgaacaacaagtttgcaattttacaacttcttttagaagacagaaggtaaaacaaccatgatactgtgtccatctttctgcttcctatgctggtttcagtgcaaggtgtctttaaacggaaaataaaaatgacctgtgaccaaaaatatttttgaagaatggagaattgtgtaactttctaccaaaaacaatagaaaacaaccagaaaatagtggaaaacaagaggtgtactgggcaccgagcctaagagaagctactaagaaaatactgtggatgcatccttggatgtgggaactggagttcatttgcaaatcaaacctgagatatgttagccatggtggacaaacttttaaggttgtcagagcataatgtgagtatctgatgacctgcaccatgaagaaattagacttcagataaaagactgaacaaaaatagcattgtcttgcgaattatttcaaaataaggtaagtactgagtaccattgagttaaaccaaaatgtagatgcctaaataatgcttttcgttcacatgcacggaggttagtaaaagggtattttcgtgtcatagaacttggaaacatatttgtctgtcgtggatttcagttggtacatgcacagacagttctattcatgctagcatttccttaggcagtagtaccagctcaacttatcctcttaacagctaaacgtagttgtcagatcatccctttcaacacgtaattgacattttaatatgaatgaaacaggtgaaataatattagctccattggcatagatcattgtgcagtaaaatagaaacaaaatatgtgcatcctgagaaggttccaccagaaatttctcgttatatcatgagattgcatcatagaaaatcattttttaatgtactcaaaaagcatcagtattgtttttatgagaacaaggcaaaccacaaaaagaggagaaaatgatgtagtatcattttgtgccacacctcagatatgctccaagccatgaacgttatgaacacggaagggctactctgaacctgcatttggcacaggagactaaattagtaaacctaagttgaaaccttgagaggcactactgtaaaaaggtaataacagaaaatgtatcattggaaattttataataaggaagaaatttccttcttcactaggtcgaagtgcaaattcgtttttgcggttggctcttccatttacacatgacaaaataaaaaacacaaattctacgggattttcacatgaatttgttcaattcctccaagaatcccgcaaaattcatccgttccaaacgaagcagaaatttgcagtcctccccacctcggggatttgccgaaccacagcgagaacgaagtgagtcctccctccccactgcaagaaggcaagaagcggcgacgtgtgcaccaatcctgaatcaaacagcaacgaatctcctcgtcaaatttcacatcaaagagagcggcgcgcgaggaattcagcggctcaatcaacccaccgatggcggcatggatcgtttcaagaatcgcccacgtctgcagcaagccttgaaacaacaagaaacgaatccccaagaagggggaaaagaaaaacatcactccctccgctcgtcgagacgagaccaaatcaaagacatacgaggaagggcacggaggagggatacacgcacatacgaggtcgccggcgacggcgtatgacgagtggacggaggagggaggggcgaggcagggcagcaggcggagcaaggcgacgaacctgcagaggaggaagccaaaaagaaaaaaaaaagaaaaaatcagagcgaaacgagggattggacgcacgaacgcagcgaacttctcggctgcgggtggagtaccatccgagggcctggacgga

SEQ ID NO: 4272 - DNA, 658 bp, Oryza sativa
gtctcaatctcattatgctgctccatgctcttctcattttcttttcacccataacatcaatttaatataggaacactgcaggaattatcaggaagaatttacttgcttatgttacaattttcaggttgggttaatgcttcgtggaatgggtttcagcaataatactgcaatttttttggcttctggaaaaatttacagagctgagaagaacatggttcctcttcttgaaatgttccctctcctacagacaaaagaaactttagcatctgctgaggaacttgctccatttaaggtattgtggtagttgcaacttctctttgtgtggttctagattttgttctattcattactctaaaggatttgtggttgccaggatttctcctcgaggatggctgctattgactacagtgtttgtgtccatagcgatgcttttgtgactacacaaggtgggaatttccctcatttccttatgggtcacaggagatacttgtatgctgggcattcaaggacaattaaaccagacaaaagaaaactagccatactatttgacaatccacgtattgggtatgatgttgtgccgtgcatttacttttatgtacttttttttcaggccggatagcagtgttctacgctataaacctcatgttgatagtcaatt

SEQ ID NO: 4273 - DNA, 1977 bp, Oryza sativa
cagaaatccatcgcgccattgtaagtacatttatcacactcacgctcgctgtcgtcatcaacctctgcaaatctcgacgagctcttccgggccgtcggattccgcggcggcgatcttggacgccgccgacgagaggaaccggaagccggcgtcgctggcgctcttcctcaccgacgccagctgctgcgacctcttgcagtaggcgatcagcccctggatcgggttctccacctccgagctcgcgctgctgctcctccgcagcgccggcgccgccgcgccgccgtcggactcgctcgacgtccgcaccgacgaggaggaggagcacgacgacgactgcggcgcaggggacgtcttgttcgacgtcgagtaccggacgatgacgctggagaaggacctcctgtggccgccgtggtcgcgctctttgtgcttccctcctccgaccgaaccacggccgccgccgctctgtgaggaggcgatgcacctgttgcttctcatctggccgaacgggttcctcctccatgctctgtggtggtggtggccaccatgggagagttctttggtttctctcgtcgcgccaagaatggcgtccttgtcgtcgtcgtcgccggagctcgccggtttggcggcgaagatcgtcttgatgtaggccttggaggccttgagcttgaggccgaggttgagctgcctcatgaacctgagcttccgcgaccacggcttcttctcgcacgccgccgcggcggcgtcggcgagcctggccgcgtactcctggaagtactcctccacgttgagctccccgctggcgtagcacgagttcgccggcgacgcggtgcacgagtcgtacggcgtcgccggcgccgtgcttatggcgagctgccgccgcccggcgccgccgacgacgacgcgcccgtcgagcagctcctccaccatctgtatccgcggcggcaggtgcagcggcagcagcttccccttgtagaacagctcgtccgccggcgacgccagcggctcctgctcccaccgggcgccgccgccgcccagcggccccgacatgtggaagtcgaactcgaactcacccggcgccgtcgccgcggcggcgctcgtcaggtccatgtcgatgtagtcctcctcctgcatcgcctcctgctgccccagctggtgcttgctcgccattgccaaggtgagagctcgtggctccggagctgaagctgagacaagagggcaggagacggtggctgcgtcttgctacttatattagccgcttaatcatggtggattaatgggcttagagcaaaaatggacacttggacagtgtcatggcatcaaatgaggcttaattacaaagtataaatactttctttatccttatttaatcatcacctaagattttcgaggtcttttcaaaataatcatcctataacaaatgtctctttatttgtttgtgtaaagagtaaatgagcatcattgaatatgctgcatgcaaccaatcaagattaatttttattgatgcaactacatgcaatatttaaaacttggtactattcacgagacacgaagcaacataccatcttaactaatgagaattaattatagaatgatggaaatttggttgtttcagtctctgtgtttaggtgatgatcaaaaataggatggaaggagtatcttgtaactttatatgtattgtgattacaggcgttttagcacataacacgatattccggatgccatgatcatatatctttaaaaaatcatgccgtaaatcaattgttctttatttcaccatacttaaaatcaaatcaaatcttgaaattaagattctttttattaaaaaaaatttagccatgtcagttaagattctcttatcttgcttaactttaatagttttgcacaacttaaaccatataaaggggttaatgaagtatgaaccggattaatcatactattatggtgggccctaccattagccgtatgatctgcctcttg

SEQ ID NO: 4274 - DNA, 5321 bp, Oryza sativa
cttacgaggtgagcccatccaaaaaagtgtaatcgcgaaaataaagattggatccagcacgacgctgcaagcgaaatacaccctaagctacaaaataaagactggggagtatagtccccaagcatgtcgccctcagcgcatcagtaccagcggcaaaagtaactaatcaagcaaatttaaggtggcaaaccatgcattgaaaggatcaaaaacacaagacaggaggtttttaacacagaactaacaccatgatgtttagctggataatagagtgcaattctagtagtagggttctacaagagtaaactcaacaagacaatattgccatggacttcatgaacttggagatactctatttcttcttctcggtgtgagcgtgaccgccaccagacctgcatatcacaaaagaaagttagtttaaattgaaaacaaagcacaaggctaaagaaaatataattgtaccaatactattaaaactcatcccgaatgtttcattttcatgaatttaagtttgtcaactttataataccattataaaatgataaacaatgaactgtacacatacaaaagtgatccttcctaaaacatatagtatatctaagcaacaatctgcactgtgccttaacattcattctttgtttaagacacacgacaggtccaattatgttacatatgatttattatttcctgcgcaatacaagaaatttgtacttataatcacaaatgaacactacctttcgaaaaaacacacatacaaagacactaaacaatatagaataaataaaacaaatggtagcacagttctgataataaactacaaactaacaattacaactaaactagttcaaacaatattaataggcacaaattcaattgcaacggaagacaaggtaaccaatagaataataacaggtgtttttatcaaggctggaagattacacacctcatcttcctgaggacaccagccatctcctctctcttcttcttggccctcttgtgggtgccaagctttctctttgccaccttcagtgcacgcttgtccttgccaactttgagaagctcagtgatacgcttctcatagggagcaaatccagcaacctccctgatcaagttcctgacaaaggtcaccctcttggtggatttctgcaaattaacatgccaacaaggtaagtgcaaatgcaataggaaataatggccagtaaactgcaaagcagataatataaagcaggatcaaatcattgaaccaaacaacatataatagaaaaatagcaaccctaggttttatgtaatgcaaacaaaaaaaataacacaagtgcaccttggatacctcagagaggaaattctgttgatacagaagcatgacttcacacacagaaacatggcaaacaatatcttgtcagctgtaagaataacgaactaaaaccactattcccatcattttaatgaatatctaggcatacacatgtagactaattgctgaaataaaaaaaaacttgctcccccacaaatacaaaggcaaagcaagaatagtacaaggggaaaaaatacagtaccaccgccatttctaaatacaaactggaaaaaaagacagaaatgaaatgcatactaggattgagaaggttgaggggtcaactatatcagtcaatactagcaggcatcacgccctctgcagcatacataggatccatgcaaaaatctcgacctacaacacgaatctacggagagaaacgaagctacgcactaaatccacacagatcaaacacggacaagcatcaccgcccagctcgtcgggctgaaacagctcgtgctacgggatcagaggcgcttacccccttgcggtcggacgggcgaggcggcagctcgcgcttggtgacgacgtggcccttgttgatgcccacgaagagcccggacttcggtgcgacggcgccatcggggagccctttttcctgcacgacaagcagcgggagaagatctacgtgagcggcgccgagggaggagagaggctagggtttcagatcggaggcggaggtggtggcggcggcggctggcttaccttacctgggagaaatgaagcggcggcggctagggaggaaaccctagcggaggagtgctcttatataggcgcgcgccgcgtcgcggtatccagggtgatagacgggctgggctaaatgggcctttgttgtgggcttgtggccatgtgatttccttgtgtttttcattttattttgggatggaataagtctatattacctccgttatctcttccttctcgttgaatcatctctcttaaccgcaaaacctagtataacgcctctcctatcttcgaaaaccaatgcaagacgatcatggttgattcgctgagtcagcaggtaaggcacacatgttagggactatcctctcctctagtttgcccctcacccacgcggtcttcgccttgtcgtcgtcctccttggccgatatgaagtatgagtccagcataccactatcggcattatatccgagcacgataacccacccccctgcatggttgtggagcaacgggtcggcactttgcagatttggtggcggtggcgatggcccatcgtagggcggaccacatgttgtcgtagcaggcggggtgctccggcgtgaggcagtaattaactaacaacacgaggacacaccgtcaggagtagaggcagttggcaaaccagtgctatagtgcatccatgggcgagccgatgatgaggttgtcgctatggaggtacaagacaacgggtagtagtttcttcttgccgccgcaaccatcaaggtcgagggaagtagaggcgcacccacggttcgatgcctgggtcgatggggatatcgcctccccgcgacgccaagggcaggacgtgagtgttcgggaagaggcactctacgctactgctttgatagcaccggataagcggcacgaacttggacgtgatctcgtcgttgctctatcctatatgcgcgacgcagagtcgcgcatatgcactttgtgggttagtgaggaacacgttgtaaccacgccctccctcccgatggatcaattcgtccccaccgagccctgctccaccgaccacctctctttgccatcttgtccttttcgtgttctcaccaccgtgccacatgtccacacttggggtggaacgaggaggaggaaaggagagaagtagatgaagcagatgcagagctgactagtggatcccacacaacccacctccttgatttacccacataggaagaagacagagtcctgacatgtgggccccacccactaacttagcgagtcaaccgtggtcagcctgccacataaaaaaaaagctctccgcaaaccatcgaaggagttgatttgcactaattttcgatgataggggaggttatttctggttttacggttgaagtaggctattcaagcatggaggaagagatgagagaggcaaaatacactttttacttttgggacattagagaggtgggccacctgttgattagggaagggaaatatgaactgggctttctcgttgagctttcctcgagcaaaggcctttgtacgtcattgatgggccgtcaaatcactacagttcaatgtgaggtgcttaactgcttaaggccacatgattgggcgtaaaatcaagagaaaatctcacgtgtacctgaaattttacccaatctcttttgtgccccggagttttgcttattttcttatgtacctctgaattttagtttgcatatcttccatacctgtttcattagttgatcataagttgactattgaattcttatcaaaaagtccattttgctattgggtatgaagaaacatataaatttatcgagtactataattatgatttacgacaaaaacgtagataagacactataaatatttatttattagttactaaaaattgtttatgtagcaaataaatagatttgtcttataaaaaatatgctgcagtatcgccatcaacaaaaatatgcttacttatacaatttaaaatttaaaaaatagttataattattttattttatatctaaaactaaattttatcgtaaacaatatctcgaacaacaaattcatagaaataaaagtctcataaaaaaaattctatactccaatagtatattttataatttatacatgtttcttcatatcaaaggacaaaatagtttttcactaagaatttaacggttaactaaacggaaggggtccaaactaaatttaagtggtatgtaaggaatgagcaaaattcagaaacataaaaggaatcgagcaatgtatcataggcatacatagaattttctctaaaatcaaacatctatattagccatatagattctcaagttctcaaccgactatctttttggattacgtgacttggtagctcggtggaatcaagaagtgaacttaaaacatctgtgctgtttcaactatggttttccagcgtcggaacgtgtacttaaacatctgtgctcggtacaaaaaaaatgctgtttcaggattaacgtccgttctacccccagagaaacggagagacagacagaagagcgaacaatctgttgcaacttgcaagcatcaagtataccactgcacaatatgcctatgcttacctgcaactgaccagcaatatcctttggcactactcttcttgtttacgggcacacagtagtaacagtggtactgatcagtaggcacgggctgactactagtcatccccattaacactaaccactgtttcccatcactggtgtagtagtaggccgctgggtttgagctgtgaacccctaatcatttcgtgagcgagacatggtgtacgctagctgtttatagtccagtagtacaattattattatggcaccggctttggccctatacaccacgtgaccacccatacgagaaaaaaaaaacactctccgtcccaaaataaatactatacaattagtagatttatgtgttctttactggctgtcttatttaaagaaaatttatgaccgatattttgattgttattatatgataaaatatgaatagtattttatacgtgacttaatttttaaacttttttataacttttttaaaaagagaatagtcaaacgttgaacatagaaatacgttaatgaatttattttacgatagagggtaaacctgcaaggctgcaccccgtgcagtcgtacttgcccaattgcgacggcttcccaggatagctcccagctaaaaccaagcacgagaaagcccaaataagccgtatatcatatatggacatgggcgtatatacgcatatacttcctccataaaaaaaactcaaccagctctctta

SEQ ID NO: 4275 - DNA, 5295 bp, Oryza sativa
taagcccttacttgtttgtactccacaaatcaagtgagaaatcaagtataagtcttgtagaactgttaggcctaggggtggaaacgagccggctcagcttgcaatggcctgtaacaaactaggcttggcttggctcggcttggttagagaaacgagctaaaatatgagctcggctcggctcggctcaagccagatcgggctggcttgcgagccttcccattgaagcatctcttcatatataatttgtaatcattaagaaaatcaagaataaatcatcgacatatataattaaaataagtccatatatttaattttttcaaaatctagatatgataaatttcatattgacaaataataacttcacaataaaataaaatcatccatataaagtacatgataaatttcatattgacaaataaaatttcatattgacaaataataacttcactataaaataaaatcattcatataattacataatagcctaggctcgcgagccaacccgggcttgactcattttagcaacgagctgaaatggagacttgggcttggctcgtttggcatttaagctgagccgagccaagcgagctcgagccaagaccgagctaagctcatgagtccgagcttctttcccgcccctggttaggccccatctttttttctcttacatattatatattactattacaagagtgttttctgaacttttaaatggctatttttttcctaaagaaaagttatatgtatataagtttcttaatatagttaatttaatagtttgtacccccaagtttgttaagaaaaccagacaatcaattatatacagacaaaattgatcaaaataaaaagataacaaaattaccccgagcagtcaacctgaaagtaagattattcagtggcggagctagaaacgctagaagaatttagttcaaggggaccaatattgttagtttttctatgtttgctagagttataggaaattcggtgtaaaatttgaagcctggggaggccaactggccaagcccctcctgtctccgccccctgagattattgttcattagcaaaatcaagacaagacaaggacaaccccagatgcacggactgaaaccaaaacaagaaggcaatccagcctccactctcgcatctgacgtcactgctttgctgctatcttcgcttccctggcgaacaagtatattatccaaacccttcctagcaacggccgttccttgtttgacttgttcttctagtaaagaaaaccaaaaccaaactataattaagcagcgtgaagttctttcttgggaaacaaggtcgtcggagatactagcagcgatgattaatgaattcacagtacaatatcttttcatatgcagctagcctgaaatgagctgcttttcctcatgaatgacggcctatatattccatcgccttttcaggttgtaagttgtaacaattggacgttggggttacacgcttcagcttacatagcctccaatatatttggtggcaccatgagagatgtggttataatcaattttcatttacaaagctatctatttttacatattttttcttcgtatttaaatgcatgatgctattgatttttgacaaactatttataatattaaacaaattaatataaatacaaaatatataagtaatgtttaaattaccttaactgtagatgtcaaacatttggtaacgaaaatatagtatttattagattttcagatctaaccattgatttaaacatatggtgttatcttgatcattgatctataccgtttatcacatggagaatttgtgttaaataaaacatggcattgcaaatactataccgaaaaccctctttgattaaacttttttttacacaatataaaaagtttaaaatgttacttttatcatttatacacaatgttactttttatctgagtgtgcgtgcgttgtgagtgtctacaccgtactgtgtaattctaaaaataaaatgtacgcttcctgaactgctcaacaatgtgtttttataaaaaaataattttatataaaattacttcaaaattatattaatcctttttttattttaactaatatttaattaatcaaattattcagttttacgtgcgaaaaggtgaagtttctaacctcaatctccgagcttcaacgcagccagggtgttaccctagctgatgggacggaaaatgttaaaaaaagagagcccaacacacgattcggcgacctcacaccgtccaacaatttcgatccgacggcccaaaccgccgcaacgacatcccaagagagcggagctcggatcggaatcccgtgagcgcccccccaccgaaaccgcggtcgccttcgtccgaatcgtctcggtaaaacgccttctccccctcctcttccgccgccgcggcgatccctctttcacctccacctccacctgctcaggacgcggccacgcagtagtcgcggagaaaagaaaccgaaaagaaaaaaaaaaatctagctacgcatctcggcccggcccccccgccgccgcgcgctcggatcccccgacggctcgccgccacggcgccgccgccgccatgagcctcgcctcgctcgcccgcgcgctctcccgccgctccgcgccctcctcctcccgcgcgcgccaggcaagtctccgccctctccctcttatcttccctgaatcttccgccaccgcgtctgggtggggggctgattgtgtggatggcttttttttagggtttctccctcggtgggctaggtgggaccaccaggtcgccgccgccgccgtcgtcgccgctcccatcgctccatggcggggagggcggtgggctgggattgggattcgtccgcgggtacctgacggcggcgctggggaggcccgccgcggtgaaggctgggacagactggaggtccatcctcgcgaacccgcagttccggaggctcttctctgacgggtccaagaagagtgagtcccatccgcccttttttgatcggttcggatggatggctttaggtgctaaaagtttgtggttgtgtttttgtgtgtgtgtgtgtatttttatgatttttagattacgagaactactaccccaagggcaagaaggaggcgccgaagggggatgggagtaacaagtctgattcgaagcgtaagttgccgtcttttttttctcggttgcatcatttgtttgtgtggagaatggtgatcatgttgtgaaattaatagaatgcactgcacagcttttaatacaatagcatgtaactggtgtactgattgtcattgaaccaacgaggtgaataatcaggacatgttatttttcttgcgctgcaagtgcttggtcgactgatgccaaatggaaaaatagcttgtgtagtgcaaccaatgatggcttgtgagcctatggtgtacaaccacttacttgtcagtgttcttaaaaaacgaatgcaaactagatccttgttcagttttaaaaaatgcagggatacactgtaatttagtataaaaactcagaacctcagtggttatctaacttaagaggctgaaccgctgaaccaaataaacacagtagcacagaaagttccagattttggtctttgctagatcgttagttctctggaaattaaaacgtgccgctgacctagcactttcatcttaataatttctttgggagattagtacgggttttgatggagattggagcctagattttagtggctggaatgccaagagtccttttgagggcaacaaaataataaactcttagtgcatcattgcgtgtgggctaatgtctggtttgatatgcagaagattcaagtacagacgatcaatggaatttccaggagactgcctcaaagcaattgcaaaattttctggcacctctactgtttcttggactgatgctctcgtccttgtcgtcgagctcatcagaccaaaaggaggtaatttttcactcccttctgagttctgacagattatattcacttgttctgctatgcacatgaatctcttcctatatactagaaaaaagtggatggaagaaaactatgttgcgattataaggactataaaagttgtacttaccccaatcaaattactgcaatcagctattgagcattctgtaataaatagttcaatacaagcagtactagatccagatggcagcaatacattcttctcaccgtgaagttttatcttaaactgacaaatggtagagaaaatacctgccgctcctctttagatggtttcaccttatgcctgcaccagtcaacatatagcagacaactgattttgtggttgcatatttattctttttaaatctatggtgaacaattattctcgatcttaaatggaatctcaagatattttgcttcaaatttctgcagataagcttccaggaattcaagaataagctactagaacctggtttagttgaccgcattgttgtttcaaataaatcagtggcaaaggtctatgtcaggagttcaccacagtcgaacagccaaggtcagaacactgatgccatcattaccaccaatgatgttccgagcaagcatactcccagcagatacaagtattacttcaatattggaagtgttgattcctttgaagaaaagttagaggaagcccaggaagctttgggagtagatccacatgattttgttccagtaacttatgttgctgaagtgaattggttccaagaagtaatgagatttgccccaacagtctttcttgttgggctaatatatttgatgagcaaaagaatgcagagtggttttaatattggaggtggacctggcaagggtggccgtggtatttttaatattggaaaagctcaggtgacgaagatggacaaaaattccaaaaacaaggttagttcattctcttcttctgttctactttgaaacgactgtcaaatatgaaatatatacatgcacattgattctcaagctctgctagttccacctattcaataatgcagtagctactgcttaaacgttgttaagttacaataaaaactgtataatgacaagcttttctgttggtccaggtgttttttaaggatgtagctggttgtgatgaagctaagcaagaaataatggagtttgtgcatttccttaagaatcccaagaagtatgaagagttaggagctaagataccaaaaggtgccttgcttgtgggtcctcctggaacaggcaagactctgcttgccaaagctacagcaggagagtctggtgtgcccttcctgtctatttctggatcagatttcatggaaatgtttgttggggttggaccatccaggg

SEQ ID NO: 4276 - DNA, 1379 bp, Oryza sativa
agattaccatgcaacattttgaatctgcaattgatagaattattggtggtttggagaagaaaaacaaggtaatgtgaatatgtgattatgtgccagtttgaagataatctactccaaactgttaaagcaataaatgcaacctgcaaagctgattagtgcctgatttacacattactccagcattgtgtagttctgtatagtgctctcatgtgaaccggttatgctctattttgatacacattttttgctggtttaatgactatggaagttttgtttttttaaaaaaacaaaaacaaaagaacggtacataatgactagtgcattcattaagttcctgttctaggtggaccttaattaagttaagtgatttgtgaatgtggcatgatagttcgtgtagatcactagatggttgatcatgcatgaatgtttaggtgagagtgctgtaaacaaggtaaactatataaaataagtagtggatctacatgcaaatataaaaaactctaggtcttactcagaaatggatggtcacttaagtgtacgcaaaataatgatttctgaaatttgtggctttgcacacacaatatctgcagtatgtttcccttttggaatgcccaagccataactgttttttcacctttaacttgttccatagtaaatatataaaatatctactttcagtaagggagtaatgcacagatcaatgcttagtaacttagtaactttcttttatatgaaatgacttgttctcaacatgtgatagtcatgtttccccatttatttttcttacctcttagcctgttaatcaaattgcaggtcatcagcaaactggagcgccgcactgttgcttaccatgaatctggtcatgctgttgctggatggtttttagagcatgcagagcctcttctgaaagttacaattgttccccgtggaacagctgctttaggatttgcacagtatgttccaaatgaaaatcttttgatgacaaaagaacagctttttgatatgacatgcatgacattaggtggccgagctgcagaggaggtacacactaattcttttacagtcttatgactgatttatgttaatagctaccttttgtggatatatctttcaaattcctactgctgagtgctgacacaccatttcttttcagtcttcttatgacagcatgcgtgttatgtttttatgactagaacgaatacaaggtttttctgcatttgacagctgtaaaaaaattaaaaaaaaatggttaactaggttacagtttacacattcaattatgatgacttggtgaatacgagtaatattatcacaatttggtagtcaaactcttgttggtttggttacatcaagacttcaaccatttatgactctaacca

SEQ ID NO: 4277 - DNA, 8736 bp, Oryza sativa
ctttatatgtatgtatgattaaaaaaaattaagtgagaactatatgatgttcccatagttctgttgccaatagcgaaaactcaagcccccgtcgtccactgctagatccgtccctgagcacgttggcatatattagagtttgtgtcgaatatgtgtatgtagtcggttacagtttaggattagagtatgagttggattctatactaggttctctcataaataaaggggcgtgcctgttgtaaccgcatggcgacttagtatagcgagaggaagcggctgccggcggcgaccggccgtgagtcgttgtaactctgatacgctgtatatgctggatcggggaggagcacccgtaatcagtgcctcggagatgtaggcctcggctgaactccgttatcaaatatcgtgcctcggtgtcgtcatcatgtttggatctatggtgttttcttccgcgtttagctaccgatgtcgatttcagggctggttttataacagcatatttgtggtgaactcgtggccattaaaccgagccacgagattcgcaaaggccgaattcggacgcctgagccgtcattttgctcccccaaccataacctattccttggatagcaatcaagcatagcataacacagagacggacaaaaagcatgttggcttagcgagtaaagtgtccttgttaagtgactgcacatatagccggtcttttcatatatatcatgatcaaattgtgtgagccccattgtggatgatgcaacccatgcgtgtcagcgtgtatatggcttctgatggcatgggagtaagtaaaaaggtccgggtagtaccgatctgtagtaatttcgtttccggtgtgccaagccgtttagccgtcgtcgtgcgctaaccgcatgcccagctctccctttttcttcccccaagcatgatccaacaatgatgaaaaagatgcttgaaaaagatgaccaaagggggcttatcaccatttcttgttttagctgtgacagttatgtgcatcctaggctcctactctctctttatctttttttaatattgtaagacttttttgatttttttagtcaaaacattttaaaatctgatcatgttttatagaataaaatagctacatttacatcatcaaaatagtttaattaaatataatattgaatatattttgatattttgtgctgaaaacgttgctacggttttctataaatttgatcagagttaaaaaaatgtttgaataagaaaaagaaaatcaaaacataatggctatgttcggctacactgatatttaccagctgtagtgcagcggctgtgtagagcagctgaacagacccaatatgaaacagagagagtaggtagtagctccatttcttcgtattcctctgaatattattcgaaagcacgggcatatcactatttactggtaaaagggcatggtttttcttttatttatccaacatattagtactgcagccatttgcttacatcaagttgcttagacaacttgttttaaataatatactataaaatttaatctacttttataaataagttgatcatccatcaatcttcatccgcatgtaagagcactagatcagcaaacggttcagagaaacaattgcctagggtttgagtggaactcgagtattgattgagtgaaaattgcctatggttcagataaacaatcttgaatgctcatgtgttggggagttagccatcagccctgtattgattgacggtactaagctcctacattatgtcggcaactgaacctacttccctaactctatgagtagataattgccgtttgatcagggaactatacttatggttgacattttgttctaatcacccaccaggcttctacaacatgctttccagagaactaaatttctcgtgtgcatgctaccaaactaaaatgtagacaacaggtatcaaaagtgagaattttgttttggggaattgagaaaagttgttaaggtatgcagttcaatgaaggattaatgtactatacttcacatccatgcagccatacacacctaacaccttcaaagggaaagaaagtgaagagatctagcgtggatggaggcaagtagctcatcctagtgacagatatgagtttgttcaggcatccttctctgaatccggaagaggcttgggggaagaggaaaacatgaccaaacttcacacgcgacgagtacctgctaagcctatctcacacgaattctcccttgattttgatcgagcccatgcatgctccacagactgtttttttgttggccatttgcaatgcagtcatccaggatgatgatcaacagagtaacagactaccttcctcctcgtcaagtcactgtcttgcgagtcttttgttatttgctcaattgctcgtgcagtcgcttggcatgtaagaataaggttaggaaaacctatgctagctcagctagctgaagaaaagttgtggcctgactagcagtggatgcactgcaccagaggcggtcactcccttctctgaacttttcccaaaaattcctctctcaaagcaagaattcaactactgttgatttaacatgtttctgatgggttggagcgagagaaaaagtttcagataaaaccacactgttaattgatcaataatcactgttccttctcaagtagtcaatctaataatcctgtatatattttctgtttgttaagcacttttatggagctttaattgtgagctactgttgtggtgccgtcgttcggttccatcaatcaaatctagctaaccatgccggcatgcccaataatgctgttccaaatttagattttgcgtggtttccactacaatacataataagaaagtagtagaatttaatcttagaaatttaagtaagaggcttcagtctattcttcttcttttcttccttatcacaaaaagaatgtagtacctaattattgctgtgtttagttataggataattgcagcagagaaagattgtgcgtgatgattaaggcatgaaaatcttaaacaactattcaatgtgatgaagcagcatacaagtatacaactagtcatgcaccctgcaggttgactttagccacactccaaagctagctacagagaatgctttgcatggccaacctctcgagtctcgatcggctggtgcagctagctgcactgcatgcgacgttcaggcaacccagctcgtatcatgccatatccatccaaagataatcgatcgagtattaattcgagcaggccatcaccaaatgaaaggaactaaacaaagctagactaagtacagtattgaagccaacaagaatatgtagctatcttaccagaaaaaggttaatgaacttccttttgtgtagataactttgcatgcttctggccaacacactgccattgcaagcatagctcctcgatctcatgtatatatacacacctcgagttatggccataccatcacaagctgagctagctaagagcgagcttcattaacatacgagacagagaggtcagtgaaggtagcaatggcggcagcctcctctgttcttcgttgctgcctcctcgtcgcagcactgatgacgctgtccgcaatgggagctgaagccatcacaaggcagtacctattcgatgtaagtgcatgcatatccacggtgtggtgtatcacatcgatacacaagtttcgccaaaaaaaaccaacgcgaatttgccgtgacatgcatggcaggtgcaaacgacgagcgtgacgcggctgtgcagcacgaagagcatcgtgacggtgaacgggcagtacccgggccccacgctgttcgcccgcgagggcgaccacgtcgaggtcacggtcgtcaaccactccccctacaacatgagcatccactggtacgtacgcctcgcgatttccaccgtgttttgacgccaaaaaacccagtgttttcaccgtgtgtgtctcacgtacgtgtgcgtgcaggcacgggatccggcagctgctgagcgggtgggcggacgggccgtcgtacatcacgcagtgcccgatccagcccgggggaagctacgtgtacaggttcaccatcaccgggcagcgtggcacgctgtggtggcacgcgcacatctcctggctgcgcgccaccgtgcatggccccatggtcatcttgccccctgccggcgtcgggtacccgttcccggcgccgcatgaggaggtgcccatcatgttcggcgagtggtggaacaacgacacggaggcggtgatcagccaggcgctccagaccggcggcgggcccaacatctccgacgcctacaccctcaacggcctccctggccccctctacaactgctcagcccaaggtgattaattagtgactgattttgtttaatttagtcgtgtcacaatgtgtgacaatgtgtggtggtttggctgtgcagacacgtttaagctgaaggtgaagcccgggaagacgtacatgctgaggctcatcaacgctgcactcaacgacgagctcttcttctccatcgccaaccacacgctcaccgtggtcgacgtcgacgcgctctacgtcaagcccttcaccgtcgacacgctcatcatcgcgccgggccagaccagcaacgtgcttctcaccgccaagccgacgtacccgggcgccagctactacatgctggctcgcccgtacaccaccacgcagggcaccttcgacaacaccaccgtcgccggcgtcctcgagtacgacgacccctgccccaccaccgccgccggcaagatcgtccccatcttctcccctacgctgccgcagatcaacgacaccaacgccgtctccaacttcaccgccaagctccgcagcctggccagcgccgggtacccggcggcggtgccgcagcaggtggatcaccgcttcttcttcaccgtggggctcggcacccacccctgcgccgtcaacgggacgtgccagggacccaacggctcccggttcgccgcctccatcaacaacgtctccttcgtgctcccggcgacggcgctgctccagtcgcacttcgccggcaagtccaagggcgtgtacgcctccaacttcccgtactacccgctgaacccgttcaactacaccggcacgccgccgaacaacaccaacgtgatgaacgggaccaaggtgctcgtgctgccgtacggcgccaacgtcgagctggtgatgcaggacaccagcattcttggcgccgagagccacccgctgcacctgcacggcttcaacttcttcgtcgtcggccagggcttcggcaactttgaccccatcaacgacccggccaagttcaacctctacgaccccgtcgagcgcaacaccgtcggcgtgcccgccggcggctgggtcgccatccgcttccacgcagacaacccaggcatgtactctgaaccacatcgattcccctgcgattccacatttgcaccaacttaatttagctttagttaatcagtttgcaattataactcatcaaagatacttatgccgatacgattgcacgatctcaggtgtgtggttcatgcattgtcacttggaggtgcacatgagctggggactgaaaatggcgtggctggtgctggatggcagccgtcctgaccagaagctcccgcctccaccgttggatctcccaaaatgctaggaataaaactcaagatcaatggtcaatgattggatcacttcgcactgcccctgctcacttgtccgtcagatatttttctgcttcgatttctcgtcgttaactggcttgcttaatttgttgcttttttgataaacttatttctcaggcgattgacagtttgtttgtcatcagttagctccggtgttttgcatgaagtttaaatctttggtgttgtgaggaaatttgatttctttgattcgcagggcttgactcttaggactgcttactgtaactcaaagctcgcgggcttttgcatcttgtaatgtatctcaatgtattttgcactaataaaatgtacttgttattgaattctgtcaggcgcatgagtccatatcaattttcagttcatttacctgtttagttatagcgaaatatatatgtcatctttagaactagcatggtggctcgcgcaaattgcgcggttagcatcattatattttctctcatataataacatatatgttttctcattatattattaaaatatattacaatgacaacataattttaaattttgcaataactttacgaaacaactaatgtgtaatattcatattgtattttatatacgtgttagttattaattatttttaatatcaaaatttagttatttgtaaattatatatattcctatatggactctagacttgtgttttaatatttctttttttaattctgaatttttattatttctaattatatttctatgtggactctaaactcatctttcaataatctttaatttttaatttcaaatttcagttacttctaaattgtattcctatattgactttaaactcttcttctcatgtttttcttaatttcgaattttagttatttgtaaattgtatttttatatggactctaaacactacttttcattttattatgtttattccgaattttagttagttttaaattcctatatagactctatactctacttctaatattcattattttttaattccgaatttctatttttttttcttaattgtatttctatactctacttataatattccttatttttcattccgaatttctattatttcctaattgtatttctataagtactctatactctacttctaatattcctaatttttttaattccaaattttagttatttcctaattgtatttctatatggactctagtctcctcttctaatattccttattttttaattccgaatttcaactatttctaagttgtatttctatatggactctagtcttctcttctaatattccttatttttttaattccgaattttaactatttcttctaattgtatttctatatggactctagtctcctcttctaatattccttattttttaattccgaaatttaactatttctaaattgtatttctatattgactctagtctcctcttctaatattccttattttttaattccgaatttcagctatttctaaattgtatttctatatggactctgacttttctttttctccgattaatgtgagaatttttagaccatgagagcgaacgtggaggctcctttttctattcctttaataatataatagatttgggactctctacaactttgtgtgcttaatatttgaacaaataattcaatagacaaaggcaaacaaagcaaagctagtacaatctcattgttatgtataggtgaattttcaatgttttgtcattagcttaattaatcgcttggctaaactggttggtgcacgtaatacagttcacttttggtcttcgcttccgctgctcttcgattgctatggaacacttgagatcttaacttttttgttgatcgattgatttttattttgtcagttatttccttttctcaaaggaagctctcgcattttttttccccaaacagactgaaacaaaggttatttagttacacgggaaatcatggcctcatgggtagcggagaattacgggagtttttatgttaccatgggagaaaattgcaaacttctcaagcagaccctaagtgaatttgttgtaggatcgagctctcgtcataggtccaatttaaatcaaaattgctttattatatgtgcatccacctttttattcaaaatagcagatcgctatctgccctcaaagtagctctgccagatttctgaaacgccattgaattcaattaatgattttcataataagggtagtagtagaaacttctggattaattacttacgggatttcgtcatataatagaccccgataacttatccagcttcataaccacgtcaaacgtcagattggaaggactctatctcgagacttctcgtcattgacatcatgaaatcacaatagccaacaacgaaaatgtccgaaagtctgttgaaaagctgacgccaggacaagctcaaatcatgatcctcgactagctcttcgtattcatttaaaacagggaaacactatggccggcgaaaagccaactgggttcccacatcagagattaggcgagggcgttaatttatacaaattttcttatgctgcaacaacaaacaagaatctatcgaataggagtgcaatttacagctgtaaatttgctgcaggattacgtgggtacaacctcgccaagcgagggtgttccgtcatcatcaggctgaggggttttggccgcctcttggttcttgctgtcttcttcatcctggaacccttgcttgaagaggtcgtagttagttggctcggatgccttgaaaggccgttctcctaataccctaaccaaatcgtcctggtggaggacctccttctcaagcagcatttcagcgattttggcgacttgctccttgtgctcagttatcagttccactgtttttttgtacgccttgccaacccattccctcacctcatcgtcgatgatggatgctgtttggttgctgtaaggtttggtcatttcaaagccatcgtccctctgagggaaggacagaagcccaaccttttcgctgaaaccgtatacagcaacctgcgcataggtcattttggtaactttctccaggtcattctgagcaccagtggagatccttccaatcaaaacctgtaacaaggcaatcaaaacat

SEQ ID NO: 4278 - DNA, 1204 bp, Oryza sativa
ggtcatttttctatataacttttttcccaatagcttgaaattgattttgaatatatgacaaatctaaacagcatttgtaaatactaaatgatttcaaataggaatatggacaacaaaaaagttgatcctctcatcaagatctacaacttttcttttggtcacttcttcatccgataaagtgatagttatattattcacaaaaatcacatttctctcatctggtttataaacatcaacacatatatgtcaattttataaacattggtactatcactttatcggatgaagaagtgaccaaaataaaagttgtagatcttgataagttatacaactttgttgtttatggctttcccatttgaaatcagttagtatttacaaatgctgtttagatttgtcatattgtcaaaatcaatttcaagctgttgggaacaaagttatatagacaaatgaccaaaataaaagttgtagatcttgatgagaggatcaactttgttgttgaccatattcccatttgaaatcatttagtatttacaaatgctgtttagatttatcatatattcaaaatcaatttcaagctgttgggaaaaaagttatatagaaaaatgaccaaaataaaagttgtagattttgataacctctacaattttgttgttcaccatatttcgatttgaaattatttagtatctaaaaatgtattatgactaataaaatgaattattatacaacagctatatattttgtacgcacaaatataaagatttgtttggaaaaatggaaaaatagtcatcggtgacgggccttagttaaagcccgatagagatttatctatctctatcgggcattatcttagggcccgtcacagatgactcatctgtgacgggcctgaatgtcatctcaatcgggcattagtatggagcccgtcaccgatgagtcatctgtgacgggccctacggcaaagcccgatagagatgactcatcactctactataactagggtttctcagatcggatcgaaaatttttctaagtcccgctacagtttcccgcctccttagaaccctagcgccgccgccaactcctacttcgccgccgtcgtcctccctcgccgccaccgccaccgagaccgccaccgccgccaccgagcccgccgccgccgacaccgagcctgccgcctccaccgagcccggtgccggctccaccgaccg

SEQ ID NO: 4279 - DNA, 1770 bp, Oryza sativa
agggcacgtactcctaggactgggaacaaaatccctaaagaacggttccgtataacagcggtggatgccgtagggttgccaacatctccaaagaaaatattgagccgatttaggtctatctgcggggtcatagggaggcagaaattcagtattctgcaagatgacatcaagctcatgccgaccgcaaagaaggacattgcttggctaacgttcaaggagagtttcgattatcctgtggagcatgaggaccgtctcaggcgggctgctttcaaggttatgggcaatgcttggaagaacttcaagactaagctagtcggcgagttcatctacaacccggcgaatccagatccaagagagaaatttccttggatcacggaacaggtctaggaggaattccatgcgaagaagtcgacccccaagtccagagctagtagcgaggcatatcgcttgctccagaccaagaaccagcatccacatcggcttggcaccgccggatatgccggtaaggaagaggaatggtagcgtgaggatgaagaagcggaggaatcgaacacgccgctcgtgtttggtgatatcccacaccctcgggttaggaactgggccagggccaagtaccagaagaaggatgatggcacaatcttcatgccaaatccagaagatcaacgagtgtacgaagctatagtaagtgtgtagtccaactagatgttcgcattgtttccgatcatgcagtttatttaaccccactaaattgtaatgcagaaggagttggttgccgatcaacaagccttgcaagaggccttctctcaaagacgcgaggacgacctcctcacgaaagcgttgggcaacaaggaacaccgtggacggacacggggcattgggtcttctgttccctggaaatatggatttccagactacgcgtggcagtacaagaagcggacttccaacaaggcggagaaagatgcacgccttgaagccaagatctgggcgtcgataagagctgagctgacatctgaattcgacgaaaagctcgagtcgatgagggccaagattaggcaagagatccgagaagagcaacagaacccccaggccgccgctgctgctgcgcacgaagagttaggaagtcccacccaaaaacgcagcagttgcgcatcaactgaggtggcggaaaatccaacatcggtcgacaacgccatcgaccacataatggtaaaagtttcgtccacaatgcatgaaagacttaacgaatccatatgatatataatattctaaaaaaattgattaatctatcgcaggaaccaacgagctgcaccctcacagttagggtgatgccgaccttcacggttccagcagccgagggacttgcgtacaagccgaccccagagacaagagtgcatggagcgcaactcaggggcgactaagcaaaagttcaagtcaactcggtgaagccggaatacgagctattcccactaaagtatccaccgaacgacgaggtcctctcactaggaaatgcccgtggtaccttcatccaatggcccaaggacctcattgagatcagggttacagcgaggccaaccactgcagcaggcggtcgtccaccaaagagacccgcctctgctcctttagcccctcctgctcaagatcgtcatgcacaatcttacgatgtgcagttgcagtacgacacggattttggggaggaccgaacggaggctgacagcaaggcgattcatgaacccccaccgatgaaaaagagcaggaaggcacactcttccc

SEQ ID NO: 4280 - DNA, 1839 bp, Oryza sativa
ggagaaaatatttcgctgatcagcatgcttacctaacctagttgagtgtgaagagaatacagcagtaaacgcccaatataagttacctgacagcactaatgtatgacggccacctgcagctacttccactatcttcactcctgtattaaatgtcacaacacaaggtggtgctgaaagattttcatcactagatgattcactttcagccccgtgtttcgatgaagataacctccgtcgctttgtgctatcctcagaacttcggctttcagcaggaccagatgctgccttggtgcttgtcctagacacctttgacctggggctcactgtaatcgagtttcctatattacctctgtaaacaacggatgtagaaaagcttatattttttatgtagaactgtaaagaaataagtagtaagcaccaccaccttggtcagtggcaaccccactttgccttttatcacaatccatagccccagttgcagaatggtctgcaatgacccttccagttggaacgcattctttccaaccccatgtgtagacatcacctttacctgcttgagtggaattcaatcagtgtaatgcaaagttatgtgcagttttcactaaaatgcatggatcaatacacaacctgttattgcaacacaatgtgcccatccagcgtcagcccttacaattgcaatatcactaggaagaggaaatgcctccggagtttcctgagaggaacaagatgtttacttcagtaacagtttataagtttatcaagaacacgttggaaacaaacaattagcccaaaggtacagagatacctcatgcttcccagcagtcacgtaactttgtcccatatcatcggtagagccccaagtgaagagttttccttgctctgcatcaggcagatacaagctgtgtcagtgtcaagctcagttgacgtacggagtaaaacgctaatagcacacaatccgaccaagcaaaaatgcaatcttctaatggttgacagaactacctaaaaacatagaataatccttggagtaatggagttgttatggaaaattagtctaactaaaagcaattccacaaaaatacactagctgacaatatcacataacacattcccacaacacaatacggggcaaaacagtgttctgatattctctgtcgctcgaccaaaaaaaaaagtcgaaatcactagctgcttgcactatcaatcacaacttagtcagacagcatattccaccctgatcaaccaccaatcaggaaaatagtcatacagcacattccaccctcatcaaccacctatccagaaaaaaaaatcggcaataactgaacacccggcactaagctgctcaccaatcaattcacagacaatcactcagattcttaagaccttttttatccaattttatactcgcgttttcatggaacccaccatatacacaaaaatccgcacaactaactactaaaccactgcacgctaatcatccccgataataaaaacctcacacaaaccacaccagcaccctactagatctcccacgaccctcttggtgccacagatcgaacgaactcgaacgcaacgataacatcaagcaatggaagcacaggaacgagagagaaaggcaacatcaccggagacggccatcgcgaagccgcacccgccgccggccacatccctccacgcatcaccggccgccgcggccgcgtccggcatcctcacgggcaccggccccagcagcggcgaccgctgctgcgacaccccgggcaggtacccccacatcagcaccacccgctccttcctcctccccgcgcctcccccatcctcctccatctcctccccctcccctcc

SEQ ID NO: 4281 - DNA, 16062 bp, Oryza sativa
cgtggctggctgtgacagtagcacccgccaattttttaagtgtgggcatgttcggattaggacggtgatttggcttaaagaaatgttggacttgtatggttttgtaccctactaataagttgttagtgtcaaactctagtcaagttttggcgctactaatattttgataggtggaattgtaaatgtgtgtctttgaatttatgctaattgagagataaattttaaattatggtaaaaaatattctagtattatgccaaattaagtataagtattaccaaacatttgtcttcaaaccaaatcatcacatttactatttatactaaaaaaattggtatgataacactttggtatcaaaccaaaacgccccgttaagtatcagtgtatcacagtggctgcagctcacgtaaggggaaaaaaaagtataatcgctgatttaactctatgcctcttgactctcggtctctcgggtataagctacggagtacgagaggagctgatcctgctattacgagtcgctaaagtagcactgttgttacgagtacgtaataaatgtcgtattaggtatgcgaattttagtccgaaatgcacataaatgtactgttgaaatgctaccctagcacgaaccatgttgaatgcattgctgaagcgtttcgaaatgagcattttaaatgcgggaaaattttcgattctaaaatgttacggtacggtgtggagtaagagcaggtacaatagcatactataaactaactataaacatatattgagcagataaaaaaggaaagagaaaagcagcaggctacagatttgtaactagctgcagcacagacttcaatacacaacgtgtatatgacagatgagactaggtattagtagtgttatatgtttatagctaactattatatgaattggctattaaattaactatagataatttgaagctactattttttttgaacagtcagggcgttgccgatgttttatataaaaaaagaagtgttccattttaagaagagaatgggaccaaaccatacaatgcacaattaattaggaaaactgggcaaaaaccatggctatcgagacattccaccagctaaactaagctaccaaagaaacgagagcaggacaaccaggctcaacactcaacaaaaaaagttcacatgaacatgcaacaagctgaaaagaaaacaagtttcccaaacattggcaaatacgcaacgttatcgtcatcatatcaaaacttgggcgactccgacttcgtcaagaacactagggtcaggacagcaacctagcccatgccaaagcacaaatcaactaggctcatgtcatcgttgccacacgtcgagccccaccgacgtcgcagctccaacttcgcgaccaccagtctcgttaaagcaaggcctggccaaatcgacaaaccttgtagcctaaaagcttgtaaccccatactagaacgaaacacaagagacggaattcaactcgggccatcgttgctaagctcgtcgaccgcctcgacgcaacaactccaacttcccgaaggccctccttaggtgtcaaagcagggccaaactagagattggctcggatttccagagaaaccgtaacacgatagaacatgaaggtataaaaagacgcctcgagggaggaaacaacgctcgcgggcgtcgccgtctacgccttggagcttgttgactataagatacaatcgtagagaccaacctcttcgataaatagagcctgcgagggtaattatatgcccttgaagagtattatttaatatgtcctaaaatataaaagattttagttagatatgatatattataatattacgaatctaaactactggaatatatctaattcaatcaaaatcattatgttttaagacaggtgatgtactaatattcaacagtaataaaacttcaattagacgcctctttctagataattctcggaggaacgaaaatctaattcaaagctacgagaattcaagaacaagctagaattaatcgatatgatcacttggcgtttgatccatgcgccatcttgtcacaagatcgctttggcatttccaaccaaagcatcaacgggccaagataggccaacttccgaaaggaagtagcccatggacgtttcatttgaaaaggaaataaggaatcacatcagcacagagtattactcttgatactcttgaatcgttgtagaacgttctgggctccccgagacgtgcgatccatgttctaatcggatcgaacggcctagaaacgccgtggttgagagcgctctggcagtttcgagctgacgactcgatgaccttcactgctaaaggatgctttccttgctgcaatattaaaggaggacgcttcgatcgactcatcatcgtattcttgtagtactgaagactgaagtcgcagcaggttttggtttggtcttttttgtgaacagccatgtcgtcgtcgatggcgtcggcggcgccggagccgccgttccggccgagggagaagctggtggagaagcagaggtacttccagagcgtgcacaagccgacgtacctgaaggggcgctacgacgccatcgcctccgtcgccatcccgctcgccctcgccgcctccagcgtgttcctcgtcgtaagtcatgaatcaaagcctgaaactcgagacgcgtttcttcccaaacctgaaacttcgggtgtgtttagttcacgctaaaattggaagtttggttgaaattgaaacgatgtgatgaaaaagttgaaagtttatttttttttgaaggactcgcacaagacggtgcgaagttctattgatagagcaggaaaaaaattacaagattacaaccctggaggatcgtaaccaggaaaaaagaaaaaatgtaccaccacccacacaccgacagcgccaacacacaagcccgggagaaggctagcaccggaccggccgccgctaatcgtgaccgaccgtcgctagaccaacaattcaccaccactcaacctctgccgccatgtgggatcactgcaccagcgccccaccgccggccagcctttatgcgccaaaaaccgccacatccaccggcagctcttccctcgcgcaaaggtcgcctcctccaccgccggccgcgcctctcgcgccaagccggcctcctccaccggacgcgcccctcgcgccaatccggcttccctccatcggccgcgcctctcgcgccaaaccggcctccatctccgccgctcgcgcctctcgcgccgagccggcctctgctgccatcggctgcgtctctatgtgccaagccggcctccgacccctcctctaaacactgtgcgccgccggatgcggctgtctgccatgcccccgctagccgtccgagattgccatgcctccccataccgtggtgacggtcgccaccaccacagccactgctgcccttccatccccgccgccatctcaccatcctctcgtcctttctcgccgtcgtcgagctccaatggcacacggcgcagaccacccaccgtggtagcccgcgccgccgtcgccgcgagctcgtcaccaccatcgccgcgacaaacagactcctccggcgttggttccgccgccggcgcggccaggttcgccacaccgacgccatcccctcgccacctccgccgccaccacagcagccgctgctacccttccatccccgccgccattttgtcatcctcccgcaccttgtctctatcgtcgagcttcgacgacacacggcgcagacggcccaccgtggtagcccacgccgccgtcactgcgaactcgtcgccaccaccgtcgcgaccgccagacctccgggcgctggatccgccgtcggcgcggccaggttcacctcaccgacgccatccccttgccgccctcgccgtcgtcgccatccccgccaccagacgccgccgccggtcgccgtcccgccagatccaggcgcagatctggcggtttcctccgccgccgccgccaacgcctcgacgccgctgccaccaccaccagacaccgccgccgcaccgctcaaccccgccgccggctgctccaccgccagatccggccggcggcacggatctggccagttccgccgccctcgagcaggtccccctcccatgcccgagcgcgaggacaaagccccgccgccgccgtccttgtggccgcgcagctttgccggcagccgctcgagcggtggcgaggcagaggaggaggaaaggggagacgagcgccggtgaggtcgtcgcctcccggtcgcccgtggggggaggggcgacacgagaggaaacaggtcaatattttgttctcgtgttttagttggaagtttatttgtgtatgaaagttttgatgtgatgaaaaagttgaaagtttgaaggcattgacgtgcattgagatttcactccaggcattgacgtgctgttggttctgcgttttcgtgtatgcttgcgtgcaggggcgcgggatttacaacatgtctcatggcatcggccggaaggagtgatgaggctaactgattagctatgtgtaactggaggagctgatcttgtgttacagtgacagactgacagtgtgtcagctacatgtaacctctcttgtgtgtaattataggagtattagtgctacttatgtaaacgtgttggactccaataggagtgaatactgttgtccacttcaattgagcttgagtgagtgattgaagcatggaaaaaaagaagcttgatttaacgaatacgatcatgatcatgcaccaatcacgcatgtccggtaagctttcattactcattagtgtttccaacagagaaacacgtgagatggttctgtcggaaatgcattcgaggcggaaggaacagatcgccgaaccaaccgtccttcgttggttgcgtaagttcagtttaatcgagatgcgatgacgaattatctaatcgctgatcgcctcaatccacgtcgcaaattgctttaattttcttgttctgaccatccaccaatcacacgagacatgatggtctcactaagtaaattctttgcgacgatgatcgcaggagtaaattaggagggaagaagtgaaaaaaaatagaggaggaagagaataagccaataataatggcggatcacggcaccggccggcggagatccacgacgacgacgctcacgttgtcggcgctccgccgggcgatcgcgagcttcgcgagaagcaatgccgcgtcggcgcacgccttgtcggactcggccttgtcgacccccttcaccacggcgtcgccgccgccgccgcctgacgcgccggcgggcggcgggagcacggctttggggcgggagcatcccggcggcgacggcgggccgttgctccggaagcacgcccggacgacctcgcacgccatctcgttggtcaccacgtcccacagcccgtcgctcgccaggatcaggcactcatcgtcgtcggcgcgctccgtcaccgtcacctccggctccgacgtcacgtacggcttaggtagccgtcccctgcatgcgcgcgccgccggccaccgcgtcaagcaccacggccaaattgctccaaacttaaaatgatctaagcgcgaacgcagcgcgtaccgatggctcgagacatggcgaggacgccgagcaccctggcgccgtcccagtagatgacgcggccgcccgccgccttgatgcgctccagctcgtccggccggtccggctggagcaaacagagaggtgaatacgcagaagcaagcgaggaagacgacgttggattagtgctttgctgcttaccttgtggtcgacggagagggggacggggacgccggcgcggcagaggacggcacgggagtcgccggagttggcgacgacgacgcggttaggaccgacgaccgcgacaacggcggtcgagcccacgtggtcgcaccgtgctggcgtctgcagctcgcagcggcaggccggctcaccgccggtgcggctcttggcccagatcgtcgcctcatcgtccatccgcgcgaaccctttctccatgacgtccttccacgccggtgccgccgccgccgcctccttgccggagaccgccttcttgtacgcgtcgacgacgagctcatgcatccggtcctggcacatcctcgcgacctgacgccacaaattaaagaacgggctccgcttagcaacacagctcgacgtgcatttgctggatttggtcataggctcatgtgtgcaatctgtttcttgcgtgcgcgcatgcatacatgggagcaaccatggccgtcaaagacgccgaagaagtggtgcttgccggaagaggtggagccccgcaggaagtccggcctgatggacacggcgtcctccatctcgcgccgccggccgaacacggaggtgacgccgtacctcggccaccacctggacccgaactccgcgccggccgacggacggcacgggcctgcggtcgccgcgcctgcgcccgcacgcgcgcccgccaccctctgccgcttgccgcagcgcgccacaccggcgtcagcatcctcctgcggcggctcgagagagccggccgcaaagcggaagccctccaccctacggcgccgcctggcgatcgccgtggcgccggccgccgcagccggcatcgacttggccgcctcctcgcggcagatctcggcggccatggggcgtcgtgccggccgcgcgcacgagcacgagcgcctccccccttctcctcccgcgtacgtcacgccaccgccgctagcccacgcacgatagatatttcgtcgcaacaccgcgcgtcgccgtcgtcgtcgccgtcgccgtcgccctcgggggggcgctaaaacgagacgagggcgaggtggcgaatcgcgacggagcagagagcgcgagcgcgaggtggcagcagacagccgtgtcgagctcccattccttcgcttaatttcttcgcgggaacacgagcgtccgtcgcggcggtgcggccacgtggaaggggcgaggggggacccgctggcggttgggatgagtggggcccacctgtcggccgagcggcgggatcggtggggacacgtggcgtcgccgcgtgggcggggacagcgagccgacaggggaatttaaaaggttgggcctcgcacctaccaaccacgtggtccgtccgacgcggcgactcacaaatatcgtgtggctttgtaatcacaccgttgatctcgtggctaacctcactgtcatgtggggacgaaattacgtgggggacccatggcacagttgcacgttggaggatgcagcacgtggcatgtggcctgcgggccgaatcttgttcactgagccaggatggatgaaatgaataagttcatcggaggtccctcaccttaacagcgagttttttaatcccttaaccacaaaagcagaaatatttacccctaaactcacacaaaccgtgcactcaaagtcttatgatagtatatatgggtggtttcactgacgtggcaccctagttagcaaaagaaatataaaaagtacgtgggccccacatgtaagtgagagagtgatgtgggccccacatctctcttcattttctttcttctttctctttctctctcattgcttctcttctcgccggcagcggtggcggcggcactcttccccactgcgtgcggcgggggcgacctcccccaccgctagcagcagcggcgacgctcttcccctccgcatgcggcatcggcgccctcgcccaccacgagctgcagcggcggtcgctcccttccccaccgcgtgcggcagcggcggcgacagcttctcgtggaggagggggaaggggaggccgacgagccccctctccccgttgctgctcgtgcagatggcacagctactctgtggccgcgggacgccgcggcgatctgcccctcgagcatgccgcgattggtgtcaagccgcgacagcctccgcggcacgtcgctgaggaggttctcaagctcctccacacgtaggagcgctgcccgcgtctggttgttgtcgtcgctgccgtccatcgtgccgtctgccggtgcccaaagcaggagcagctactcctccgccacaccgccgtccaccgtgaaccacaacggcgaccgccgccgcacgcacgagaccgagacaaccggctccatggtggcgagtggtagagtggaaacagcgacgcgcgccactcctctcctccctcccaccgtgcgctcctcctctccgccgccgagctcgccgtcgcaccgactgcctcctctcctcctcttgcaccgaccacctctctctccctctcccgctgccgccactccaccgccggccgcctctctctcccctctgctgccgcgcccactcgagacaatcatgagagaagaggagagaaaaagaaaaaaaagaaatgtggggcccacaccattttctctacttacatgtgggccccacatatttattttattttttttctgactaggatgccacatcagcgaaaccaggcttctatactacctcgggacctttttttggacagttttacaaagttttttctggtattgcggttaggggatatcaaacaaactcggtgtaaagttgagggatggccggtgaacttattcctggatgaaatgccaagttaaatgggcttatgggcttccaatttatctgtgttacttcctccgtcccatattatatgttgttccatttatctcaaaataaatttatttttcgagtaatcattgcattggtgaaagtagagaataaaattattgggagtacataaagtgatgaaattgggatttgaaatattaaagacatgcctgtttggtatagctacaacttctaaatttagctccaagagttgggtctagagtggagttgtggaactgcctaaatccagctccacaactctaatttattttgtgagagagctccacccagctccactcccagttttggtggagctgaaactgtttagctgagctccagctccagaagaggtggagctagagctagagctgtgccaaacagactagtcttcttacttttatatttgtgtttgatagatgaattttggatggaggtactactaatctcttctactgatccatggattgagattctctgacataacttccttctaacttagtggctgacatgtgggcccaataaatagtggtgggtccatatgtcaggcacggtgaatagtaacatcagatgatcctcttccgtgatccatacgaccatgtgtttttcttttcgttgagtctaaccaacaccaaccgagacaagttgagcatataaataagcagaaagtaaagcgaagctagaagatttagcgaatatttttttttattcagaaagagcgatagaacttaacatccaacagaaaacttaatttcattttaagcaaaaattgccacacactgacacgcatgctctgtgcgatttaattcacagggaaataaacataaacacagcgccacagttgtttcgagtgatgtatggtaacgtcttcaatggctcacattgtaaacttggatataaactttttcttcggcctcagctgggaaaaaaaaaagaacggatcagatataatagaatgaaagaatcatatcaggctatcagctgccacacatcttcatatcaaaaataattataacatatgcccataaatgatgtataatctgacggtatataattaaactttatctttctctttttatatgttaattttgaaagccttaagttgcaactaaagccaagaacatgcatggacataaagaaaaggggaataaaacacttttgatgcatgaattgagatcgatgagaagaacttatatatggctctctatcacctcattgctgtggccgcacttctttttgcggcagttggtagccctgagaggaaggcgtgcatagcacctgcattaccaaacgcaaattcaggccatgttaatttgaaacttgaaagtgcaaacgaacgccagtacgccacacaattgtattaagtatgcatcaatattcgagtctgtatggtgaaatcatcggcagatcggtcaattgaagaaaggcaataatgggaaaccgtgcgtacttgcggcagatcatcttcttctcgttgtacttgagggctaggttctggagtctgggctcgatcatggggggtagccgcctctgccgccgccgcggaggcggagcaccaggtgaagcgtcgactccttctggatgttgtagtcggccagcgtgcagccgtcttccagctgcttccccgcgaagatgagccgctgctgatccggcgggatccctgcaaaaatttgagttccagacagtggattgagatgatgatcaactgaattaccgaaagaacacgataagaggatcgaacgatgctccaatgctctactactgctagagttatacttactccgtttcagattataagatgtgcttaaagtcaaactgcttcaattttaacaaagtttatagaaaaatatagtaatatttacattgctaaattagttttattaaattaataattaaatatattttcataataagtttattttaggtcgaaatattactattttttcaattttaaatagtttgattttaaccaaagtcaaaacatcttataatctgaaacggaggaagccctatgtaactatgtatatattgtggaaggccctacgcttccggcgcccgatgctttgggggaaaaatcgggcgctgacgtcatgctaacgtcagcgtccgatttacgtgcaaaaactactttaaactgatttttctcttaaattacttatccaaatcatgatctgattgcaccattaaattcgttgcaattaaatcttcaaaacaagaccacacatggatatattccgacgaaatttttttagcttattattgaattatttttaaatgttgcacgatgttccaccgggtatatcggaattgtttcactaagtaaatcgaaaatgtttcactcgtttaaatcgggtgttgtttcaccttatataaaaacaatgtttcagttcactgcaacatttgatctatacatagtgagacattataagtacactaggtgaaacatttttcggtagaacaaaaaataaaacgaattcccttaatagggggtttccaaaatatgtggggtttttttttgttgcaatggagtatttcagttcactgtaacattagatttatacatagtgaaacattgtgggtacactagataaaactttttttttggaataaaaaataaacagaattcccttaataggaggtttcaaaatatgtgatttttttgttgcaatagagtatatggtgaagatacgtggcaaatagtagggacacatggtggggtcctaatagaagcacatgaacacgttgtggagggggggaggggaggagcgcccgattttctccccctcccccgggcgaccgagcggcagcattttcgatatattgtatgttagtataccttccttgtcttggatcttggccttgacgttgtctatggtgtcgctgctctcgacctccagggtgatcacacgaagatctgcatcttgcctctcgcctcctcgatcgactggtggtggtgactggagattttcggtagtgttcgtggtcatctcaatttatatagcgcgtacgaaactcgaccgctacgaaacccgagagttccaaaaggaattagaaaagggaaagagaggaagaagtggcacgatcaacacgtaccataattagggtgtacgtgacccttctgagttgaactcgacagcggcccagatatccgtccaggccagcctgcaagctcagcccataatccaaacggcccgtgcatgagatcccaggccggaaatacacgggccgcgtagccatgcccaatgtggtttggaataagttcatctgaggtcccttaacttattaacgaatccgattttcgaccttcaaccgaaaaaccagatacaacgggtccctcaactatcaaaaccagtgcagatgaggtccctcggcggtttcgagggtgtttttggctgacgtggcgactacgtggcaaatttgacttggtcttcatctgatgtggcattgatgtggcaattcgatctggaagaataattaacttcgtgggacccacacgtcagtctcacacataaattaatataaaaatggtgggcccgcatgggccccacatgtcattctcagcatctccctctcttcaactagagcccctcttcctcctcctctctcccccttctcccatccccgaggcggcgggcggtgtccgggtgagggatggcagctcgcggcggccgggagagaagggaggcggcgcgaggcggccgggcgaggagaggcgacgcgccgtggcctggcgaggagggaggcggcgctcggcggcctggcgaggagaggcggcgcgcggcggccaggagagggaggcgacacgcggtggcccggcaaggagggaggcggtgctcggtggcccggcgaggagggaggcggcgctcggcggcctggcgaggagaggcagcgcacggctgccgggcgaggagggaggcggcgctcggcggcccggctaggagggaggcggcgctcggcggcccggcgaggagaggcagcgcacggctgccgggcgaggagggaggcggcgctcggcggcccggctaggagggaggcggcgctcggcggcccggcgaggagaggcggcgcacagcggccgggcgaggagaggcgacgcgcggcggtcgggcgaggagagaggcggcactcggcggccgggcgacaaagggtagctccgacccggatgtgacaatcgaggactcggcggaggtggccgggcgaggagggaggtggcgcgtgcggctaccgagcgaggaggggtggcgccgtccggctgggcattgcgggcggagcggccgacggagtgtagctggcgcgctcgccggcgacctcctcctctacctcttcctcctccggcaacctccgtcacccgcggcctgccgccgctccgcccgcccctccgcctcgccgccgctccccgcaaggacgagggagagcgaagaggaagagaaacgagagttgagagggacttgtggggcccacgtgggccccaccattcttttattgatttatgtgtgagactgacatgtgggtcccacgaagtttattatttttccggatcaaattgctacgtatgcgccacgtcaatgccacatcagatgaagaccaagtcaaatttgccacgtaggcgccacgttagccaaaaccaccgtcaaaaccgccgagggacctcatctacactggttttgatagttgagagacccgttgtatctggttttgcggttgaaggacgaaaatcggattcgttgacaagttaagggacctcagatgaacttattccatgtggtttttccatgatggaagcagtgatttttttttattaagttcactttagatccctcaacttgacagcgagttcgattttgtccttcaaccgcaataccagatacaacgggtgcctcaactattaaaacaagtacaatataggtcctaagacggtttggatggtggtttcagctgacgctaccactagcacgtggctcccactattgtttgattgacatatgggtccatatattttgttttaatttttaaattattaaattttgcttaatgtgccatgtcaataccacgtaagatgaagaccaaatcaaattagccacgtagacgccacgtcagctgaaaccgccatccaaaccgccttgggacttatattgcactgattttaatagttgagggacccgttatatctgatattgcggttgaagtacgaaaatcgaactcgctgtcaagctaagggacctaaagtgaacttttttttttcaaacgcaaaaaagctagcgcggaagttttccatcaattcagtatatgaagagaaaaagagtacatctgcaatagacggtcatttcgaaatactatatcataagtcgttttgactttggtcaaagttaaactactctaaatttacaacacaaacaccaaattagtttcattaaattagtaattaaatatatttttataatacatttgtcttgggttgaaatttttttatttcttttttctacaatagtttaactttaaccaaattcaaaacaacttataatctaaaaaaaagcttaaaaaggcaattacaaccacatatatcggttgttcggtcggtgtgaacatatataccgtcacgatcgatgtgtcatactgtcagtgtcacatgtgttcgttggatcccgatgacacggatcgctcgcttgaggtgcatggaagtatggcaccgtgcgtcaatgcacggggacgccgtcgcattcggagggagtaagacgacgtacgtgcagactccgtgcagagcggtgcagagaacgacggcgacgacagaatgtgagcctgcctcctcgtcgattcggccgcggctcgtgtcaatgcaaccgttctagtccccgtcagtcagacggcagtacggcacttcctcaggtaaaaaacattcggtgtgatctgggcctgtctgtgagggggaaaagtgtgtggatcaatggcaatggtaaatcgatagtacttccggttgtgatcaactgatcacgtacgaggctttttcttttgcttatgctaccaacaaataattctgttttccttgtgccagagagggaaacattacccatttctatttctgatatccgaaatgatcttacggtaatatgacttttaacaagctaacacggtctttcgaagatgtttatatggctagagtatacgtttgaatttatagtggtgaatgcgcatacatatggaagcgtctaatataatgttgtgtttctttgaaaaatattatttgcaaaattatttaatcggataaagtagagtatatatatgatataaagagaatctacactacgtgaggaccagaaatatcgcatgccccatgcatgccgaaagagcaacatctttgacacagtacgggtgcaattttgctatgaacagttgacattccacccaacgaaatcgaacaaccgggttcgctgttcatcccgcggaggcgtccgatgccgactcaactcgactgaagcggttgggggtggtcaacacgcttatctagctccagtcctccttccaaacaagcggaggagcaaccaatcatcaattcatttcgcagcaatccaactccctgattattaaaaccgtgtcaccctaatcatacataaaatcctagttccacacggagatttaattattcagaacccccaacgcctgaactgttgttctttaatcgagaaagataaactgttcttgctctcgcgttctgacaaacgaagtgatccctagactagaagtcttcagatttggctgtaaaatggactagcagggcacacgtcaataatagcagtagaaagccagaaacgcatatgatcggaactgaacgattctcatttgtccatatcgaccacgttacacatgagactttactccaaacacgcaaatacgtaaaacgaggtggttcatcagtacgcgattaattaagtattagctaatttttttaaaaaatagattaatatatatttttaaagcaactttcgtatatattttttttaaaaaaacaccgtttagaagtttggaaagcatgcgcacggaaaacgaaacgtggtgtggttgagagcacaagctgccgaatgcagcccaagtatatacggttatctctctactgtcataaatacttgatgtttagaataaaattaaattaaacttttaaaatttcaaacatcaattttatataatagaatacatatataaaatcaaaagtttacagtcaatgtgtataatttcttttattttaaaactaagcatttgaggagctattgatgatcggaattttgaaaggctaaccgaattatattctaaatattaaatatctaggaaacggggagtactacagaaacaagtctgaacaattgtgtgaaatgggtcacccttggggcttgtttggatccttcgggctattaaatatccctccggaatcttgctatttaggagtattaaacgtagattattgataaaaaccattccataacccctaggctattt

SEQ ID NO: 4282 - DNA, 16105 bp, Oryza sativa
agttggcatggaatatataatatatattagttataactccatccagtgttgatggatgatagatatattcagtatttctctgagatagattaatgtaaaattttcctcagaataccaattagtataaaatatactccaagcatataataagtataggagtagatatggatacatggagcattaattatatgtctgatggcttttgttttctcagttctttgttctattttatgattattcattgtgtggaggagctaggtactctaaaaagcaattgataattaattagtcagttagtgtgaaattgaaaaggctagatttttcaggttgtgacttttagttcattttccttttctgaattatcagaatctgggtaaaaagtagattacccgttatagatgaaactatgtacaagaaagggatgaaatttataagaagaaattaaagagaatatacacatactgagcatatatacccacacttagcatgatctaactatagtggatggagagacgggagacatgaacccaagtgttgtaccatcgtgcattttgtggctgtttgtgcaagaatttacgacagtgcgagagactgaatgcggctgatttcaactcaaacgaggggataaatcgtcgttttcaattggaagatcgaaaccagaaccagacatgaaagctaatctaatggttgaataatacacgcaagttgaggaaccattgtacgcggaaaggatcaaagtaggcatggcaaacgcacttgcatgctaaataattaaatcattagctggtcctgtgctggagttgaaaacgctatccacaaatttcatgccgacaaggaaataaaaaagaagcatatatatacaggatgagagagagagagagggggggggggggcaagtagaataaaagaataaaaacatgaattgcacaacaccatccaatgtgaggttacatcgatcttgtccctacctctagcttagtttgagagacaaatcagagcacaaaccaacaggcacaagatgggtacacgattttcatcccaaaccgatcgagagtcgatatacctctccacacgccacgaacttgtacaagcacccactgaccaaaaacaccgctgatcaatccgcaccgtagactacgagcacatggggatatcggacggcggcggcggcagcttctgattcggcagcggcccgtcgttgacgagccacgccatggacaggccccagctcaggtgcacgtctaaatggcaatgcatgatccaaacacctgacacacatgacaaagccaacagtttatggcatagacaacgcaaattaatcctagtcaacgaatagaaccaagagaacaaagaaggtaatgccccctgtacggatgcatagtcagaaatgtattttttttaaaagataatttttaccttcgttaagaataaattgggaggtaccatatttctctaatattataaaaaattaaaggtgtttttgtctaaaagtttcgtacgttgtccgtttccattatcgtatcggtttcaattcagccgccgtttgctcgctcggactgaatatgaaaattgaatcgagcgatacgaagacgaggattctttttttgcttgacgtatgcaaatctaattgggctgtagaaagctggcccaactaacaatatgggctgtcaacttaaggggaaggaataagtctattttacctacctaggtttttgcctatgatcaaataaaaaagtatccggttttagtttggttcgtctggtttatatttttgtcgccattttttcttcacgcggaacttttttttttcccgcgcagggtaagccttttcttttttgtctttttttcgttctctggtcttatctgcatgcgcatagcgcgtcccgcctcagccaccgatcttccggttttcttggtcctacacgaaacggtttttttccacgtatgcggtaagtcccttttttttctttttcttttttttccattttccctgatctttgatccgatctgcacgcgcttagcgagccccgcctcagccgccaagcttccgctttcgttggtccgtgcggtttttttttgtcgcttcttttcatatggtttgtttcttcgcacacggtaagtgcgtttttttcttttttcgatctcgtctggtctaagccaaaccctagcgttgctgccacgttcgatgtacctcctgtatgttttctactctaactgattgtaaaaatcgatttcacattcctccatcatcattttcccatgatttcctggactttaatttactgaatttaatctctatttaaaagtcgttgatcatggcaggtcgataagcttttattcgattcgattttgggggaaaaaagagaagaggagattgggtggatcaaaaagtcctcaaccaatttaattttggaagatcgagaataatttgaccaaatttggcattgtacaagcaagggactaccttttggaggttgatgaccgaagaaagacagggcgaatggagggaggtagcggactgggctaggactaggactaacaaagaaaaaaagattgtgctttcggtctaaaaccaagaaaaaaaatcatttacttttttaattatagtgtataatgattccaatgacttagctcttaatagttgttgtttcattgaaaaaatatatttacccgttgcaacgcacgggtatttttttctagttttatataaaatttaatatcgctaggtattagatatattaaaaaaattagtgtaaaatttagttatcttaagatgttttctcgatcataaaaattccctttttaaatgaaggtataagtatagagcgggtaaccaaccggggttgtcggcgacgaagcggatggcgacccagccggcggtgggcacgctgatggtgttccgctgcacggggtcgacgaggttgtacttggcggtgtcattgctggcgtcgtagttgccgaacccggtgccgacgacgtagaagtcgtagccgtgcaggtgcagcgggtggctctcggcgccgaggatgctggtgtcctgcagcaccacctccacggttgtgttgaaactgagcggcaccaccctggtgccgtgggtcacgaacgtgttgttcggcggcgtgccggtgtagttgaacggcgtccgcggcgccgccgggaagttggccgcgagcacaccgttgtaccgccgctggtagtgcgcctggaggagcgacgtcctgggcatcacgaacgacacgttgttcatggacgccgcgaacctggtgttgttgggcccctggcacgtcccgttcaccgggctctggcacgggtcggcgccgagcccgacggcgaagaagaagtgcctgtccaccgtccgcggcacccgcgccgggtactgcgcgctcgcgaggctccggaagctcgccgagaagttggccaccgcgccggtgtcgttgtacgccgggagggacggcagcgggaggctccggagcgcggcggcggacgtcgcggcgccgtagtactcgagcacggcgacggcggtggtgttgtcgaacgtgccgacggtgttggtgtacggcgcgacggcgatggcgaaggagcgggacggcgggttgttggccgccgcagtgaggagcacgtccatggtctgccccggcgagatgacgagcgccgtggcggcgaacggcttgacgtagctggcgtccgcctgcaccaccatcagcgtgtggttggccaccccgaagaagagctcgtcgttgagcgccgcgttgatcagccgcagcaggtacgtcttcccgggcctcaccctcagcttgaacgtgtctgcgcaacgagaaaaattaaccacgagtcgttcgtacagtgtcacagtactgggacgtcgatcaatacgggccgtggcgtgttaccgttggaggaggagcagttgtaggttgggccagggaggccgttgaacgtgtaggcgtcggagacgttgggccctcctcccgtctgcagggcctgcttgatcacggcctccgggtcggcgttgaaccactcacctgccgttcggtcgcgtttcccatcccatatcaaaacgtcagatcggtcggggaaaaaccaaaaaaaaaacgtaacgagaaacgcacgtaccgagcaggaggggcacctcgcgatggggcttggggaacgggtaggcgacgccgcggggcgggaggatgacgagcgggccgtagagcgtggcgcggagccaggagaagtgcgcgtgccaccacagcgtcccccgctgccccgtcacggtgaacctgtacacgtagcttcccccggagcggatcggacactgcgtgatgtacgccggcccgtccgcccacccgctccgcacctgccgaatcccgtgcctgcacgcacacgcgcacgcgcccgctcggttaatcaatcagcgatacgatcgttgtgacatggcggcgcgcgtagctgcgtacgtaccagtggaaggtgacgttgttgttgatgttgttggtgaccctgatcacgagggtgtcgccctcccgcacgacgagcttcggccccgggaactggccgttcaccgtggggacgctcttcgtcacgcacagccgcgtcaccgtcgccattgtcacctgccattacatattgtagcagcagccaaagatcatcgtaagcaaacgtgacactgcgacgagcatgggttttacatcgcccgagcaaatgcaagacacggcatattatgtatttttacattgaaggagtagcggcgggtgcgggcggcggtgaggcccggcatagcgaggaggacggcggcggcgaagaggaggcatgcaggggaggccaaacaaaggagatgacgacccgtactactacccattgtgatcgatcttctcctgcagcagctgtaatcaagctagctagctgcttgatcgatcgattgatcgatctcgagctgtttctgtgtgtgtgtggctggccgggtgttcgatcgatatgatcttggagggaagtgagcggctatttaaacggccgtgcccggtgtcgtgcatggtaggaggtcacagagtgatagtggttggcttgagttggtggacgttcataaaaaattcgcgcccgggccgactctttgctccctctccgctcctttttttttcctcttctgcggctgccgtctctatcgatgtaggaatttataaacctgagaaaaaaaatgcttgtaggaatgtttagttaagcactctgttgattttattagccagctttgtcttgattcgcttattagttaagcttatactcaagcactctgtgcgtgatggtgcaccaaagcgcatgcaggcgtgtgttcgaaatatcactttcgttttcacaaaagggtgtatttgtctccctgttgagtaagaaataacctcagatgaactgtaattatgcagaaattaaacttgttgtttctgatgataagttgaacagagcttatcgatcgattgattcaacattttctgtccctagcatgtatggaactatggatcgacttgggtgattaatatagttgtatgcatgcagaggttggaccggaaaggtgggctggtggggttactgaagagttttccctgtctgaatatatggacaaactgtttcggagcttaccctgttgtgtgccattaatcattggaacacacatgataatctcataatcttgcccctagtaataatccaataaggtgatatatcaccttctgaaagcattatgcatgggaccttaactgtgagtgccaaaactctctaacctttttaaggctggttttactcatttttcttttccatagacgagtgctagataatactatcctgcttcatcaactctgcagaagaatgcgagttcctttgtgaacttctcaagtaaactatggaccccaacgtcaattcatgatcttttaaaactttttttttgccattttttctttcccaggataccaaaattgaaatgatactgttagggaagaaaaataaataaattgaagcacgaggtgtgtatggttctcggtgtgttgcttagagctgtggggttgttgcagtggagcttgttgctttgggcagattggatgtgtatgctaccttgtgatctgatatgatctgtcggttgggacccagttaaagtgtctcattatgtctgtcttagtaacaaagggaggctatggaggttagggaaccaacaactagtacatatctgaataacacacttaaatctcatgctttaaggcgagagaaccactttaaatgcatatatttgtattccatactgttttttttttgaaaagaagtattccatactgtagtttagaagagatactaccggtgacacagtaatccatctctttcttcaatggtatggctattgatttaaaaaagaaactaatgccctttcatttgtagaaaaaatataggaaaattgaaggattttaatcttgtagaaaaaaaatcctatgaatacatttgaaactatcctattctttcctttgaaattcctatgaaattgacaatcctatagaatttgatggaaagttaacaagagctcaaacctcttagaaaattccctacgagtctatctctcttatcccattgcaatgtttctatttctatttttttttgtgttttgcaattatctgttttacacttgtattcttgttaaaaatatgtgtttttcctattcctctcttttttcaacgcattgttttaaagaagccctaaaagatttgctattgttatttttttatgcagaagatctgctcttgcaataaatttagtttgatgttaggtttcataacccacaagaaaaatgcaaagagaagataaaggaaacaatgttgtatgatcgatttagccatttaggtgtcattgcacttaacaataaagggcaaaaagaatacaggaatgtttagtccagtttagtccaagattaagatatacgcttggtgttaaaggatcagcttaaccaggtaggcaattcagggaaataaaaatagcggttgatttgcaccaccatctgcacgtaaatcagcaagatttagctgttggttggcgatgtgacaaaaaaaaagtattacagccaatttagttgcgacgcaaacggccggttgattcatctgcgactatctggcttcaaggtgaagcattaccatgctaaacttctttcagtctttcaccgttctccctagctagcgatctcgtagtctgggcgtttggcttcatggagacagtggttgcatccgtttccgttggatccaacgaacccacgaaattctcactcgatctcgtgactcgtgaggcgtcagagccaagcttacggccggctggctggtcgatcgagacgagcagcagtattaaactgcgatttggtcagtcttgagttgctgtccaagtatcgccctcctctcgatcttcagattgatgagtagtgcagagtgctcgagtcaggtttctcatcatcattctcagtcgggaaaactactcgcgaccggccggccggcgaaacatggatggttacacttacaaacctcatttgcgacttgcgagcatgatcaggttcgagacggaatgatataattaactttattgtgctctagtgcagttcttggtgaacgggtgtacgtctctgacagttgcaaactgaaacgtttccagctcgttacacacacttgcatgaacttgtgctgatcctggtttggcaagtgatcaaatagactgttgtgatgaaaaaccggcaagctttggaagttcggatatggacgcctggccaatccaacactagttaacggaacagtatgtttgtttcaggaatagtgaagcagcattacgagatgtgacgggagaggtagctatggtatctatagctaccaggtgctggctggagttctgcaggcaccaaccgtaccaaactgccagcaaggctgcccaaatggtgaccgtcctggattattcataggatctctgaattctgaattctgaagtctgaactctgaacctgtcttaaattttcggccctgtttagttacgagttttttttctaaacttacaacttttcatcacatcaaacctttcatacgcacacaacttttcagtcacatcgttccaatttcaacaaaacttccaaacttcagtataaaaacacagccttcgtgtgttctttcttggaccctgtacagcaagtgcagcactgcatacctcctgcagcagaaaggtactccctccgtttcaaaatgtttgacaccgttaactttttagtacgtgtttgaccgttcgtcttattaaaaaaattaagtaattatttattctttttatatcatttgattcattgttaaatatatttttatacacatatagttttacatatttcacaaatttttttaataagacaaatagtcaaacgtatgttaaaaagtcaacggtgtcaaatattttgaaacggatggacatccgtacacgtatgatcatcagttcactgctagtacatctggcaagagagcgaggctttgctatctgaagaaattactgtgaccgcgactagtgacacagatcactcacttggggtttgtttgtttatggagggaatatggccaattccttcgggtgggcagaaactttcggtactcctaatggacgggtgattgctccctcccctcccaagcgataacccgcccctccccttactattttacctccctttcttctcttactactacaccatataaatttgaattaaaatttaaatttgaaataggcatgtaaactttttacttataaactttgggtctataaactaatatttgaattcaaatttaaatttgaaacgggtatgtaaacttttgacctataaactttgggtctataaactaatatttgaatttaaattcaaatttgaatcaggtatgtgtagcgcccgttccgtcgtggcgcctagcgggaaaattaaattctaaaaaccctaattgtgaaatccatttctttgcttgttgtcagtctccgtgccaatctctaatctcgaatccccgatcctccgccaaattcaaatcccaaatccaaatctcccaaattccatcccctctgaaaaagtttagtttgcctccctcaggttcggtgggctgatttccctctcggcccatctctctctctctatctctctctccctcagctctcccctccctcgctctgctcgtgcgccgcacgcgcgcgtgcgtgcgcgtgagccgacgccgagccgagcaccctctctctctccctctcgttctctagctctctctcttctccccgcctccatccccggcaagctctccgcgcgccgttgcctcacgcgcgcgcgcccacgcggtcgccgcccgagccgcgcctgcgccgcctagccctgcggctctgccgcaccagtggccgcgctgccgctcggacccgcgagccagcgcgcgtgcccgagccgcgccgccctcgtccgtccaaaacccggagacagagctcccgctcccatccctctccctccccaaattggcatggtgcgcacctcatttctcccctcccgtttcccgccttcctctctcggaccgacgcctcgccctccctccgttccctcgctcgattccagcgcctggacgcagaggagcagccgcgccgcgccagccgtcgcccatgccgtttgaccccgcgcccgtgagcccttctcctcgaagctccctcgccccagcactgctccgaggtcggttcccgaaccgacatagccaccccttaaaagccgcccctccccctctcgctcgatccccccgtttcgctccgagccgccgcgccattgcagccatgccctgttctccgtcgccgttcgtcgtcgcgcgtgtcggaggagccggcacgagcgaggacgcatgacgtggactccgggcgcaccctctcctttctcttccccggcccgaggccggagcgatcacgccccgcgctgtcggccatcgtcactgcgccccttcaccccgtcacggtactgccttcctccgttctccctcctcgctccatctcctccccttagactcgggtagtagcacgagtagattccccgtagtcagctggcgccgccccaagccttgccgccgcccgctgtgtgctcgccgccgtcgctgcccgagctcggtagcgcctctcatctgtaagttcaagtgccttaatttggtttcggtgattaatgataaatctaattatatgagactaacgtttttatgagcctttctttgactagtctcatttggatatggaagtaaaaatgatgagaggtatgtattaaacttcacatattctaacttggtctctcttgtggatctaaaatatagtgtgagcttcctatttgatctttattgattatgtgcatatgcgttccttcatatccatatgtatgcacatcttgagggggagcttattctatattttgtttattataagatttctatcttgatttgaaatcatttttcatctcatctctctatattgtttatatcgggttattatccatcaccaaagagagaaaagattgaaatatcttggattaaacaatttgtgtaattgttactttggtgatagatgataaaccgatgtttatgggattaacctctcttttgcataagttgtctactaggttatttcccgataatgagatgtggaagacatgcattcttttgtgatggaccttaatcatgacaaggatgaaatgcatggagataaaacgatatgtaccacttcttatctcctactttttgataggttcatatatatgatttccatgttattgatatataagtgtgagactaatgtttactcgaatgttatcttatttagtctcatttacattgagaacatggagatcatgaaggtatatgttttatgttggtctacatcattactacatatgccttctctatatgtatagaataaacccccattggtcattctataattatgcatacacttgcatctcttgtatatttatttgtatgcatatatttagggggagcaaatcctatacatttattgtgcatgttctagatctatgttgttcacctattatttatatcggatctttgcacttgagcttgcatacgagtatatgacacttgtgatgttaatgaatacacaacaaacatatccatatctttcatatgcaaccggttggtcatcaagtgaaggatgacaaccgatttgttgagactaatgttctcctttgaggtgtgaaaagaaataggtcccactacgatgaggctaatgaatgacaccatgggttagtggtcaccaagccaaggacatcgtcatgttggcaagaatgaagtcaagcttgtgatgagaataaagtcttgacaaaggatggacaagacctcggcataaacatggttcaaccggatggtcacaagtgttgatctcggctcaagcttgaccccaagatggatggtgcaaggcaaaggtataatgtagctaagaatgttttcttagtcttttcccggtcttggtgtttggtgtagaccggatttgctagataggcgctgtactatcaagaggggtctatgaagcgagcttgtggatgatctagtgtcatattagttcatatgcatgtaggtgcattttgtgggcttgtctaaccaagtgtgatgagttttctcaagtcctaaaccaagagagaagtgggcatgtccaataggagtgagtgacatcttgtaggtatgtccggtggatatcctttggagtgtgagccctttatccttgacttaagttgtgtttcttggatggatttttcatgggttggatggccctttgaataagctttccatagagtccaagaacgccaaattccgagacccgagtcaagagatatcaccgttttactaacggtcggttgagcttaaaagtgacctgcggtttgaccgtgggccttaggccggtctgaccgggtctgttagcgtggtaaggctggtctgaccggccccactggtctgttgcactggtctggtttttggtggcgatacagagccgccagagccgcaaccggtcagaccgagccgacggcggtctgttccgagtcgtggacggtctgaccggctactacactgcggtcagaccggccaggttgagtgggctcaatgattgccctataacggctagttttctagccgttacaaagtagtccggtctgactggcctcacaacggcggtctgaccggcagagcacaaagttggggatttcggttccaacggctagttttggtggttgggggtatatatacccactccccaccagcaagggtaagtttttggcactccattgcattatcttgaacccttgcaagagctctcacacccttgtgcacttagtttatctagtgaggtgttagagagtgagttaagccaatccaagtgcattgcttcattgttatagctagtgtggcacttgatcatcctcggcaagcatcctagacttgttactcttggaggttgtcgcctcctagacggcttgtggaggtgttgcccggtgacctctccgaggagattgtggaggaggcccggcaccgtttgtgagtggtttggagttcaccacctttggagtgaaggaagaactaccccgagtgatcgaggcttgggtagtcctctccgtgggccagctcccgccttgcccaccccttgacgaagggggcgtgcggtggcttcgtggttgagctgtgaagttgggctcgccttaacagggattaggaaaccggcgagtttttgaacctcggtgaaaaattccttgtctcttgtctcatttatttgttgcatttacatttgtactatttacattcatagagacatatttgagcccatatcacttaggtttgcaaaacttaacttagttgcttagttaaccttgctcctcaccttgcctagcaacttaggttagttttgtttaagtgccattaagttttaaaaccgcctattcacccccctctagtcggcctccttgatcctacatcgtcgccggcctccctcggtgcgtttcctcctattccggcgcaaggaatggattcccggagtcgcgtagatgctctagtgcgaaggaatcaaactcccgtcgtgccgtcacccttttccccttctctcgccgctagttgccgccgccgcaatccgccgccgtcgcactccctccggcgaatctgagccgttagctcgtctcctctagtcccgcgctacctcccagtgtgctcgctttcgcctgtatcgccgtggttcgccccgccgttcgcagccgccgtccgccgtccgttccggccgacgccttcttcaacctcccgccggcccgcgtggcagccacgtaggcgccacctcggccaggaccgggtcaagctgaccccggtccgccgctcccctccgcctcgctcgcgcgcgcggtccaccgcgagccgtgaggctacgcgtgggcccgccacatccgcacccaccgtgagccgcgcgcgtgcaccgcgtccctcccccgaaccctagcacgccaccacgtgctccctccgcacggtgaaccgtgtcaccgacaagcgggtcccactcggggccacgcgaggtgagcccggtccaccggctccctctctcctcccctcccgcgtgcccttgggctgccttctcgggccggccggcccattaagctcggccgagccgcccctttctctcgggccgcgccttagctgcccgagggaagtctattcctcctccctcttcctttttctttttccaaaagggtttaattaaatcctttttcctttagacaaaaatccaataatcttagaaattcaatatcttctcaaccgtgtgtccgtttgactccgttcgacttccaaaattccccaaatctcgagatctatctattggcacgcttagaggtcaataatagggctttgttttcgccgtttgttgagttgttccgtttcgcgtgtagtttcggagcccgaaagacccgcagtgcgaggatttcgaggatcaagctcaagatctcgagcaaggcaagtcacctttgatcatcttgcacctataatttaaatctaagtatttcttttgcacaaaaatattgcataaataggattatcacgagtatttcggccgcggcttgcgagatagcctgccggccccaatcctaattgctgcaattaccctccttgaattattgaatacttaaacctcctttgtcacctgttgtgcttcgatgcacgggccctcaggcacgcgcatcggaacacctcccctcaaattttaaaaaatccaacgatgggtaaaacttggggttttacaaaaagacttggaaaacccgacacctgggtcggtgcttgcgaactaaatgaatttccaaaatcgcggaccgggaaacgtaccgggagtacggtttcccgctcttgcacttaaggaccgtttccttggaattttatccgaacataagacaagtgcgaccacatgggtgtaatgggacgtccttggctgagtaattagctaatcgggggaatcatgatgccaagagacatgtggattcaacggggtggtgccggggagaacccccgggtttcctggcacagtatggtctgggacctaacctggtgttggtctgggacccctctcgttggcatatggtgaacctgtgtcggctttcgaaatgccttgtcatgaaagcctcaaggtctccagacgtggccgttctgcacgggctgggtgatccgggttagtaatgtcgtgtgggtaaagtgtacccactctgcagaggttattaaactgttcgaacagccgtgcccacggtcatgggcggacgtgaggtgattcctagcgtagttttgtttgactactgctttgtgaaattgctgttgtggaatgggatcgatgtttggaaaatctgcggctgatgggatcagctaggcccgggtggctgtttgaaagcgggtggccgggtgccaaccttgaatcaattcaaagactgatacatcgcacatactccgaccggacgagacgcactgtctcatccgtgtcgtttgagaagcacttagttgtttcaaaaaggggtttaaataaaatcaattgcagaaaaacaacagcctttcctttgaagcctgcattaaatacttaattcccatggcttgctgagtactcctgtactcacccttgctctatataaataattccccccagttgctgaagaagatgaagtggatcccgctaacgaggagttcttccaggagcaagtcggctacgatgagttttagggttttggcctagttcccaagtcgcgcctgtgatgaatggtccaagtcttggctttcgctttcccttttgtaatgcagttgtgagctcgggatctgtccgcagcccaacatgactgtactcctactctgcaataaagagacctctgttgctgtgaaattctgtcttcctgtgataccagcactgtttcctgggactggtatcgattgacaggttaatttggagcgtcacggactagttccgttcggggctagttcggggcgtgacagtatgtaaacttttgacttataaactttgggtctataaactttaggtgtataaactttagatgtatagaaatactatatatagaaaatatttgaattcaaattcaaatttgaatcggacataattcaaattcaaatttgaataagatatataaactttaggtctataaactttaggtgtataaactttagatgtatataaatactatatataaaaaaatatttgaaatcaaattcaaatttgaatcggatatataaacttttgacttataaacttttggtctctaaactttagatgtgtaaacttgaggtgtataaacttgaggtgcataaatttactaaaataggaaagtaatgcggtgccaaaaaaggaaaccaggtggaggaagggggaggagggggggcgggttacccgatcgctataggcgagcgagggcgatccctcgctcagtagcatttccggaaactttcggtttctttgtccatcaatctgtccaaacatggggggcctaatgggcgatcgatcgccaggcaatcgcccaagcgatcagcccccctcccctatactccatatactcctccctcctctcccctcttcc

SEQ ID NO: 4283 - DNA, 16884 bp, Oryza sativa
  unsure (1)..(16884): unsure at all n locations
acggaaccggagcaaattaagctgctgcgttacactattgaccggctatattagtctatcacgaccgtccacatcgccactcaacaacaccatcgctgccgcgcgcggcacaaaggtggccgtcgccgactcgccggtgtgtgcggtgttggtgagcgttcggtgagaacgttctcggcttccctcccccctcacgcacgcgcaatccacagctagctagcgcgggcggcgcgcgcgtccaccacgaaacccccccgcacgtagccatcggtgtattactactacaaccggttcacatcacacctcgcccggttatttccaacgcgaggcataaatacgggagagggaaggggaaacccgacgcgacacgtctcctcgattccgctggttttttaagtttggtgaaactcgatcgcttaggttaaacctcggtagctgttgggtgcgaggttggccatcgatcatctctcgctggatcacgccactttttcgcatgcaaagcgtaggatttctctctttgtttttaggatttcttggtggttgcgagccgcttacctgaacccagaaccccccagttgccggtcaagccaaaccctgcccactgcgatcgcctcccatataacacatactctcttcctctttctcttcgcttcatcaagtagtagtcgtgttcattaatctgcatctctcgcttcacgtactttgaagtggtggtgaactgtgttttgtgtcatcgatggtgaccatgtcggcgtcggcggaggcgaagagtcgacgggagaggcggtcggtggtggcggagctggagggggcgctgctgcgcgacgcggcgacgttcccgtacttcatgctggtggcgttcgaggcgtccgggctgccgcggttcgcggcgctgctggcgctgtggccgctgctgtgggcgctggagcgggcgctggggcggggcgacctggcgctgcgcgccgcggcgttcgtggcgacagcgggcgtgccgcgcgcggaggtggaggccgtggcgcgcgccgtgctgcccaagttcatggccgacgacgtcgacccggcggcgtgggcggcgttcgggtcctgcggcgggcggcgcgtcgtggtgacacgcatgccccgggtcatggtggagcggttcgccagggagcacctcggcgcgcacgaggtggtcggctgcgacctcgagtacagccgcctcaggcggtccaccggcttcgtcaggggcggcggcggcggcgagcgcgcggtcgccgaacgcgtgcgcgcgctcttcgccgatggcgaccggccggacgtcgggatcgcgcggtccgagtcggcgacgcgatccttcttgcccttctgcaaggtactaccacgtacacaccgtgcacgaacactcccggaactcgtccaaaccactaattaatctgcatcatatagcaaaaaactactgaatttgattatagtcagcaattttttttcataaatttgacagtgatttaaaagtgtcaatggagggagtagtagtatactagaacacgcacttgatcgatggagcaattaatgtgcgccattttcctaggaagaaaaaataatgtgtatattttcctaggagtagagctttagaggtgcttgcccataagcatgcgcgtcggtacatgttcccgtctaatatgtgcatggaatttgggcatatgcatgcatggacgaggatgaaccataccacaactaaatgcctagctagattaattctgaaagtcgtttacgcatgtgaccgccacagccacaagagtcaaacttaacccatcaatccatgatgcatctccaaatctgtgttcgatatactccacaacatgcaactcggtgcacatgaaaggatgtcatgatagtcggcaaaagttctttaaaaaataacccaagttgtcgggacaaatttagacgaataaattagtagtttagtactcgtgtcacaaaatttaaatttgactgtagaaattactatgtacgtatactcgtacatagtgagtgatcacgtgaaccttacatgtagaagtgtgtgtctctgtgtgtgcgcgctaagccatagctttcatctgaataactctgtttgaaaattgaaatgcgcatcgctattgtggttttaatttgtggccaaatacgcatcacttttctccaataattatgttaaatcgtggctcgttcaggtgttaattatcatgctatagttttgttgggaccaacatggcgagaaaccgcgaattaaacctgtaatttgattacgtgcatgcagaagcaactccggccgccgttctgtgaggacgacggcgacgacgtcgccgccgccggcgagcagcacaaatgccctccgttccggccagtcatcttccacgacggccgcctcgtgtgccggcccacgccgctcatgtcgctcgtcatcctcctgtggcttccgcttggcgcgctcgtcgccttcgtccgcatcgccgtcggcatctccgtgcccatccagatcatcccccgcatcgcgccctacttcggcggcgccgtcgtcgtgcacggcgccccgccgcccgccgccgccagcgggccggcgtccggcgtcctcttcgtgtgcacgcaccggacgctgatggacccggtggtgctcgccaccgtgctcggccgccgcgtggccgccgtgacgtactccatctcccgcctctcggaggtcctctcgccgatcccgacggtgcggctgacgcgcgaccgcggcgtggacgcggcgcagatgcgcgccgagctgtcgcgcggcgacgtcgcggtgtgccccgaggggacgacgtgccgggagcccttcctgctccgcttctccgcgctgttcgccgagctcagcgaccggatcgtgccggtggcgatgaactaccgcgtcgggctcttccacccgacgacggcgagggggtggaaggccatggaccccatcttcttcttcatgaacccgaggccggtgtacgaggtgaccttcctcaaccagctccccgccgaggagacgtgcgccgccggcaagagcgccgtcgacgtcgccaactacgtgcagaggatactcgccgccaagctcgggttcgagtgcaccaccttcacgcgcaaggacaagtaccgcgtgctcgccggcaacgacggcatcgtcaacgccaagccgccggcggcggcggatccggcgccgtggcagcgccgcctcaaggaggttctcggcttcttgctccactaatcgatcacaaattcacaatactttcgtggccaaagtgctctgctcacaagattaatttgacgaattttaattgcgataccccccaaaaaaattgcgagttttaatttacatgcgtgtgcatgtatgtacgcaaagaaatgtaaatgaagacagcagccaccattagatatcaaacctacacctacggttgcttttccttgctttttcttacgaaatttgttcatgattcatttgattttatttttgttgtaatcaaactatactgctgtatatatatatttacacatccattatcacaagttgcatgctcaatctattttactcatacgtagattttgtgttggtctagttgttgatcagtcctccctagctagtgcctattaattccattttttttatcttatacaacagagttcattgattaacaggtacttgctccgtttcgaaatattttataccgttgactttttagcaaatgtttgaccgttcgtcttatttaaaaacttttgtaagatatgtaaaattatatgcctacataaaaatatatttaacaatgaatcaaatgataggaaaagaattaataattacttaaattttttgaataagacgaacggtcaaacatgtgataaaaagtcagcggcgtcaaacatttcgaaacggaggcagtagttattaggtgagcaaattcttcctacgaaaaatagcgactgattctttggaaaaccagcttgttttgcacgcagagtcttttccaatttgttcctttgacatgacaaatgaaagttcgcgatttaccgctttgataattaagaccttactcaacgcctcaatttattggctgtgtttgcagaggccgaaaaatttattccattagtaaaaataaagtcagcacctcaattatggctgtaaacctctatgatgtggattgtcaaccctaacccttgatctaaaacccttttaatttcgttgtgttaaaaatagtcgaatgaattatatcattatactcaaatagttaactgatctatgggttggccgttctgatccacctaaacagaactgaattttaatttctgaggttatcaaaacacgcgacatgcatgagatgactcctttttaaggtcaactaatttgggataatatgttcagctggtcatgtacgaaacttaattatcagcaggacggtaagctgcaattaagatcgtatttgccttttgaaaaaggatcgccctccctcgttcatatgcgtttagcgtcggcaacacgtacttatcataaaaaccgtacgttaatagacgtgagactgattaagaatttgcggtggtttatggacttagcaaaggccacgtacgttcccggccctaatatgaaagccacgcatatatgcctgaattttcggaagcacatcattttactgtgtttgagtaagcacccatgtgaatagaacagaataacatttgtgatagtattaaatactaaggaggcaaaaaggacatgaatcaagttttggttttattgctgcgagtgacctgctgggtgcacggtgccacaggcgtatacattgtcaaatagtatttcttttcttttacgaggaaaatcacaagtattcctttttaagtgggttctcgataataatttaataagattagagatgtatcgctaatttctatatctttgagcatgtgttaagcaagacattcgcagatatgtgttactgatgtgtgtgcatgtacgtctaccatgtaataaaaataaaataaaattccaaataataatgaaaaatcacaacaatttgtttcctttgtgaggaaaatcaccaaatatccattttcttttgtgaggaaaatcacattaactcattttctattgcgaggaataccaaattgatttattttgtttagcgagaaaaatcaccaactattaccttaatttcttttcccattcttgacatttattccttttcattgtgttaggatgtatcacatccaaccaaaattccttatatttagggacgaatggagtatctagaaaataaataaataaaattggaaaattaaaaaagtaaatgtcaagaatgggaaaatagtaactagaagataaataaataaaattaccaaatattcattggaaaattaaaagataaataaataaaatcaccaaatattagctggaaaattcaaaaagtaaatgtcaagaatgggaaaagtaaataaaatcaccaaatattaattgggaaatttaaaagtaaatgtctagaagataaataaataaaatcacaaaatattaatgggaaaattaaaaaaataaatgtcaagaatgggaaaagtaaataaaatcaccaaatattaattggtaaatgtctagaagataaataaataaaatcaccaaatattaattggaaaattaaaaaaataaatgtcaagaatgggaaaagtaaataaaatcaccaaatattaattgggaaatttaaaaagtaaatgtctagaagataaataaataaaatcaccaaatattatctggaaaattaaaaaaaattaaatgtcaagaatgggattcgaacccatgccctttcggaccagtacctgaaactggcgccttagaccaactcggccatcttgacccacatcaggaatcgaacacttaacatttaaatacaattaacttaatcatgggaacatgacacgggcaatttctgcgtaggcaccgtgctaaccccgaatcaaatttgggacgcaaatctctgcggacacgtctgataaaaatgtgtgaagcaaacgggagaccccttgaaagccattttacttccaagcaagttcaaccgttgtttccattagttccttaattatcgtgaaacaagattacatcatagtagaccacctacttgcaccaacgccatcaccactcaccgggttcaacagccatgcgtgattgagtattatcaacaattaatcactcgatcgttgtccacgcttgagccagtcaccgcgtttgtttaatcaaaccttgccggtttgcacgaaaccatagtcgacgtagctataaccaacctcctccacggacattccaagccaaagattgtttacacactaacacccctactatcaatatcttataatcatatcattatcttaaaaaatatctcttaatcgtatacaacacggcaatggttaaagattcaccaaagatattctctccgtcctaaaataaatacagttctatactattcatatctaacattggatttggaccgttcgtcttatttaaattattttataattattatttttgttgttattagataataaaacatgaacaatactttatgtgtaacttattatttttattttttttataaatttttgaaataagacggatagttaaacgttagacacaaatacccatctatatacttattttgggatggaggtagtacattgagacacaccattaacgaagctactaattacaccaaccatatccgttatagagtgatgaaagataccagtacagttcgagttctaaacttttaataaggtgattgtatttatagctaattattctttcattcgtagatgatatacccgtcaacagcaagacatccgtggtgatttaatcaacttcaagatataccaaaccagtcttactgagatgttcaaaagaaatagaatgtgtgtatgcacgtttataggtgtgagtgtatgttgtaagcgcatctatactttttttttttaacaaacgaacttgtagtaccttcaaacaaacaaacttgttaggacctctttgtttaggcttagatttattggtttatatatagttataagttaatttattggcttatatgattccctatatgatctataagccgatgaatttaatgtctaaatttaatagtagagtcataccttcacctcatataagtcaaaaatattatccaatctaatctttggtttaatagagctagaatgacttatggcataaaaaacagaacgaaaaaactgtttgattgtttaagcttagtttttttaccttataataaactgatttataagtctacacatgcatttttggctttttttttctttgacaccgttctctccctcgcgacgctgtttctccccgcgaaataaagtgacgtcaccgaacgcaggcccgccgcctccgcctccgcttccgctcgcccggacccgcctgcgccggccgcacaagggatgcgctccctcacctcccgccaccggccggaaccctaaggaggcgcgtgcccacctgcggctgcctccggcttcggcgatggggcggccgggttacctgacgctgccaatcctctcggtgctcgcggccatcgggtacgtctactacaccacggtgttcgtcgccgtggcccggtggctggggctcgccacggcggccggggccgcgaacgccgcggcgatcaccgccctcgccgccgcctgcgtcgccacctacgccgtcgccgtgtgccgggacccgggccgcgtcccgccctccttcgcgcccgacgtcgaggacgccgagagccccctccacgagatcaagcgcaaggtgcgttcgcgctgtcccatcggtaggcttgcctattataggatttggatttctggagtagaaggtttgctcggttatggccattgtttgactcaggagttacattgggacatctctgctttatatatcttcgcatttctattgagaaatgcggcaaatagccaaatatgcaatctagttcgtgaaatttgaagcatttggaggagggactgtctcgcactgtcgctgacacgccgacaggcaatttaagatctgagtaatcaagtgcatccacagtatgagtggatctaacctgaatattaaggttttgtcgattgatggtgccttggccacaccaacatggattttctgtgcgtttgagatgaacagtttcaaaatacgttcattacaaaaactagtagtaagctaaaactatttggaaagagcggaattcaccggtttttgacggaatcagctagagcacctctgaagtttcctgggcaattgttgaagaatggtgggcttggcgtgcagctaacctaggaggcgtggtgatagaagaattaccgagtgatcactaataacctctgtgttggggcaatgtgtttaatgctcaacgagtgtaggacggtgtggagtccgtagttttcccaacccctaggggctggggttgtaaaacaacaaccatgtttgttgtccaaatattttaaacttctccaatcttaataaaattagtcggggcacttcgccgctggcctggcaaaaaataagctagaactaaaccaacgactctgacttcagaatctgattgagagaattgctcctttctgatagtggatagtgcctattagaccattacagttctttagggtaattgacctttgcggtcttgtaatttttaagtgtatgtgctatggaatggggacaaaaagatagtaagctgaaagagggtgaacaactgatcactcatgctgtacgcatcgacctttgttatattcttgatgttgctgacaaaacattttgtatctatacttttttttttcagggtggggacttgagatattgccagaaatgtggccactataaaccccctcgtgcacaccattgccatgcttgcaaaagatgtgttctaaaaatggtgctgatcagtactaatctgtcttgtatcttctgttaattacccacttacactttttcagcaacttcttatgtgcaggaccatcactgtatatggattaataactgtgttggacatgagaactacaaaatattttttatctttgtattgtatgctgtaactgcatgcttctatgctatggtatacttaagtttctttgatttacctttgcaaccatgattgtctgggtatagagcactgagaaagtttcatgtttatttcagattcttatcatagggagcgccatgtacagtgttcctgtagatgaacattcaagcaatgattcttctaggacatcgattgtaagtgtgctgggagtgtaattttgagttagtccgtactatgatattccctatttttctgaaccatcactaggattgttgtaaactttgaaggatttttcaaattgacagatcatttgtgggatcattctatgcccgctgactttggctttgacagtgctctttggttggcatatctacctcatattacagaataaaactacaattgaggttggtatttactccctcaattcacaaattaggttgcttttttcacttttccgtctgtgcaatatttgaataaaatatttatcaatatatgctaaaattaataataaatattgcatatcatggaagtattttgcaaggcaaattcaacgattatttttgtgaagttaacctatatgatttttatacatatattagttgtcaaagtttgagaagttaattgtgcaaaatcaatctcaacctctatttaaagatggaggattgcttttaacagtggctgtcgttaatataatttgcagtatcatgaaggtgtgagagcaatgtggttagcagaaaagggtggaaatctttatcatcatccgtatcatcttggtgtctacgagaatcttatttcagtaagaactattttgttcgttgctatttgtatcttctttcagagcataaacattctacatatcctaatagaaggcaataagggaacaaccgaatacttgacttttgagaaacaatgtcgaagattgtccccttttcctctgtataagacatcaaagcttttgccactacccattcatccagtagaaacagaaaggaaacagaacatgagaatgtcaatccattaaatttcagcgtagtcatcttatgcagccttctggtacttgctttaacattgcatttgtctcagtaattcaaaattggttgcatatttcggtgcattaatattcatgcttcctgaccaaggggaggtattgcttgttattgatgtcccaactattgtcattattttatacaggtgctgggacctaacatattctgctggctttgtccagtatcgactaatacgggaaatggcctccgtttccgtacatcacatgatattccattatctacaccatcgatgtgattaacacgagatactgttatttatttattcattaggtagttgctaatctgaacatagacctctggcttcctattagattgcccatatgtgcctctttttttttttactgaagcattgtgttttggagcagtacagataatctgtcaaggtcttgaagctcctttatgaaatgtgctataagtgtaacgtacaggacctccccacggctccaagttaggacatgggctaggctgctcctttgttttcgtggtggttattttacatacttgatgaggcagaacatgctgcctcgcctgtaatttagtgtagtctctgattgcgtttattaggagatttgaatgtagtcaattctgttgtagatctccccggcaggaaaaaatggggggctgctgtaaatccaacatccatactttgttctcttaaagagccacttatggcagcgaaaggccacgataggaatcatctgagattgttcgcatacatgtttattaagaacagaacttatatttatttgtcatacatcgacgcagtttctttgtgtatacactgctgacatatgcttgttaatattaacacgatgatacgatgtttgggtaatgtttggatgattctacttcttcaaagctctggttcaaattcttctgcattgtatgttagatcgcataagcagtcaccgtataaggtgcacaataatgcatattgtggttcatcactcttgcatggctatagtcttcctgtgtgaaaatggcgcatgtcaaactgcaacacctttttcgaggttgatgcgtagcctagccagtaaattctgttactatgcagcattgtttaaagggcaactcctcaatatccgataaaatcgtgtaagttgagcattaacttacagagacgcggtatatcatcagatatgaagatgcaatcattaaccaataaccggtcaatgattgcatgtgatgatttgtgaaaacgttaactacaattttgttctatcagtacagccatggtgtcaaacaggagcaacaacgcagcatctgatgaacagtagccaacaagcaatcttgcagatgatgatttgttgcggattatttctaggttacagtagtcagaagcaaatactagtcatctattttccctttccttttcccttccccttcttcgcgtcaagtttggcttggacacgagctgctgcagcagccttcgcttcttccctcttctttttctcttcctccttggtggcagcagctagctctcgctgcttctttagttccctaaggaaattcatgtattccgcagatattagtcttcatagctcaagaaggtagaaaataagcaattatctcgagataatttcacaggcaatcagcataacagttgattccataaagtgattactgcattcctcctaactcctacctctccagcattatagttttgactaaattatgatgcacgtgatatattaaccagttttctgtatcttgtacagctgtgctatttaacataataactgggaacttcatattgtaatcataacaagaagacatttgaaaacatcttactctagcctggctttctcatcagaaacactgcccaggcttgaacctttcctaggcctacaagccactaactccacctcaaaaatgagtgttgcactgcaaagacaaagctgattcaattatagacaccaggaactcaaatttgcatcgcataggagaaatagcaacagacttgggtggaatctctggcggcgaccctgcacttccgtatgcgtattctggcttgcatgttatttttgcaacttcaccaaccttcaatattccaatatgtcactccatatcagcaaaatctttgaaagaatcagaacgagctagcaataagaatttagaagttttataccttcatagttcttaaagctatatcccatgctttaatgacagctccttgcccaatttcaaatgagaaaatagagttgtcttcatgagtggtgtcgaaaacttcaccattttcagcgagtgtgccttcataatgaactgtgaaaggatataaatgtaagtgggctaagtattgtgttatgtcttgtattatgcacatactcaattactagtaatatacataaatagttttacacatcgacatgacaaacgaaacacaggcattcactgtgtggtactgtcactgataaaaagagtggaaacacggctgaatgagaaattattaggatttaggaccaattaaccaacttataaatgtaactcaactgcctagagattgctaatcaagcagaaggaatttcatggaaatgattggattgagaaataaatatatgaactgcagtaccatcaaccaagggaagactatcagttggagctatagcatcatcctttgcttttctgaccaccgtcttaagaacacctccatccccagttaaatctgcaacctctgccatgaccttgctatgctatcaaagctccaaaggagatcctgggtgattattcatcatagtattagagtatgtattataacagatccaatcttcatcaaatcataaagtacaggcatctagaaaattgggggaaaaatcactttctccacttatttaaattcactgctttcacaatttcaagccaatataaaggtgccccgtactttcaagttgaaccttagcgttccagaattccacagaagaggacaccacagctaatgacctttaacttgaagagggacagctgtggaaatatcctaaccaaacgttggtaatcaagcatgacactcattctgcactccccacagcagcataatcaggtatgtcactttccttttctgaaggaaaacacatagaccaatcccagtctctcctaaatacacccaatccaactatcgcctaactgggactgcattgatgcaaccaaaaggttgccactgctgtggacgtgtgatcagacgttgctgctcctccccaaccaacaagcctaatacagacctacaccttctagcattccatgcgtgttatcatgatacagaaccgcgaatccctcgttgcaaagttccattgggcatcattcggggcagtaaaacaagccggatagaccaaacagcgggggtctcgcggcatataccctcacggaagatcgctcgcgaaatcgaactgttcaaggtacaccagattggaacacgcccgaatcgaaaagagccaatcgagccagctggggggcaacagcagacacgtaccgcgagagcgctcccaaggcgggcgctaggatagctcgccgccccccaccggagaagccctcgccggctcgccgccgcccgcgggagaaccgagcaatcgccgtctcgtcgcctctctctctctctctctctctctctctcgattattcgcgagattgggaagatagtgatgcgaatgggatgcctccccgtagcggtggatgtctcgacactcgactctcgactcgagcagtgatgatgcctgctgagtggtgggccatgggagaaagtacgggtgggaatattcgtatgggctttggggccttgagtagtgagacacggcccactatggaagttcgcgacctaactcctaagggctaaattcacggcccatcttgagaggtgtgcaatgaaactgaactgaacttttggcctgtccatgggtacgggcaggtatttgacgtcttgctaaggctgtgtttactaactttttccatcacatcaatctgtcatatatacataacttttcagtcacatcgtatcaattttaacccaaactttcaactttagaaagaactaaacacagtctaagttgctagacaaaggcctgaacttcttttcccgtgcgtaagacgatttggatagaatgtacagtgcagtttactactctctatccaaaataagactacaaatctggatcgtcttagaatagttacattcttatctagatacctaggtgcacttattttgggactgaggaaatatataacagtggccaggtataacggtaaaatggtgaatctagaacaaaaattatcaggtatctatacgcatacttaacatgtagggcttgttcactttgctaacattctcaacattaccaagttttagcattatcaaattttggtaaggttgtcaaaattttggcaaagttgcaaattttagtaagattttatatgtatttactaaaatttggcaacaaactaaatgtagccacttttttataactttacccaaaaaaaaaggtaaggttgaaaatgttagcaaagtgacaagcctgtataataggcattagaggtggagtaatttgcagtgataacacctgtcctgtgtactaaggttaacgtggctttgcccccgcccccgcagatatacctgccgtccaaaaagaaaaagtttgggctttgaacctctatataggctatgttcaaattcataagtatttttctttttttttaaacagaggagcaggctaaggttgtaaaagtacacctttttcttatcttgtcctactgtccgaagaagctagtctgtggactgtgatggctgggctggcaagttgctgccgatggcaacaggttgctcaggtacggacgtgtcgtttagggtgcgacgattgacgattcacgacgacgacgactgtgctgtgctcaacagtgcagacgctcagctgcagcatgcagagccatagctggcctgatcagaacagtaaagcaacggcgctcgatctgctcttggccggcctctcacaagttgtgaattgaaacctgcgtgatttcatttcgtttctgtaacgtcaagaagaactagaaagaaaatgtacaaatacgaaccgagagaacgaggcatatatataattacagagaatgtatatgaggagtacgtagtttcacatatttcgtcccttacattttccatctagcaatgcaatacacttttttttcgaactccatttagcaatacatatatagagctcccctgtgctacggacgtggttgcatttctctcgatcggaacgtgaagagaattaagcagaagagagaccggcttaagcttgtaaaaaatgtacggtcagaggtagtcgacgtcgcgccagcacgcgagcatggtgatgcatcggcgcacgatgtagagccgcgcgcgctgctccttcacgagacgcgcgcaccgtcgcgggaacgacgacgacggcggcggcggcggcgagcaggatgcctgatgcctgctgccattgccggcttccgagccggcgcccgcggttctcccgatcctcttcttgcacggctccctgcgcttgacgccctgatcctccgcccgcgactccatcgcctccatggacgagaccaaacgcgcgcgcgcgcgcggccttctgcttggtgcgcgtgagctcagttagtgttgtgatcagtggagagcgccgcgggtgaaatcaagcgatcgatcagctataaatagctcgcggcgagatgggtggcaaactggcaatgctacctagctctcggcaaggaagcgacttgtagctagctagctatagctatagcgagctctgcatcgtgagtttatcttggcaaaattggttatatagcatcgaaagtttacgtttttttattttatagcaccgaaagttaccggttcactttaatagcacccaaagttcaccatgttcccatttttaacacttccgtcaattctcaatcgttttccgtccgtcttgatccaaccacacacacgatatgacgtttctacccctcacaagtacaagtataatgcatgtcaatgaggggtagaaatgtcatatcatgtgtgtggctggatcaataacaatcaagacggcggaaaaattgacagaagtgctagaaatacaaacatggtgaactttgaatggtattaaagtgaaccggtaattttcggtgctataaaacaaaaacgtgaactttcgangcnananaaccaattttgccaatcttatatatcacggagatcatcgcggagtggaggtgtgtggtgttgcacgcatcgcgtgcagtgcaggacctttggtatatgtcccaccggccggggccttttgtaattgtatcagtatgtattgtagtactagtttgtacacgtgcgagtactacctttttttagttggaagtatctagacatcacaagcgcctgaaattttcaaaaagaaaaatcctgttctttagatggcaatacaatgattctagttactcccatgtaaaaaaaaacgttgaatgataaattattgtaacctacgaatatttataaaattacatgaaataaatttatagctcatgaaattttaaataattagatcaaaacaattcaaacatatatagataaaaaaataaaagtaaaaccatataaaacaacaaaattagagttaaatgattggtcattttatagcactgtaaaactatgtttatcagtatgtaactttaggtgattgaagatttacaaaattgcaggtgcttgaaaactagcaaagttctttttaattatatagaagatacgcgtgctcacacataccacaccatgcact

SEQ ID NO: 4284 - DNA, 17913 bp, Oryza sativa
ttaacgaggtatattaatctatgattagcgaatgattactgtagcatcactgtagcaaatcatggattaatatacctcgttagattcgtctcacaaaatagcctaggggttatggaatgggttttgtcagtaatttacgtttaatacacctaaataacaagatttcggagggctattaaatagccatctggatccaaactgatatgaacaaaatagacgctgcgaattatctaatcggcaatgacgaagtaaaggctcaatcatacattgacagattaatgcaaatgatcagccagcacccagcagtaacctactccctccatcctataactccatcctataatagtgattttaagattttacttgcaacatttgaccactcgtcttattcaaaaaaattttaaaattattaattattttatttatgacttactttattatctacagtattttaagcacaacttttcgtttttttatatttgtaaaaaaaatttaaataagacaagtggtcaaacgttccaagaaaaactgaaaatctagaacggagggagtacgatgattgactattcgtctagttgcattgacagggcagcaaaagccggaaggcattaattagtgaggtggggagagtggactgtagacttcgaattggaacccggaatactccagtattcatctcgcctgcttgtttgtacgtggtctaaactcataaatgttggctgacatttgccttttcgtttacacagcttaacgtaaacagggctcgacgatttaactatcaaaacagggctcgacgatttaacgatcgaaactttgtcagatcacggccctaaatggaccagccccatggaaaatggccggcggtcaacacaaatttctaaaaggcacagtttgcaatgtatatactgagctgaccattttcagcatttttatatagcaataggataattttatatccttaagagttatttggaggtaacatattttatagtgtaaaatttgatacctctgagtattaattatctcaaggtattaaaaattttaatgtaaaatttagataccttaatttactttttttaagtactataaaattcctcgtaaaaaattaccttatcttagaagaaacgagatagagtcattaattaaaaaaaattgagtgaaaaccataactaaaacaacaaccaactaagctaataactaccaacatggaagcaagacacaaccaagctgaaggaacaagaaaactccccacaccccggccacaacccaacatcatcaccatcacacgtctccgactacgttgggaagcataaaacaacgacagcaatttaaacccgtgccaaaacacaacttgattgggctcatgttagcaatgtataccagaaacatatttttttttgggcatacatcttgtttaaaacaacgagtatcattgcttttttttaaaaaaaggtgatagaatatgcatgaggatagtattcatgtgccaaaagctatatttgtagaagtaagatccaaattagaccccttatatgtcaacacaaacagcttgttagttgcattcatgcggatactagaaagaaagatcacgttcacatgtctcaaattgaaggaccttgttagttgcatttgcacatagatacaaattacttcatataaatctaccatccaatcctaggttagtactcgttattaagattagcaaccaaatatatatcttctcattattaagagcatacccaacaaatacctaaaatccatctctaaaatattgtctttggaaattcctggtttgattttaaggtgtaaattattatttttatctccaacagacatcttaaagttaactcccaataataaaaagtgaacccaccatagtaacagataaaaaacagaaatcattcattccatccccacacatctataagagaaaatttggagcaacttgttaaaacaaaatataatttagaattaggtttcacttcggggtgctgttagctatactttatcacccacctaagttaatcctggccttgaaggggatctgaaaaaaaatagtgtgaaattattcgcctcagttccccctctcttggggattaaacaaacaagaccttatatggaccgtgcttccaactaccccaaacttctaattttctatcatattacatcacatccaaaacttttctacacacacttccagctttttttccaagcttataattttccccaaacttctaattttttttaggaactaaacacagcaatggtctagccctgtgctttatccagtcaatttcccttagtgtatctaaaaaagattgtaaaatgtactactttcactggccaggtttatctaatccataatctaaaaggaaccgtactatcgcatctccaagactccatgtaaccactacacacgtcttacgtctacaccgtggaatccaacagcgagatcagtgcgaggcgaacgccgcaagaatctctcttgacgcctaccttcccagatcgaacgttcccaccctcatcttcctcctcccctcccctctcctctcctctcctcccgctactccggagaccagatgcgccgcgtcgccatggcctagtggagatcgttcgtggagatctcctcctacgtgcgcgcgtgaatcggtcgggcggcgatcgagccgaggtgaggtgtgtccatggtggttaccaagatgcggtgggcagacgacggcggcgaaggcgacgacgacgacgatctccggctgccgggcgccgggaggcgttcgccgtcgctcggcatcctggcgttcgaggcggcgtccacgatgacgaagctcctgtcgctgcaccggtcgctgtcggagaaggaggtggcgaggctgcggtcgaacaccatgcgggcggccggcgtggagtaccttagctcgaccgaccaggcgttcctgctccggctggcctgcgccgaggcggtggcggcgctggacgccgcggcggcggcggtcgcgcggctcggcgcgcggtgcgggctcgacttcgccgggccgtacgcgagcctcaaggccggcgcgcccgacgcgcggctggaccagttcgtggcgaaggggctcaaggtgaaggccaagaggatggagcggctcgtcgccgccacggcgaagctctgcgccgagatggaggcgctcgacaagctcgaggcggcggagcagaagctcgcccgacgtgggtggggccgcctcagcgtgccgatcccctcgccggccgccgccgccgtcgacgcggtgggctccgactcgctccggctgggtatcagggcgcagcgcgccagagtgcggcggctcaaggaggaatcgctctggagccagagctacgagaaggccgtcatcctcatggcccgcgccgcctgcgcggtgttcgtccgcgtctgcgtcgtcttcggcgcccacgtccccggcctgcccccgccgctccctcccgccgaagccgtccacagccgcctctccaagcttctgctccacccaatgtcggcggcggcgcagcccaggtcgttgtcagggcccatccaacgtcgagacgtgccgctgcgcatcgagatgagcagcaactcgtgcccgatcatacgctcgcattgccagcagccatggcagacgtcgccgccgggcgtcgactggaggaagctcctcgagccgccgccgggcacggtgggcggcgcggggctggacctgcagtacgcgaacgtgatcaccaccgcggagcggctgctgctggagacggaccacgccgaggggcggcagcgccacgaggaggcgcgcgccgagctgtacgcgatgctgccgtcgaagctgcgtgcggccgtgcgggcgaagctgcgtggatggtggagggagcgcggcgccgcggcggcggtggcggtggagctggacgcggggctcgcggaggggtggaggtcggcggcggggcgcatcctggcgtggctggcgccgatggcgcgggacacggcgcggtggcacgcggagcggagcctggacaggcagcggcggttcgaggtgggcggcggcggcggcggcagcgcgcgggcgtgggcgctgcagacgctgcggtgggccgacgcggagaaggcggaggcggcggtggtggaggtgctcgtcgcgctcagctgcgtcggctggtacgacgagcggcggcgggtcgcgtcgctccgtttctgagctagccgcctctttggcttccacgccggtggcctcgccgcaacggcgcagcaccggcaacggcacgtaggtacgtgcatggaacggtgaaaaaatttagaagaactagtttgccccaaatgggaccgattctttgtaaaatactagtattttttttaattcgattctttgtataataatctgttcatatacgagttccaagagtaacaccacgaaattgtgtcccgccttgcctgctggactttttaggctgttcccacttctcagtccgagcacttcgttgatggccacttcgaagtcgacgcgttcacaagcatctctctctagttctcgtcagcactgggtagcggccgtttaactgtttgctcattgctgctttcttcagggtcgatattactattacgagtaatttgagtaaaacttactgcctctatagttttatctctacttcctccatcctataaaaaacaatctaataccggatgtgacatattctagctgttttcaaatttatcgtactaaaatatatcatatctggtactaaattcgttttttatgggacgaaaggagtaaatctagaaatgatatagaaatgataagtgtcagctccatttggtcgctcaatggaagtagcggcctagcgggtgatgttctacgcaaataatagagcttaacattatctatattttaaaataattcattaccaaacacactccatttgctagttacaaaaggcgacatacattttcaccaaattcgctgattcacttaccgaaaatagttctaaaagcaaaatctacccatggctatcttcataattagttcaacatttcaatcacctgctgtcatttacaaatgtgtgaaacaaataaaaaactatggctgagttcgaggagaaggaggagacagagaagatatgcaaaacgatatgagccattaccacacgattaattgagtattaattattttaaatttaaaaaatggattaatatgatcttttaaagtaacctttctatagaaatttttttaaaaaacgtaccgttgagtagtttgggaaacatgcgcatggaaaacaatgtctttctctccaatcacccaatgaacgaacgcagccagttattgtggcatgtacaaacgttaagtgcatgtacaaacgttaagtctgatacgagctcttagggtgtgtttggttgggtggatgagcctggatgggagatggccgtccgaatttttgtggtgtttggttggagggcagggtggatggggcggcccagaatagggaatattccctcaatatgctggatgagtgcatccggcctatttggttggatgaagccatccagttttagtctgggtgatgtgtcatattctaattggctgtggttggtttgattttctgttaagcaagctttaaatgattttttctactaaaccgtttatctaatttatggtttgattacaccattatatttgttacaattaaatttttaaaacaagatctcgaatgattatattatgattaaaatatatatacgacaaatggatcccactaacttatggcttctcccatccatactatatccatctaaacaaacaagaaattagatcgccatatccatacaaatctaacaaaaaattagatcgccatatccaacaaaatatggatggccatatcccatcatgcatgaccgtgaaccaaacacatccttagttaatacatactatttttctgcaatagctaagacaataaaagctctaaaccattaatgcccatgaatttttttattacttttttttccttttatccaccccatgcaataatttttttctttaataaatgctaaaagtcaccactgagccattttcatgcgtagcaaccatatttttctttcctcccctttctctcatccatgttaccaaatttattcaaatttattttgcatggcaacggagaaagtccgttaagcactgttgtacatgctctagagcaataaatctcatttatgcaattagggtccgtgcatgttaaattcttctaaaaacagttaggcgcaaaattctgaaggagaaattcatatatatattggtgcatttacaggcttacaaccgcagattattgcatagtaccattcgttagattgtggaggctacatgaccctgccgatccgggtatcaacaactgttggttttgaaggtcctgaaaattccaaggcttcagctaatgttaatctactattcctccaagcatgttctgcccattctttcatccgttcaccttcggctcttctatttgactgaataagcaacaattctgcatactctcctgaaagttgaacatgtaaagacaaattcagtatggcctcaactagaatgggactatgggagtagaagcatccatacaagcaacatcaacatagaaatcaatgagttgaaaaaaaattgctgattatttgattgctgccagtttaaaacaacaatcagcatatgattgcgtccaatcgactatataaaaaaatgttatatttgttggggcttagaaaatcgcagctcggtctagcatttgtgcgcaagaaggcactacgcctgtttgtcaaatctaagaattgttttccccgatacaaaaattattagaaatttgtgttcacacatgacacatcccttgatgagctccaacagaagtaatatatcacgaaatcctactttactaaacaaacaggcagggcagatttggatgccatattgttaggttatagtgaagttagctgtcaatcaatcatggtgacaattttctcaattttaaactatatatatgccataatcctggatgcaccacacaactagttctttaaaagttgcatttgatgtaatgatcttatttaagagtttggtgcaataaattaaagaagggattaataggagcgatagttcagagtgtaacctctagcaagggagatgatgtccctccaatccatctgcttgctcacacctaaaaaataaaataaaataataaaatcctcaagtggttaaaacgagccatatcataagagattattgttttaccctcagagttaatggcaggggctcttaatacttctagggccttcctgtataacccctgtaatacacagctggtttgataagctcaaagtcccaacccacccagactgaaaaaagtttactcacagcatctgtactctgtagtctgtagagcagtgataattataactgcgagcaaactcgttcgagaaagtacatgaattgtctcatcattaaaactaaagatcaaaggaacaaggccattatagtttctactgatggacaacagggcaagcagaacaggaatgagatatttactgacctcctgaaccattattgagctagaaccttctgcttttgctttcagtttgtacattctagctacacaagtcaatacaatgccaacctttgggtgatttgcccctgcatggattaaaagcttgcagtattggtaacttataggcaattgattctgccattatttattattatattatttaataaattagcttgacaaaccaaattgatcttcagccttctttagcgcccttgtgagataatcctctgcctcactgaacttcctggtttgaaaggaaaaggcaagtgctctcagttggaagatggaacaaaagggaagggggaacacagaattgctacatttcaaaagccaaatgctcccaagtttatcaagcaaacattaggactaaaaaggacaacataaaagattcagaaattgtcatcttaccctgaatgtgataaaagctggccatatgaacaggtggccccaagagaaacctcctcaggaaccatgttacatgtggctaaaaaatttccagacatgtcttccatggttaatgcctccagaaccctttcatacatttgagtagccaaaggaaaatccccaacacagtgcagatattcacaatatgaaagtacagcattttctgtaaggaacatcactattgtgtatgaaataattgcagggaagaatgtgaaaggccaaattgtctcagagacttccataccagtttgtttattgcctactccagcacataggtccttgcacccgtcgaagaacagctgggctggtaagaacagctgtaaatcattttggacaaaatgccttacctatgatctacaagagataggccattgtaaataaaaataacctgattccgtctctccatttagaagtgcaataagccctttgatagcattaacccgacatttcagatggccctgatctgaccatttgatattatcatccttgattgatagatcgaccaaatcatctggggacactgaggtgttgataacctgtgtttaaggtaatcatgaaaataattcacctaaaaccatacaaggctaaatgtgcttgagtgctgtggaaaacctggcccgcttccatgcacagccccattgttgcttcccatgctgcaactgcacattatttaccaaaatatataacatcagttaagatcaaaagcttccctctcctcaactctttccatatcaaatgatgatttacattcttactcgacaaaagataattgtaagcttgtaatgttccagatcaaagatatatcaccgtttaactgagtgctagacaaattacacacaccaacacccttccacttcatatagaagggctaacacaatggtagacatgcatttgtccgtgtgttcataacttagtatgttggtattatctactcaattaacaatgtggcactaaaatgtgctcccgagcggcaatttttctattgggtctaggctacaataattgaataaccatcagatcatcaaatgataagttccaaatatctgtagtttttccttgtctctggtggctgctaaaatcacaagataaatatgagacttgggagacccatttgtttgagaagttcacatagctagtatttcagcctgctcccaatacagaatgctacttagtaaactttagtatttacagaaaggactataaaagcacctctgaaagctgcaggagcaacttggttggttgccttgagtttttccattgcttcttggcgtcttccactgtaccgagaaactaacatgatgttactcaaactactcaactgggaaggtaaaattagaaaagttaaatccagtataaaatgggagttgtgggcagttaaacatcattatctaaaggaaatggatattaatttcccacaagtgataccaatcctgctagctagcataggattctgaggtgtagtgtattacgtttcgcaagattatctatatgcacaatcctcttttcctttctgtaatgcttgttatgtctaaatccttcctaaatgtcaacatataggtaaaaaacgagtggctaaaaccagctatgcagatcagggaccaaattgaatcctattaaagggcaaatttacgagcagattagatagaaacgacccaaactgctcaatataaagtgtttggattacaaaatccagatgtctagcaccggacctccgatagagcagcgtagacatcgcgagcatgagcatcccgacggcctcaccgcacccctcgccgcctccctgcaggttcgaggccccctgctccagtatccgcatcgcctcatctggcacaacagcaacagcaattcagctcacacgacggagcgaccgagtgaggctaaaaaaccctagcgctcagcggcaccacgcagcaatggggggacaacctggcgagctaccgggcctggctccgccgagggcgtagcggaccatctccgccgccacgctctccggctgcgtcgcgccgccggtggaggaggttgcgtagtggcgggcgcgcggcgggcggggcttcggggagaggagcgccctcgcgagggccgatcggatcgggttcatggctgcgcctgcgcctgcgccgccgccggccgccgcgagtcgccgcttgaggagggaggagttaagcggcgagagccgaggggaagaagtgcctaggaggctagcggctcgtttggttggagggagtttctagcagggattgggaggttagagggaagagactattaagtgttttgattggttgggagagaattttggtgagatggggatggagaattgagaaaggaactccctcctttttaataccttggtaggggcaggtaattgggagggaattcctcctttactttgtctaagcaaatctcagtcatctgtttttattaatgacctaatctccaactaaactccctatcaatttccatcaacccaaccaaacatgatattaggattaaaaatcaaatttctatcttaatctcatcataaattcccttgtgtaaactcccaatccccttccctcacaagttaccgaacaagccgtaggagaagtccagaagagtggcagggtccacgtgttcaaagcacccgtgccacggcccatgggcccttttactgaatccacaggccttgtaggcacgaatttgcggatccctattccctagcgcatatactacagtcgttgagtagatacgatgaggtaccattttttggtatctcttgatacctagataatgtgaggtatcaaattttatattatcttatggtacctcttcaagaactataaaatctctacttctaaaccctttttttaggggtaaatggcaggagctctgccaatttcattaaggagagtagagaaaaagcaacaaaggttttttacaaacctagattacaaaggatcccaagtattcttctatcaaggcaaaccggggagataaggggctaaaattttaagaaaatgagaagcaactagaaggagagtacgggcactactcatctagaacatgtgcttcaacgtaggctttgcacatagcgataattgaatcaaccacttgcatcactgtactataaatgccattgaagactcttgcgttgcgctgtagccaaatgccccaagctatgtagatgaagaggtcataaaaatttcttctttgttctttggccatctctcttctgcaggctgaccaccatcgtagcatatctccatcgaaggtggaagccacatgcatgtggagcccgccttttgccaggtgtgtctccatacctgtttagcaaaggcgcattccatgaggaggtgcgttgttgtctccggttctactccacacagaggacaaatgtggctgttgtcccatccacgaagctggagtttgtcggctgtgaggatctttctatggatcatgagccaaccaaagaatttggatttgttttctaccttcgccttctagaagaaatcagacatattgtcttgtatgcctccaacgaactggatcctgtaggcggagtttgcttaatatggtccatttggagtccatctccaagctatcgcatcgtctatgccttcctgcaactccacctattggatttggtgccatagaaggatgaattccctaacctgtgttgtggtattcatttgtctcatctttttcaaccagttgttcccttgtatctcctgtgccactgatctgttctttctcgtggctaactgatagagggaacggtaaagttctttcaggggtgatccgttcaaccatctgtcatgccagaattttgatttgttgccatttccaagggttatcgtggtcgaaactctgaacagctgcttgtctgtttcatcacaaagaagactcgatccctgccaaggcttgttgacggcggtccattcctgccaaagccagcggagtcttaaagagcgaccaaaaagttcgaggtttgttataccaaggcctcccatgttttttggtctacagaccctcctccagttaactaggcagtgtcccccctgtgcctattctgaccctgtccagaggaagcccctacgaattttgtcgatctttttttcaacccattttttaagggggaaaacagtgaggtgataggtcgggagggcagagagggtagactttatcagaaccgtccagccagtcttgtttagtaactttcctttccatgttgggagcctagccgagaacctatcgatgagaggttgaacatctgattttctgagttttctgatgtggagtggaagtcctagataggtacaagggaagtgtttcatctgtgccgggaagggggagagaatatcctgtaagttgagggtgccacatctaatggcatagacttcgcttttggataaattggtcaccatgcctgtcgcgaggccgaaattttgaagaatcatttggaccgtttggaattcctgtttatctggtctaaggaacactacaacgtcatctgcatataaggccatattgaaacgagcagtcggcctgtggagcggttggaggagacctgcttcctgtgctgcggcaaggagtttttgcagaggatcaatcgctagaatgaagagcatgggtgatagagggtctccctgacgtaatcctcgtccatgcaagaagatgtttcctgccttcccatttaggaggatctttgatgaggatgttgctagaatggaaataatccatccaatccatctgtctccgaatcccaatatctgagtctgtctaggagataaggccagctgatcgagtcgaaagcttttgcaatgtcgagttttagcagaatcgcgaggattttggacgattggaactcacgcaccatgttgtttacgaatagaaagttgtcttggatgtttctgccttttatgaaggcactttgatttgttgagaccatctgttgcaattttggggccaatctgtttgctagtaacttggagaagagctttccgaaggcatgtatgaggctgattggcctgtaatcacctacccttagagcatcagtcttttttggtagaagggcaatgtaggctgagtttaatagccatagactatgagtgtcgtgattagcaacctgatttactgccatgacgatatcttccttaattatgtcccaacacttttatggtgaggacttttatctaaaaacctttatagaaaatttcagtatggaaaagtgtgcgttagaaatatacatgtgtcatatgttaatatatgttaatatcacaagtctagtttaaataaagatacacacagatatattgaggccgttcagttcaactgggttgtgggtgtacaaccgcagcgctgcaactctcctacataattttttgcttgctggtccgaacacaccatttatagaagtccatacaaatttgttcttgaaagataaactgatgataaacaaatatattccgttccttgaagtatcaattgcttccaaacagcccgtgtagtatcaagtggggattaattatcttatccttaaaataaacaggtatttttaaacgcagcaagtgttgtctgaagtcgattccttcagatggtgctgttcataaaacggctgaaatgaacagatgacaagaaaatcgaacagtaaatagtttcttgactccagcaagtgcacccatcgcggggactccgtctttaattccatgcattgtgccgtctccaataatgaacttaccatgaccatccttggtggtgatgatttacagtacaaccaatctcttaattctcgataatgacttccaagaaaattaactaagcctgatttttctacagagcatttttaggaagtcaaactcagacaacacaagttgcacgtagttgcagtctagcttcagaatagtgatatatcgcatacagtactgttaacgtcaaaatttagcaagccccagagttatcatcagcttacagtcactatcggctttagcgtcttggaatcatccaatggaaattatcaagtcttcaatagttggattcttggtaaatttggttaaggaaattaatcaattaaagtaagtttatcaaggatgcggcacgacagtttatatattaattaggaagagtctattagtttcgtttcatctttagggaagtgtgtttagcattcgataaggcctatgtttttctttttatctttaggaaagtttatatcatgtccaataaagactagtatttacccatgggtataaatatatacacccggggttattgtaaaatatcctcgataaatacaacttcggcatatcgccaccttttacatttctactttttcgacgagttcttgcttcgagttaggcatcagcttcgatcttctgacaagaggtatgacttgttttagcggtttgcattggtggattagggcatcgttttagatgttctaatctatcttctacagcctctggttatcatatatcttagttaatctagcttagcatattaatttgataacatcggatagaattcgttttagggtttatgctggtatcggctaaattacttgttagattagattaactaagatatccacaaccctgaaaatcagtcaaatgtttgattgtcagtgatgcatcagttaagtttgatctactaagtcgtgcttagaaccataatttctagcttgctttttaattgccaataaagatttcatcagggttttagttgataagttatccatgtaaagcgggtaggagtcctctcgaggacataaccacatccaagatcgtcaaatcgatacaatacctggcatattataattcccaaatagaaatagagtattacctctcgtcgaaagggcttaaatctgtctaaacctcttgtcacaacccatctattttagctctcgtgtggtatcgcttttcatatttcatattcttagtatcgacaatgaacattatgcttatgcatgagttagtatccaacttctcttgtgtttttactcatctcctccggttaataatccaaattgtaccaaccagcttctaactgaattactatagaaacttgtagaatccctgccgtacaaatattgcaaatactgttcagcagtagaaggggggagattgacgtgagattaagggagatgaaccctaataattatggtgtgtcatcaagatttagatgctataaatgccatatgtcgaaaccggaatatttaagctcatgtgcacgcatgcaaattaagttgtcaagactcaaaagagatggttgacataaacttatcaaacagaacctttgaaagattagcttgataatgcgattaagtgagagtgagcgtcttcttagttttcttttcgttaaggattttatggaacactatacactggacagttatagcagccatacgtacagatatcagttaccatcagacaccaaacatgtcgcactcgaccactccagcaacaatgacatataatcaagagcttaagcctgtgtgtaagtcaacagtgctggtaattaatatctccaaacccagaaaatcataagcgaaaaaagtcctgaattgaaattatctggctaccgatcgatatggagtattaccttttaatcttttaatagatgacgtcattcgtttaactattcgttttattaaaaagatatataactataatttattttatttaatatttaaaatataatttatatcttatatatttatataaaatttttaaataatacgcgtgatcggcaaagtcgacgacgtcatgggttaaaaatctcagaggcacgaattgtctcatcgatctgacccagctgaccagaattattaccaccgggaaaatgatgtggagaggcagcagcttggcgcttccgctttcagatggcacgtcacgcgccacgtgggtagctgcgtcatccttcccgagatcgtcggaagctgtgtggcaaatcaaaccgcgacgctgatctgatccagcaggttgttttcagagcaatcaaattctagcaatgcaggagtgactaaacgatgaggtggagagaagaaagatgggagggagatagtcatctctcatgtaaggggctacccctacataaactacaataaatatgtaagagtgctagagatattagagattgtgtggtagagataacctcaggtcattcccaacccaatgactacaatgatgtcactgcacttaaaataaaaaatgatgtggcaagtgaataaatgaagaaagagaaggaaaccagatcttgcatgagacatgatttctacacaacatacaatgcatcatgtgagataagtagcattaaatttaagtatgaaagagtggtgtttgcattgaaagagtagtgtatagtactatttttttatgacgtgaagtttatagaaactatgtgtagtgtcttgagttgagattgatctaatacatgttacctcttaattaatagtgtatatcatgtagaaattggatggggtagtcatctctactataaagcttgccctaattgcttgaaacttgtctgttaagtaaagactggttaagagagagagagagagagagagagagagagagtaaattcgagagcgatcgatcgaagatgtttgaaaaagaaacggagaattcgtgttccagattagatcggctaactgcatttaattaatttccgtggagactcgcagacttggccggggttttggggggtgctgcaaatgcttgctaatatcactatttgaattatttgaaaccgttagttgcttagggcacccataatggttatctataggctctctataaaagatccatgtcagcatatttttcttagaagagattaaatgaagagatagactaaagctatctactaacccgaagatagtctatagaaaaaaacgaggcaatggattagagagctatagatacccatgtagacatacaattgagctgagatgtacatgttttatagagagcaccttactttaccattgcgggtgctcttatgagatactcggagaaacgcgcagtgctactcctccgtaaggtagtaagacgatttgggttcaaagcctcacatcttctaattatttatattaggttattttttaatattcgtgtttttttaaagatgctatcttcgttccataaaaatcaatgtaatactctgaacagaaatctctgttcagattcattgtattaggatgtgttatatccagtctatacgttttttatgagaatgagcaaagtatgcggcttgttgtctcgatgaccgatctatttcccccctctctatgttggatactgttctttagtacgctgagtcatgttaactgtttgttgatcggaccctccatcagatactatgcatggacgaacacaaacgaccctttactcgtgattgttcctgtcgtgtcggctaattgcatttgcagcttcccagatgctgcatcaataatcaatctacataaaggctagagagagatacgttgatcaggccatatgtgacttggtcaactgtcctaaagtcagaatgctagtccaaagccaagagaagaaaaatcagattgtaataagagtataagaccatcagcacaggaggggacctgacacagattgttgcgatgctacatctttacttcttgtataaatatcctctcaagtctcaccatctacttagctaatatagcctccctccgtccctaaatatttgacgccgttgacttttctaaacatgtttgaccgttcgtcttatttaaaaaatttaagtaattattaattctttttctatcgtttgattcattgttaaatatacttttatatatacatatagtttacatatttcaaaaaaaaattcaataagacgaacagtcaaatatgtttaaaaaagtcaacgacgtcaaatatttaggggcggagggagtactatcctctattatga

SEQ ID NO: 4285 - DNA, 1269 bp, Oryza sativa
aaaattgaattcagaatgcgccatggttgatgtcggtgcactacctgggcgccgatgccgtactcgcgggagtcgacggcgaggccgagctcgacgttggcctggacggtgtcgtggccgtcgtcctggaggttgtaggcgcggagcttctggccgaggccgatgccgcggcctcgtggccgcggaggtagacgaggacgccgcggccggccttgtcgatgagctgcatcgccaggtccagctggttgccgcagtcgcagcgggcggagccgaggatgtcgccggtcaggcactcggaatggaccctcaccaagacgtcctcgccgtcgccgatgtcgccctgcggatcagccacaaaatttttgcatttgctgaaatgagcgatgaactgatcgatcattctgctgcccaattgttatttctaacccattatctaacaaaaaaaattgttatttctaacacatcaaacaagaacagaacttgcagaaaatttgctgaaataaacgatgaaacgatggagtattctgccaatttgttatttctgacaaatcgaacaaggacagaatttgtatttttctgcccaatttctagtccaggagaagaagggaaaagagcaggaatttgcagaaaattttactgaaatgagcgatgacttgatgagttaatctgctcttctgacacatcaaacaagaacataatttgcattttctgcccaatttcaagtcccaggagaagggaaaagagcataatgtatatcacctttgcaacagcaatgtgctcggttccatcaagcttggattggtagcagtaagctcggaaaaggccccatttcgtcggcaaacgagatacagcaatcagttccaccagcttctccctcttccttctatacctgaatcagaccaaaagaatgagatgagatttcacaaaagatgtttgcatatctgaaaaatcctaacatatactgtcctagttccatgaccaatggcatctcatttctggttcgagcatcttagcttcaaattcacacggttattttccatgattaaaaatacctagttcctcctaggtaattcccatttttcttatttcaggttccaccttggagagtagtttcagcagtgcattctaaagaagaacaattctggctatgaagtttcaccgaaagaaagaagaaaacaagctataagttcacaaagggttcaccttaaggtatactaaccggatgagatcagcgattgaaacaattgggatatcatgctccaaagccat

SEQ ID NO: 4286 - DNA, 1036 bp, Oryza sativa
gatgggagccattcagagatggttttggttagtgtggatgggcatgtcctcaccgcccccatttcctcgaccgaggagaatgtggaggatgtgcagctaagtgaaccccaattccacttgggacctggggagagctcaagtggtgatttcagccgcagtggtgaggtgtgggaagctggcattgtcggtgatttatacatgccacaggaaaaggttaagtttgattctggaaatcaacaagaggctttggaagaacttggtgatgtaccaattgagacggataagtcacatcatgtccctgttactggagatgaagtgctccatacctcagtttatgaagatgtgactagtgcattgaccaatgaagtcgaatctctagttgtcccagagttagggaataatgatgaggactatcaagccttgatcaatgtagatgaggtccatgacatctcagagaacaaaaatgagggttgccgacccccttctagccaatatgaggtttgtgatgtctccaagaccgatgatgagggatatcagcccttggccactgaagaacttggtgatgtaccaattgagacggataggtcacatcatgtccctgttactggagatgaagtgctccatacctcagtttatgaagatgtgcctagtgcactgaccaatgaagtcgagtctctagttgtcctagagtcagggaataatgatgaggactatcaagccttgatcaatgtagatgaggtccatgacatctcagagaacaaaaatgagggttgccgacccccttctagccaagatgaggtttgtgatgtctccaagaccgatgatgagggatatcggcccttggccactgaagatgaggctcgtgatgtctccaagaacaatgatgaggggtatcagcctttggccactgaaaatgaggcttgtgatgttccactgcttgagaatgacgaggcttgcagggtgccagctaatgtagacaaggtttgcgatgtcagcaatgaggacactgagttagaaattgctagtccagttttgg

SEQ ID NO: 4287 - DNA, 2955 bp, Oryza sativa
tgtttttgatctggacttgtgttttagctgttttagttagagaattcagatgtcagcgtcttatcctcttcagtgacggcgattgggtcaggtgatgtatagtgaacgtgtactggagaatggggagtggagaacttgcagcagcgatagttggtattactgatcagtgtgtttcatccactgatgtcccttttgtttagtagtagttgattggataccgtaatttgctgttactcaacagttttgtgccatgtctgttctgtaacgatggtgatcgatttataggtttcgttgtacgttcacattatatgataatttgtatttatgattgtattgtgttaataatatttgaaaccaatattatgtttgatagtggtgatagattttattactctgccatgagttactaattgaattatgatattaattattaagctgaagatattatattgaaaggcggaaagcgtacacatcctgagacctgttttcttaagaaattgttgtacccttttgatgctggtaaaatttactgaagggttgtttatggactgttgagttgactattttttacttcctgctttgatattttgtctttaagctgcatgtgtcaagcctttggtttctgttgtttgcaatttctaccttacagctatgtaacatggtaatttctagcaccaatttactgattctttcctctatatttcagtgctcaggaatctggatatttcaggtctgtatgttttatggaagaaaacactggttttcaaacagagatataagttttagctctaagtccaaagttctcattctgcagatgtagacaagaatgtttaatacagatggtggaagtcatttctttggtgtttgaaaattattatcaggataaaaaggtcatgtacaaaacaagtttaactaagttgactgttgagtctatttccaacttcgcactggtctcattgtgtggcattgcactcatcataatcagataacttagtattcttcttttgttatatacttctatttacagttcaaagccctggagatgatgttgcagaatattaccagcaacagtcggaattgttggaaggtttaatgaaatggatacactcacagatcgtggttttcttcctggaatgtccaaggtctacattcttgctctagtaaggccttgtttagttcgggaaaatttttgtgttgggttgtcacatcgaatatacggacatacatttgaagtattaaacatagtctaataacaaaacaaattacagattccgctaggaaactgcgagacgaatttattaagactaattaatccgtcattagcaaatgtttactgtagcaccatattgtcaaatcatggcacaattaggcttaaaagattcgtctctcaatttacacgccatctgtgtaattgtttttttttcctacatttaatactccatgcatgtgtccaaacattcgatgtgacagcgtgaacatttttgttttgggaactaaacagggcctaacattaaaagaaaaaaaacttcattttgcagataaaatgttgaaagatgcatctatactgttttctaccttaatttgatcctatctgtgcaggaagaatgtgaaaaagttgccagaagtgaggcattagccatccggttatctaatatagcaaacatggttctttttgctgcaaaagtttatgcctcaataaggagtggttctctagctataattgcctccactttggattctctacttgacttgttatcaggttttatcttgtggtttactgccttttcaaagaaaacatcaaatccatacaggtacccaattggtaaaagacgcatgcaacctttggtgagtttccacaccaataactgccaattaggcataatttgccctgcatgttctatgcttttatttcttgaatttttctattactagaataagtcaatcatttttgttgaactctgatttgctgtagtatccatttatacgttgtttaagagataagagagacataaactgtataaatcgttatgtttcttgatcagtattcctcttattaacgaactctgacacaatccgtttgccagggaatacttgtttttgcttctgttatggcaacgcttggccttcaaattatcctagaatctacacgctcattgttttatgatgtaagtcttttcttttctcttcttaccattctttgactgcttttttcaatacaattatttgattcatattgattagcgtagttggtttttcacttctctattcaatctaaaccttctagcagatattatcagaatgcctcatgttccatgtgcttttgaaaaaaagtcattttcacgtccctttaatgggggaagattttctaaaaaaaaggccaacttgtccgttttcaattttgtacatgcctgtttggtacacttatgatagttaatatgtgtgagtactccatttcgtatcgttgacaatcttgcacttaaacttaactaactgttaagcacaccgtaataaaaattaggacagtaacataatgatcagattaatcaggtagctattgattatcttgtgctccagggggatactttccgcttgacaaaagagcaggagaagtgggttgtggatatcatgctttctgttacatcggtgaagctcctactggttgtatattgccgttcattcaccaatgaaattgtaaaggcttatgcacatgatcactttttcgatgtcatcacctatgtcattgggcttgtggcagcacttctagctaattatgtttaaggctgtattgacccagttggggctattatagtaagtgtactaaagtagtaccttggctctgtataattccttgtttattagaatttcactgaaagaactatcatttcctagaattgtgagatacactatagaatttgagtatgtcacgaatttaatcgggtaagacaactattttgg

SEQ ID NO: 4288 - DNA, 3018 bp, Oryza sativa
  unsure (1)..(3018): unsure at all n locations
aggaatctcttattcagcaataccttgatttcttaaatgttgcaaacaagtatgtgctacatgttctctatttcactttctttacatagatgagttatatctcatatttgatatgttccacccttttctgattattcattctgtttatttgtggatgcagggaagaactacagaagttgaaagtatgttccttgcttctcatcataatctggaggctattatagcagcctgctctttctgactaatttttcctttgttagggcattggtgaaaggagggcagagtacattcttgagcttcgagaagattcgcccagaccatttaaatctgtaagacttctagactactaacagacaatcctgatagtgagatcattggtcatcttctaacccaaattgatttgacagctttcagatttgggaaatattggtctatcatcaaaacaggtaacattttgctcttgttttctgtaggcacattatcatatcgacacgtcccttcttttatgtactaacataaaactcctaactaattcatttatgtcgcgcatcgaatagatacaagatattttgtgcaagacagcgactggaatcttcaaatgatcaccggaatggaaatgccaccgaactctaccactttgaagatgctggctcatattaacggtcagattgttgtgggctattgacttgtgattatcagccaggtctgccgctgaatcaagttagctccctcctgtattgccgaatttaagcaatctgtagtttgtgtaccatccatgattccttgggtgtaattgtagctgtagtcatctgatgtactactagagtatggagcaatggttgctcctctctgttgtagattttctccgagaaaccgccgtttaatttgagctgacttgcacgagcagcaggaaatgaaatttgtggaatatttcttggtaccttgagcattgaatccgtgaatttctttcatgttttggtgaattcgagcaccagtcttgctctttgttgcagattttctccgagaatccgcattttttactttgattagttcattctgctgaactgaaatctgtgaaacgtttttacattccttgaatttgggcaccgatgctgcgtgttgtgtatttactcacagtgcaacctttccaaattttctatagtttctgaacataacacacaataagaaaaaccgtattgtagtgtatttactgacagtgcaaccattgccaaattttctgtagttctgatttctgaacataaaacacaaggcgtagttctgaaaataaaaaatcgagagagaaaataacatgttctgatatctgatttctggtcatagaacataatgagtcgagaaaaacaaaagaatcgcccaccgtggggctcgaacccacgaccacaaggttaaaagccttgcgtnnnnnnnnnnnnnnnnnnnnnnnnnnctggcattttacaaatataaatactctagtagtaatttacatctgaaatgtggctcaagttttcttcaggttccagaccacagaagcacacaggttatgcctttgatagatttttgtccttgctgtgattaaatccattggaagcacccacaatcctgattgaaccatcccaaaagatatgcatagtacagtaggagttaaggagtatatgatatgatatatcacctaaagctttaacatcatttatatgcaaccagttcttacggtgattgcacggatacagctttgaggcatgaaaaagacacccgtccttctcttcagctatttgctaccgtcctggacagggcgccacttattcgttagcagatcattcacaagaccagactcgagaactcctaaaacagctactgccaaatgactgaattggacaagatgaaaacatcttcgatttgcatatagctgttggcctctcgttgcataaccaattgatgcagatgaatccagcagacattttaagattgaatacatatatatgcttcatcctttgtaaaatataacaatcttataacaaattagacataaaaatccgatccggacagagggatcatatcattttttttcccagtatgcctgccagcattgccagcaagggcaacacatagaccagcatttatcacaagaaaataaaatgcactagtagtagttgtgtccattgccatggatccaacaccaaatccttgagcggtagggcacacagttccctttcatggctaccttcattgctgacagtgtcgcgatcaggcggtcgctatccccaatctgttgacgcgaacaaataatgccacggcttctccggctaaagtcgcatgaaccccacactgtacttggctcgtgatgtgtttttttccttccatttccatcgtgtcacctgatcgctctcgaggctttcgtgtgtctggtgagctttggcacaacacgccaggccattcctcgccgttgaaacgttgaatacgccattttttttggttgaaactacggacatctagctgtcgacagtcgacagtttttgaggctgaaaactttcgattttttgaccgtgcgatctgcgccgtgattcctgtacatgtgcgcttgcaggggctggctcgaacccaggacctccatcctggaaggcatgcatgcgcatgtttttgagaagttagatgagttatattctagttatactccagttacaccctagatataatgtaactacagtgtaactgcattgtaactacattgtaactactatgtaactaaaatataacaacattatcatctctatataatttagatatattgttacatatattattttaatatttatatatgagttacattatacttatatacgaaattatattgtaattatactatagttagatttgaaagttttcttcttaaaaaactttcgacagttctctagatagtcccatgctgtaattgaaaagtacacttaaaataattttaaatttcaaactctttttcagttttgcctatctttttaaacttcaaactcttttcagggctgcagg

SEQ ID NO: 4289 - DNA, 1317 bp, Oryza sativa
ttgcctctcctttcgaataacctcatgtctacacatagtaagcctttagctagctagactttagctactattagcatcttttgtggcttgttagcggctaatatgttcagatgactatatacatctttcgatatagctagagggcaaaaatattgcatctattacttaggaacaattacaaaaataacatatatggcttttcagacacatatgcatgatcagtggcggagccactacttgacaggtcgagcggccaccgggtagagatgttcgatcttcatcgatcaaaccagactcaacggcgtacgtcgctggctccgccacagcatgattatgactgaggttaattaaataaaagagaagcaagtagcaatgagactaccactcacgaacgtccaacaagtagcaacgactactcatcaacgtctccaagtagctagggacgatcgagtagcaacgatacgccaaaatggcccaaagctagctagcaaagccgcccaagctaaagctagtgcacgctccagccacagaaaaagcaaggccgctgctgctgagactgagagcgaggcgcgggcccggaaaaatctccgcggccacctctccgccaatggggcggcggcgcccacgtgacatgcctccacgtccccctcctcccccaccacctcccctatttctatctcctctcttcttcttcttcttcttcccccatagtttagatagataagtaagcagtgagctacctagctagctagctaacagtgagctgaatcagcagcggctcctgtctcctggagcttgctgatccagtagtccagtactactctgccattagctaagctagctggagcttaattagtggtgatctctgtctctctcaagctaggcgccatgggagactcatcatcctcagcttcgtacatcagaatggtatatatacttatatgctagtatgagtttcttctgggttgtgtgtgttagctgggtgtgcatcaaatgagaggtgtttacaattaagctgccattgttaattaattactgcaggttcaccacctgatagagaagtgcatttgcttcaacctgaacaaggaggagtgcatggaggccctggagaagcatgccaacatcaaccctgtcgtcacttccacaggtatacttaattacttacccacttctcttcaagaacatatatatatctccatgtgcagtgctacctatagactctagctagtttctctcccaaattatatatatacacacgtatgcgcattctcttcgcaagctagtggttgcaccttattatatatgcatatatatcat

SEQ ID NO: 4290 - DNA, 3200 bp, Oryza sativa
tgtgccgcgcggcggcgcccatgtgcctcaacgtgggtcggttcccccctgcagtctgctcctcgatccctttctcctcgatcgatcgctcgtcggttattatccatcgagctttcggtggaagcgtgcgcgcgtccagcgcgatccggacacgcacgcacaatgctgtgctgcagcgcatgcaattgcaagtacatgtgcgcgcgcgtccgcgaccgcgagcgccgtcgtgcgtgcgtgttcccggcaagattcttccggaacatgctaaattattgacgctaccaacggcccgaaaagcaagttcatgttgttgtctaccgaaatcatcaatctaaaagccctctccaggctcacaactccagaggttcagatcgacatactgctgcaacgttgcatggttggttattagaaattgaaatcgacagaacagaagagtcgtagcagcaacagcagcagcagtccacgccaaaattttgttcgatcggttcgcgacgaacgagcaatcagacggcatttgagacttgagagggataaggatggacctcgcattatcagctgcatgcaatgcacggcgacggggtcctcttattaaatgttgtggcagggtgacatgcatcgtctccactctacagtgctgtcagtgcgtgcatgcatgcactggtggtggaccggtgcaccggccatgatctcttatccacaaaactgaaagtagcagcggtacagctcactagatatcccccccccccctaattttgacagttctccgtaataatttttgggactacctatacatttgtcgataaattttctcttaaaaatttatcaaatgtaaatacaatataattatactataattactctataactacaaaataattacactataacttacatgtaactacactgtaactatagtataattatattgtaactatagtatgactacactataattataataattacactgtaacttacatgtaattaaactgtaactataatataacttacatgtaagtgagattctacctttagaaaacttatgtttggcactgctcacgtgaaagagggattatgaactcgcaatgtatgtttgtacgatgcgtgcggaggccatcattcatgcatacatgttcggatatgccctgccgctttatctctgcccttcatctgtcatctacgagtgcatgagccgcgcctgtggccggcggccggcggccgtcacaagaaacaaatcaaagcgtcgacgcaaaagcacgaatcccgagattcatcaagcagttcaaaaatcgataaattctgaggaaggaatttgtcaacagatttatagcaaaatcgcaattttttcttgttagagtagtatactcagtctttttctttaaaggatatactcagtagtatttctaatgtacattcgtgctttgcgacgaaccaagctcatatgtaatcaaaatttgggtggaaagttatgctttttcgatagatcagaccaattagagattgattgggggatgaataattaaggataaatcagaatggttatgtacgtatacatgagaagaagcgaacattatggcggggaacggaaggagaacgaaggtagcaatagataacattgttaagtttcgaacatgcatttaattgcttcttataaaaaaatatactaatcattatttcttttattgcgatatattttatcactaaaagtaatgtatgttatatttgtacaaaattttttaataagaaggtggaaaacatgttaataatcacaacgctataactttaaaagcataagcacttcattcttccatagggacgactatgtttttcaattctactagttaattaggattcacgctattttttttcattttaacaaaccacaattaattatttcttttttattcaaaacaaagtacaatgtagacacttataaatcacatgtacacttatccttataaaacgagcacatgagcacatgtacaccctattctaagagcaactccgagcgtctgattaacatattttgatgctgaagtcatcataattagctcgttcgttgtcgacataactatatcgcttaccattaaaagtataattaatcgtaaatacgagtacacatgccaagtttttaacttaatttggtgaacggattccaccgtgaataacctaaccagctaaacttatgctcaatttgtcataataactactccctccgttttaaaatgtttgacaacattgactttttagtacgtgtttgaccattcgtcttattcaaaaaatttaaataattatttattcttttcatgtcatttgattcattgttaaatatactttcatgtatacatatatttttatatatttcacaatcttttttaataagacgaacggtcaaacatgtgctaaaagtcaagggtgtcaaatattttgaaacggagggagtaattattttcgtaataagtttttactagagttcgattaatatatccaactccaaaagtcgttgaattcacccacacctgcaaggctacaactgagatgcgcaagtgtatgaccacaaggtgagaaatacataagcacttttaacctgcggtccctccaacccaagatgtcgctgggcagccggtctcgtctttatatataccaccactcgcttcccttctctcctcacattacccccggccgcaccacccccttcttctccaactcttgcagctgcagacacaatcgttaaatcgcgatcaccgcagcaagccatgtcgtcgcagcggcccggccgtcaccagcggagggcgtcgcagagcgtgttcgtgctcccggataacttcgccgacctcgacgacgtgccggccggcgccggcggcgccggcgaggacggccggaagggcgccgccgcgacggcggacgcggccggcgggcagcagcaggctcgcccatcgccggcggcgcgccaccggagggcgatgtcggtggccgtggcgtcgtccagggagctggagatgatcaaggaggacatgggcagctacaagatcggcgcctgatgcagcatcgatcgcacacacaggggcgccgtgcttagtacttgcggctaaatcgtcatgtgtatggccgggtaattttcgtggttaagcgcggcacgcgtcgcgtcaaccgatgtctcgcttggtctctctcttcttcttcttcttcttcttctt

SEQ ID NO: 4291 - DNA, 4151 bp, Oryza sativa
ccaattaagatatgaagtagtagaatttatcttgactttcgttagtatacattttaattactaaatgatacatttcataccaattatgtagaagttatttaacatactagacacattcattttttttcaatttaaactgactaaaacttaattcatcatacactaacgactctcttattttacatgtccgtatctgatctttatatttagacggagccttagtcacttaatggcaataccgcaatagcgtacagaatctcatactctgcgcgtatgcgtagctggttgtcactattcgcaggcagcaaaacgcatctcaacttatcgctccagcgtgcgatgcgacgtgtcgacacggtgggcatcttctgggacgctgtaaaaaccaatagcaaaagcacacctagctttcgttttattcgacagaggcctcgtttagttcccaaaataaaaaattatcatatatcatattaaatgttcggacacatgtatgatatattaaatgtgaaaaaaactaattacataatttacgtttaaatatgcgagacgaatcttttaagtctaattgaaccatgatttgataatgtggtgctacagtaaatatttgctaataacgaattaattaggcttaataaattcgtctcgcagtttcctagcggaatctgtaatttgttttgttattagactacgtttaatactttaaatatgtgtccgaatattcgatgtgacaaccaaatctaaaagttttccctaactaagcaaggccagaatactcaagataaactcaggttacgatttttttcctaggaagtaattcaggattgtaaaaaatcaatcctaagaacatgttcatatgtgtacaggtttaagatttgatgttctatgacactccataaccagacagttatgcatgcatgtggccatgtcccagacgacaccgagctgagaaagcctgaaaccgaaatgacaaagatgccggttgctctgagattcgctcgcggaacacgagcatatgcatgccgatcatcttcgcgtcttcacccccgttttgtttctttccccgggccggaatattggccccgcccgcctgccaaccaatccaaccgagccacatgcgcaatcacgcaacacatgttctcaaattactacttcctctttttaagttgaacacggttattaaaaaatacgtagaattaaataggaatagattgtaattggttggaaaggaaaggtaagtcgaaaaaataaatggtgaatggttgtgattggttgaaaaatgaatgtttgtgaagaaattattatattttagaacaaatgttaagtggtaaaattattatattttggaacagagcgtaccagatttacaatcatcaacgcgagagatccgattgtacgtacacaagcacgtacgtacaaccggtacttgcatcattgcatgataccacctgtgttattgcgtttatttttccatgtcgttttcagggttttgattagcaatctgttgtacacttgtgtactgtatttgtaatgcgggtgtgtgtatgattggtgtttgctactagtgtgcgcccccagatctcgatctggaacatgcacacatgatggatcatggatggatggatggaccagggcaccaaaggctcaatcatcttgatttgataggccgttttttgggtcgatgtacgtgtcgatggacatctgtacacttgcaaatccgtagcgaatcgattgatggatctgttatggattgatgatatattacaccgacatgacttgtgtgtagttttctctttttttctaaaaaaaaatcatcggtgtgttaatgtgtttcgtggtggattatttgattcgccagatttgacgaaagttaaatttggactcttcgtggactcgagttgggtctacatttgtctgggcttgatttgttcaagagccccatggcccattcaccaaagcagtttgtttgtggaataagtccagtttgactcccttagttagtggctgattcgtaccccagaaccacgatacggatatctcgatcccccattcccccaactattcaaactggtacaatttgacttcctcgacggttttggaggacggtttcgctaatgtgacccctttgtagcagtgttgacttggtcttcgtccaacgtggcgttgacatagcgcttacgtgacattagatttttttaaaaaaaatatgtggggtcccattttgtctcacaaaaaattacgggacccactaacacgtggggcttaaatgtcatcctcttaccggtgcacgcacgagctcggcggcaccgcctctcccctttcccttctcaaccccctccccccgctctatagcatcggatggcgagattcgaggtggtgctagcgcaggtagagacggaggagtcggcggcggcagaggagaaggccgcgtgccccgaacatgattccggcgctgcggcggaagagggagatgatggcacacctcgtcccctccctgaccacatcttgtggcatgcagggaggctgatgcaaacgacccctccccgaccacttccgcagcgagatcctggagacacaataggcgagatgcagtcgctctctctcgtcctccactcttgctctcaacgacgtaacaaaagaagtagacatgggcattgtggtcagaacacatgccaaacaatagtttggcatcggttgggagtgactttaacaatccgcggagtggcatttgagtaaaactctcttttagcagtgggagaatgtcctatttccttgttattttctcatgcggattaagattttatctcggtttccgttagcacgcttttcaagctattaaacgacatgtttcgtgaaaaaaaaattcttgatgaaagttgctttaaaatatcaaatatatcatctttcatgtttgtagtaattaaaactcaatttatcacacgttaatagctttctcgttttacatgcccgctttaaatcttaatttaaagtagaaacgaacggaccgacgtctaggactacatctgggttttctcggttattttcgttaaacggcacacactccctctataaaaaaacaaacttcgaagtctttgatctttggacatacagattcatttccagaagttttttttattgagaccaagagtgtatggttgaatttactgtaataaatttggtcaattccttaatacgtaacgtaacatgaccaataaactattttagtagctgtagcactggttaattttttctccatccaacatgtgacatttcgatggcttcgccagccatgcatatttcgaataccctcaatttatcataatcgcctatccacaacataaatagtaatcatgcttcaattatatcttcgttataaaatacagctctctgtcttatctcataaaaatacttcaaacgtgctgatattttatagtgacggagagagtaccaatttgtcaatgacagatatagtacgatgaaagctatcggatcggtgataattgtgcaaacatctcgcgagagctatcagctactacgtactatgcattatttcagttgatgtgcactttttctgaccaaaatgcatatacactgaaagaatttctctctcgtcctaccgaaaatagagtactactgcactacattcagattcgcaaaatcgcaactcgaccgttcaaatcaaaatcctaaaaatttctacgggacggaacacgccaacctgacttttgttcgtgtttgggggcgcttttccacagtataaaatcacagatacccttttgattttgataaaatcccctatgtacctatgaacagagttcacccttccccgcaaaaaaaaaaaaacataattcacctaatcctttctatactcttgaattttgctcaatcccttacatacccctgaattttagtttggatcccttccatgcccttttcgctagttgaccgttaaatttttttaaaaaagtccattttaccctttgctatgaagaaacataataaattaatgaagtatattgttggaatgtaaaaatttattggatgagactattatatttatgagtatgtaatgcaccatattatttgtgacaaatttacttttacatatgatataaaaagttaatacttatttattagttattaaaagtcctttt

SEQ ID NO: 4292 - DNA, 4919 bp, Oryza sativa
  unsure (1)..(4919): unsure at all n locations
tattcatgcctgaacaactatcgatttgcctcgtgcatgtcatgtacgggagcaattccttctctatccaaattctaccatatgagcgggagcaatccccacaattcttgaagacaacaaaaacaatgctagctaggagggcgaggcatgcagatttaaaatacacgtcgacaccatggccgagtatcgacgagatgaaatggtcgatttatcaatatttgtgctacgtccgagaccgacgaggccggacaacatattagctaaagctaacaagattggagccattcactcattccatctgtctatgactgacgaggctagacgaaaccatggccgagtgccaacatggccaggtcactatactattaacacgtctaaattggacaggaaacggatacaccgttgctgggcaccgacgaggcaaaagcaaccacaaaatccatgtttgatgaaggctagggtacatgactgggcaccgacgaggcaaaggtcacccgcttcaccaaattctctccgcacaccgacgtgatggtagtgtattgtgaccgggttttggcgaaacaaagccacctgttccacattcactatattcaacgttaaatctgcaccaacctcaaccttcggcgagtaattaattttgaagacaacgatcctaaagcgcagcttaatcggaggtgttccataggctcgctcatgtggatgtaattaaccggtagccttattgctaggcgccgggaatcagcggactgtacgcaatctcgagtcagcatacctttccattaagcatttctcgtgaaggcaaaaggcgaactcctgcgggagccatcatgtatttgtaaatattcatgttaatgaatcatgattaataaaatacagggttttcctattttctgtgtgttcgtggttttgttttcatcaaacaccaataaactcctcagctatatatagatcgtttctttaacatatgataaattagaagtagataaataaaagaataaagggtgatccaaagtgtcgctgagataaaattgtctagtctaaaattaaaacattggtttgaaggatgatccaaaataaaacatcgggaataaaaaagatagtatgaagtgaaatttactcgtaaacaaatctaatactaatactccctccgggtttataatactcgtcgttttgaacaagagcacggtcttcaaaaacaactttaatcattattatttattataatatgtatataaatgttaacaaatatataatttaattgaagtatttttaagattaatatatacatatagtcaccatagtttaaagacaaatattttagaaaattttcataatcaaagattttaaagtttgatatcattcttgtccaaaactttaaagtttgatatcattcttgtccaaaacgatacgtaaactactctcagctcggagggagtacgaaatatgttagtacgatgcagttttttctcatttttacgctactaatacatcagtggggccaaatgaaaccgcatacagtgctaatcaccagaaaattcacaaagcaccagcacctcctccagtaactgccgatgccgacggtttcgatcggtagtcctgccgatgccgacggttgagaattgtggtactggtggcaggtgtgtgtgtgtgtgttgcggcggtcggagcgtgaccagctcagcttcccccggcccccggggaagtaaccggccagctgaagtgcgctcggcccgcggttctccaccggtgcgcaacggcaaagtcgacggttcggctgggttgctgggccgctcatcgcacgaggccgttcgactgcctctccccctcaggattttgcctgtttgggccgtgcacatcaagcccgcgaactctgccgcggcgagtagttcgcttcaggttggtttggttcggttccaaattccgccctactaatttattggtaatttttaatagtatttctagtttttttattaatgctaaattttaacaatatatctctttagatagtaaaagttttagccatctaaatttagtagtgccaaaaattatctaaactttgataattttagtatggcaccaaaccaaacttgcccttcatcttcaatccccccatccccatcggtgccacgccgccagtcgtatccaaacttttctcggaccacaatcccgatgacggtcgcgtacggcgggacggcgacggctactggaaagcccacgaggaaataacgtacaagttcacggtgacacggtcgcgcacacagccacacacacacagggtcgcaggcacagcaccccggttgcgtcacggaaccgaccggtcaccgcgtccgcacgtacggagaggatggcatactggcatattccccgcgcggtgctctactgctcttctctccggaagcgccggatttcgtcgaacgggtcgaaacacgcgggcgacatcaatacatcatatccgcacgccatttggcttttgcttccttcgcgcaccattccatcgcgcgcacgagcggggagacgacgaagacgaagacgagccaggccgcgagggcaggatggtgatttccgcggtcgcggtctcgtgagtacaaacgattaacaaagttcgacgtttaggttaggtaggtcaaacgcgtgcgacaacaataatgacaagaccaatcagggacgtgtacttttttttaacagaacataagcactcacaattacaccctcaccctcatcactatgaatacatactgacatgctccttccgtctcaaaaaatactccataacaacttctcaattaacattcatttcctaaccaatcacaaccatctattattcagtttttccacctacctctacttctcaaccaatcacaatcactttctatttaattttacctattttttaataaccgtgtccaactctaaaactagcaatattctagaacaaagggagtactccacagtgtatatcatcatgttatctattattaaaaaataattaattataaatacaaataatcatatcgaatctaatattacttaaaaataactgaatatattttaaaaagaacctaaataattagggtgtagctatatatatggcgccatatttttcatcaaaaaaaagtcagcatgtatttacattgtaagtccctaaattacatatgtaattttagtgtatttacaatgtaagtctcaaaattaaattacatatgtaagtactaaaattacatatgtaaattcgaaaattacataccaattacatacgtaagtggggtgtaaatgaggtgtaactactctgtaagtggctgaaaaaaaatcgactgtagtatatggcgccatatttctagcaaatccgaataattaagctacgttttattcacagcaacgttgtatttcgttatactagtatactaatgctccaaaaggcagtttacaaaaataaaaaaacaacattatcttgtcagtactaaagtttttacacgtggacaccccatcgcacaaatcttgtggggcgcacgatgccaggctcacgtgacccgaatttttttaagcctactttggttaatctgtcccatcaccagaacattttggcgtgttatacgtcgccagaaatctctacggccacctatagcatcacgagccccagtctatggcacgtggtcccggaggacatcgtggcccacgtgccagtgacacgagcgtgcggtgcaggcggttcgcgagggtgtggatcgcatgtgtgccccacgcgatgcctcccatccaacggccacctgtccatccccaattccaacctcgacatggaaggttccagaagcttccggaaacgaccttccccatgttcgcgtcgcgtggcttctcgtcgaaggaaattttgccagaattttcgcggatatttccttcacgaaaccttggtgggagaagggagatggaattcccaatggcgtgtagaatttcaatttcgaattatgttttaaaaacggcgagaaaatgtggaatgacgcaaatgcccttctgcctcctcgcttcttttattgtcctcctccctcctctctgtcggtggtggctcctcccctctcgttgcttgcctccccccgatctgcaaagccggaggcgctcccccggcggcgaggcaggcacggcgtggacggcctcccccatctccngtcgccaccgcgccctagccttctcactccctcccggcccccgcgcgcgcgcgcgcggccgaccagccggtggtcggcttccgtctccactcgaatcgaattcgaggtatcatccattcccctcccgtatcccgccctcgtctccctccgccgcttcacgtgcccggcgtggcgtggactggagacccctccggcttggattggattggattggtttggttttccttgttctggaattttttaaaaatttttgatgcgtggtgcgctgctgattttttgcagtttgtttggagagaaatcgggggttctaggtgaacccccatgcccgacgttggcgcggtgatcgaaggatcctcgcggcggagatgaacgtggttgggcgggtagggtcgctgatctcgcagggggtgtactccgtcgcgacgccgttccacccgttcggcggcgcggtcgacatcatcgcggtcgagcagcctgacggctcgtacaggagcacgccctggtacgtccggttcggcaagttccagggcgttctcaagggcgcggagaaggtggtcaccatcaccgtcaatggcgtggacgccagcttccacatgcagctcgacaactctgggcaagcctacttcatgcgggagcttgtgcctggcagtgaaaattctgggacaagttcggaggaagaggaagctagctgtgagccctgaacctccggcgcggagtaagagcgacggggatctttacatcggagcgaaaggcagaccaggt

SEQ ID NO: 4293 - DNA, 1498 bp, Oryza sativa
  unsure (1)..(1498): unsure at all n locations
ttcttagaagagtttgtgaatcttaaaagagaagttgctaaaatatgcggtcagacaaatacattccatcacgtaaaacgcaatttgatttgatttcatgttagggttaatgtgatttgccccaacctaatattagttaatttgctttagagttcatagactttttctaaaagaggtgtactgaagcacacccaaacataatacgattttttcagctttcgcttagttaaagttgtactatgttacacgatatcaaccaattattatgagcttggagagatgtatttgcattagttttccttataacaagtagtattgacagcgtcttatttgtgacttgtgagtgaaaaattacataccgtatgtctagttcaagtaattcactttatgtatatgtttccccctttcagctgagattgtaatgtttgatggccacattgtggtgtataagttcatccaagacctccatttttttgttactggaggagaggaggagaatgagcttattttagcatcggtccttcaaggattcactgatgcagttgacattattctcaggttatactcaacctatttaatgtatctttgtttttctaccttttattttgttttacatttatgtccctacctgattgcatgtattctgtttcccgtgtcatcggtttcagaaataacgtcgacaaaagaacacactnaaaatctggatctcatcctattgtgcctcgatgaattgttgatggagggtaaatcctagtctcactggatgtcaaatgttcttattcctttcgtttgtatgtccggctttcatggcacgctttataatcggttgtctgctctagtaatgaacatgtatatttttgattggaggacaaatgaattctcttagcacatttacttgttaagaatcaaaattctgtaccttgaacaatcctatttgaggtggcaaaatttgataaattagacaataaatgggaatgatattgaggtggcaaacttttgattaggccatgaacatatatgcctgtcaatctgatagtctattaatattttaatatttcaaagtgtttcaaaaagtttttgccagtctcctgatgtgtggtactgcaaactgtaataagctcaatagtacttgatctgaatgattatacaggattgtcctggaaacagaaggaagtgtgatagctgaaaaggtgtcagcacatggaatagaaggtgctacttcactcgctgagcaggtaagttttagccatgatcttactaaaggaagctgttcggtttaaccaaacataacgagttattgctctctgaatgcagactatagttcaagccctaacaacagcaagagagcacttgaccaaatctcttcttatgtgatgtgctctgcttttggagctgaagatggagtagcatcccgttgtacattctaggactgatacgttcattgcaatagaaacgacggaacagaatatatgaatccatttgcgtgtagagtggcacg

SEQ ID NO: 4294 - DNA, 3130 bp, Oryza sativa
gcaccccgatcgttttccttccgtcttgatccacccacacacacgatatgacgtttctacccctcacaagtacaagtataatgcatgtcaatgaggggtataaatgtcatatcatgtgtgtgactggatcaataacgatcaagacggacggaaaaattgacggaagtgctaaaaataggaagatggtgaactttggatgctattaaagtgaaccggtaactttcggtgctataaaaccaaaaacgtgaactttcgatactatataatcaattttgccttaaaattatccggtttctttatttgccattcaaaattgactctttgctttattgctattggacaaaattttgctacacctaatatgccactaccgttagcccctgcacgtgaactcgccgttagttcctcggatcatgtcaaggttttctcagaaatgtcgatcctactctcatggccttgtcattcttcctctctttaagttgtcctggcaagcgccaactatcattcttgcgcgactactatcctcttagctagaaaggtaagtgcatgcctagacctataggctacaacatcagatctatgtccttgttccgatagttattttcggataatttgagacttagtggaaagagataaacaaggatattttggtctttttactgttcatctaacggaccgttgatgcaagattgacggtaatggcatataaggatagcaaagtttcgcctaatgtcacgtaagagaaaagtccattctcaatggcatataaggaaactggagaactaataaatttcgtcttgtaagaatgtatattagacgcgcacacgtgtacatgatatcatgggacaacgtgtgcgtccaatcgtactcttggtaaaaagggacacacatgttggtggtctcgtagctgctgcagcccgacgcttccatgcccgatcgacgtcaggatgttcatctcgtgggctcgcggccgatgtgaaaccgcggcgccggccagtgcccccagccaggcggccatcaacgcatgcggcacgcacgcacgcacgcacgcacgcacgcacgcacgccacatcacgcagcctcggcgtggacggctctgacatgagccgggacgtcgcggccttcgcgtacttattaatctcccctccccgggggggaacaccgactcaccaagttcgcgtcctgctcccgcgtcgcgcgcgtgcacacacacacccacagctagcgcaaactaaggctaggctcgccgcgagaggaaggtaagtaagtacgtacatttgcgcgaggtggacgagcttgacgatggcgagtgggcaacgagcggtcggcgaggggagcggtggcctccgcccgacgacgcacgtcgcgggcggcggcgggagcgcgcgcggggagtatttcaggtgcaagacgtgcagcaagacgttcacgtcgttccaggcgctcggcgggcaccggacggggcacacgcggatggcggcgcggcagcggcaggagcacggcgccgcgggggccgccgtcgtgggggctaccaacaaccagcggcgggtggtttccgcccaccagtggcacctgtgcgccgtgtgcggggtcgagttccgcatggggcaggcgctcggcgggcacatgcggcggcacagaggcgaggcggcagcggcgacgccgccgccggcggctgcggctgcgagcgccggcgccgtgtccagcatggagccgccggagatgatcgacttgaacagcccgccggcggtcgaggaggccggtgaaggtgatcagaggttgagcgtgcggaacaggagccccatctgcttaatctgctcgtgtagggtggtgttctctgtttggtgattgtgtgcgcgcggttgcgtttccaatgccattctagtgggaccaaggaagttataaaataaagtgggaccaaggatctcgatccgtcttaaaaaaaacttaatctagtaattggataggacataatctggatatccagattcgttgtattagattatgtcctatccaagtactaggttgagttttttttggacggagggagtatgtagtataatatgtttgtgcattttccgtgtaaaaaaaaagatgcactagcaatttgtacattggttgaaactgcatcattgtgcttatggtgttcttattttctatatctaatttcagtttcttatatatagattctaatatttttaagtatatgctgattgtactttatcttctgcatttcgaaataacatactcatcctgtataccatagacacatcacttatacacatgttgagcagtgatgatattgtgtgtttaagtctcaatagtgtacaagttactatgattccgtcaagaagtggttcctaccataacttaacgcactagattgtgtatatcatattgttgatgttttgcattcggcagaaatgtgtgaggaacgcgacattcgggacattcggcaataagggtttacgactataatcactcgtctaaaccatataaagcacatgattttacctagattcacacctactaaagaagaaagttaacatgtcgaacgacgagaagctgatcataagcaatgtttatccggcatggtccacattggagtgtgcccagagatgaggccgggcactcccagacttgctcagtagtagtcctgtgtggtttaggtcactgggctaccatttgtgggtccctagtccaagctttaggacgggatgaggtgtgtcacctgcacctcattctgtattaagtgtagggtagggatgtgcgttcggtctaaatcgagagttcaatctagttttttgggtctaaaaaagttcggcctttcaaaatagattaccaaactcatcctcacaaatcttgaggaaagtgggaagttaggctgatgggctgcagtttgaagatgggctacaaagccagtagcacaatccctggttttttacatagttcaggtcttcgggcatttcgggtacccgaggaggatggccgaactacccaaaaaaagatcggtctttccacttgcccgatgtaactacaaaccaataaccaacacttcaggttcttcaggtccggttttggttttttggtctcggtttttttgcctatccctaattaagtggggctgcag

SEQ ID NO: 4295 - DNA, 566 bp, Oryza sativa
taagtggcatatggtcttctagccacttctttggcctctctccgaccacacccatgaggcgttttatctcatctaggaacaatgctttctcatttatttgacatatgcgctcaagatctttcatctgatcagtcgtagctccagctgtgtagaagttagcacagaagtgcctcatgcaccacctgtggtgaatggttaggtgatgaggcatgatgtggatgatggagttcaaaatgccagggtgtctatcagaaattatacacacttctctattaggaccgatcaacttgtttctcaacatgttgatgaaccactcccagttggatgtattctccttctctaccagagcaaacgctaagggaacaagatgtaacccggcgtcgacccctattgccgtgagcaatgtaccttggtatttaccggttaagaaagtgccatcaattgctagcaccggcctcaagtgcttgaatgcttctatggactggccaaatatccaatatgcacgtccaaatactcgcctctgtactccatccaccatcctggacttctcgggatgagcctcaaca

SEQ ID NO: 4296 - DNA, 1716 bp, Oryza sativa
tagtatttctatacatctaaagtttatacacctaaagtttagtttatagatccaaagtttataagtcaaaagtttacatacccgattcaaatttaaatttgaattatgtccgattcaaatttgaatttgaattcaaatattttctatatatagtatttctatacatctaaagtttatacacttaaagtttatagacctaaagtttataagtcaaaagtttacatactcgattcaaatttgaatttgaattcaattttttttatatatagtatttctatacataaatttttttaacttttgttttttttaaaaaaattgtgtggtatactgtagtagaaagagaagaaggggaggaggaagggggagaagagggaggagtatagggggaggcggggccaaccgatcgctgggcgattgcctgtcggagtctgaaactaaaaacttgcatccgaattaatgtatcaatccctggatcagtaaatattgatacatacaatataactggttcttcattgcatatgttaaagttttacaatactaagggttttacaataatacgtactcgcctaactaattaatacacagcggaagtttctatacattctgactagggaggtataaccttaagggattctctaagttatcggggtcatcgtattaatagtcataggggtcctccttgacccaaatctgaaaaaggggttataagagcaaggatgagtattcgcaatactcagcaagttatcatggaaatatgttatgcattaatacatagtagggttctttgcaaaaagcagtaataaacaatctggaaaagttatagaaagaatttataaaacgtatagactttagatttctaaccagggtaccatatgagtcccgatactcaattccatgagtacggctattcgaatagtttcaaagatattctactgcagcagatgtacgttttacccgtagtccaggacttgctgataatcatcggctttagtcatggcccagtattaagtcattaacaattgtggcacctgttccatgaacttatatcctcatatgctctgaatgtattgttaacagcagcaagaggagttctggcgttcccgaggtatttaagggggaactgatcgtatgacaccacgtcatctcgatcagggtttagaaatataccatatagtttatactcgagtatcacaaaccatttacctgtacatggtaatggttaaagttgcccttcgcggctatagttgcctcctgcgcgaggatttaaaaataagaaccactatacagagatgccatattgctaattaacataatagctaggtctgtccccgttctagaaactgcggtcgtacccgttcgttcgacataagtacctggtaataactatatcgattgagacagtacttgacggagcgtggggctcctcaccgggagaccgcgtaggtccccctttgccggttcggccgggggcgctgagtgaggttcttcaccctcgatctgtggaacgttcgcgagagagcaaatgcacaagacacgggcgatgtatacaggttcgggccgctgagaagcgtaataccctactcctgtgttctggtggatctgtgtatgaaggagttacagagcaaatggagagcaagagagttcaagctctagaacccctctttttccttctcttctggttcttttttttctctcaatctcctcctcccttttttg

SEQ ID NO: 4297 - DNA, 7544 bp, Oryza sativa
tcggtgtgtcgcagggcgatggatcaccacttcattcactcccacgggaattcaccaccaaactcgacgactggtgaagtactaaccttttgaagcctgaatcgaaagatcaccggtcggctgcggcggctgctgctactttactgctcagtttcagatcgaactcacaaaaccacatgatttaacgtgaagctagttatcaaactgttaacaatgcgtatcggtaaaaaaaaagaaaaaacttgtatataaaaccttcaaatttataatagtaaaaacttgattaatcatgtactaataacagctcgtctcgttttcatgttatggactagtcaagtccaattataccttggaatgcagcttgggtgcgtccttttgattatggttttagagcagcaacatattttaaagagataaaagaagagagagaatagcaacgagctatagatctgtagctagctgtagtacggattttaagacgtaatgagtatatgacatgtgggaccaggtattagttactccctccgtactcataaaggaagtcatttaggacaatgtttaagtcgaaccttgggaataaaaaacataaataactcttaagttgttgcattgaaaatgtaaaaattatatgaatagatttgtcttgaaaaatattttcataaaagtatacatatatcacttttaaaaaacaagaagtcaaagttgtgttttgaagaccatgtcgctgtcctaaacgacttcctttacgagtatggagggagtatatagtaagtaactattatatgaattggctattacattggctatagatgatttggagttggtagtgggctatactattaaacttgctcttagttgattagctgcacgcaaaacgagaaatatcggatagtgtataattaattgagtattaattattaaaaaatttaaaaaatctatttaattttttttacagaatattcaatatataaagttttgatgcgtttaatagtttgaaaaacgtgctaatgaaaaaggagaagtagctaagagcaaggttaataatacagctaacctgttggctataaggttccttgcagtcttctctcagcctacccatataatagatagctctttacaattaatatagggcacacttgtctctctcacagagtttcttggttattgtgtctaagccggctgtaagtttatagcccttttcttatctctctcctctcttctctcctccatctcggcatttagccagagcaagtataatagtaggctataagaaggctgaatgcttaggtggatgggagaaaagaggatagagatgagaagcgggctataagtttacagccggcttaggaacaggaaccaaaaaaatctgtgagacagacatatgaaccatatatttatagtgaagaattaaccactatatttaaccactatatgataggctataagtaaacagcttgctgtattattatccttgctctaaaaccaatttctcggcgacatgaagacatcagagtacgagacatcccgttgaaacatgaaacacaatagtgataggaccaaagtgggtggcggtccggctgttataggacccggccaagacatgactgaaaactttggccagagtccagacggttccaggtgtcaatgtgtcaatgcttttggaagctgctgatttcatgtttccgtcccgtttttcttcaggagatctagccaggagggacagctaccacaaagttaggcgttctaagatttgtttgtcactcgtttagtcgtgtcttcaacatgagtcaacaccatattgtcagtgatcagaaagaaaggagagttaaaccatccctattaatttagtatatataccaagttaggctgagattagtttcaaacttccaatttttctatcccatcaaaactttcctaaacacaaacttccaacttttctgtcacatcatttcaattttaaccaaacttctaattttgacgtgaactatgcacacccttattaccaacccaacccaagtaggctagtagtacacataacgttgaccaagccattcaacattttttttagaacagccaagcagcatgttgaatctatgtgctactctacctgaagtcaagctgatgagctactccactcgatatgccaccaaccctagtgtgaaaaaaaaaactgaaacagccggacgccactcgagctaacggacccgaccatgtaatcggagaatataaaggacggcgggatgggcgctcgctcgctgcgtccacgtcggattttgctacagtagggtggaaattatgcgaaaaagccctccgatttttcgtaataatgtataggtccctagtgtaacattgccggccgggcggctggcagcaggaaggagcacaaacttggcgatccgacggggcccgcacgtcagcggccggatcacattagctccctatttgctgagctgctggaaggccaaagggcccgcccggcacggcccggcccaggaacagctgggcacgggctagcagccatcgggccggcacggcccgataggcacttcgtgccgggccatgccggcccatgggctgcacctcccgcccaggcacggcccaccagctgtcgggccgtgccgttccggctcgaaggtatgggtggcccatcgggcctttttttaaataagtctatttttttccctcctctttgggctatatcatatgtatagctaaagtaagtctatattccatccctcttctttgggctgacatatgtatagctaaaataagtctattttctatccctcctcttcggctgacttatgtatagataaaaaaagtctattttagatccctattctttcatccatggcacataatatgtctatttttactcccatatttttttttgtatcggcctagctgccggcccatcgtgccgggccggcctaacatgccggtggaggggcccaagcacggcccgatggtcgggccgggccagcatgggcccgacctccgtcgggccgtgccgtgcttaggccggaccaaaatgccgtaccatgggtcgggccgtcgggcctcggaccttttggccatctgcctgctggttaatcaatcccttcaaaccacagcgtagaaatgtacaccgacatctagaaaacctcctaattacgagtactactcgagcccagtgaaccagtcagtcagtactctgtagcagctttggtctacctaggattattactaggaaacacaggtattctgttccaaaaaaaacacacacactcgtgttgggctataaatactcgtgcacaacgcatgccttctgcgacagaaaagagctggacgtggtcacgtagagtgcaccactgattttctacagcgactcttgagtggtggcaatgagcaagcggcagtttggagagatggacggcggcatcgacacggcccgcgtcctcatgctcctctcccggcggcggcggcagcacggcgacgtcgggcacgcgcgcgcggcccgcgtgttcgagtgcaggacgtgcgggaggcggttcccgacgttccaggcgctgggcggccaccgcgccagccacaagcgcccgcgccacggcgccgagcgcgcgccgcggccagcaggcgacgacgacgtcggcgccggcgccggcgccgcgctccgcctcgtcggcgcggcgtcgtcgttgtcgacggacgaggcgcgcgcgggaggcggcggccgcaggacgaggggcgccggcgccgcgcacgggtgccccgtctgcgggctggagttcgccgtcgggcaggcgctcggcgggcacatgcggcggcaccgcgccgccgccggcgacgtcgcggcgccgcgtgtgaagaccgacgacgttgtcgttggagacgagtgcaccggcgggatttgcttggacctgaacctgacgccgtcggagaactgcgacaagtgccggcacgcccagctcggcgtcgccgtgaactctgtgcaaagaacgatactactggaccgtcccctttgagctgacccattattgtactgatttctatacgttttcgttgtatttatctagcctttatatgttttgttgcacgctatagaatcatataaagatttttctatatattttttgaacctttcaatcttaaaattttacaaatagactatcccgaaacttatttctaaagctgaaccaagagtttaaatttgaagttttgaggtggtttacttttaaaattaaaaaggttcaaaagatatataataaacctctataagttactgaagaagaggagccaaaatgcaggaacagcatcactctattccatgcatccattgattaactgaaaacccaatagcaatacagcatggactacgttacacactgtagcttgcagttcaacggattgaaatccagcgtacagtagtagccccccaggcaattgcaacagctacgtcaaaagcatgagtagttgcttcaaagaatggaagcaaagataggtacaaccagatccgtatcatagtgtgtcttcttgacattcttcctataacagcaagacagggaacaaacaatgtcaaataataaacgatggaggccgagaaggcgaacgtctcctcaggagccgcagcatgcagatccagaagctgctggtttgtcggcaccctgatccgtcttgttgttaatcttgattgtcttgtcctacagtgcaggagcatatgtttcttagaacaaagagcaagatgatgtttgagacataattcagtatgtacagttatctgtacctcaggcttggagtcggtctcagcaagcctctgcttaatgtcacgtgcaatggagaaaaaaacttgctccacgttgaggtttgtcttcgcactctggaatacacagtgcagtgtaaaatcaaaacaattgtcactgcaaaggccactttcttttcaaaaaaaatgacagtgaaaagaacaaacaattcaggcagcaacatacagtttcgaaaaatttgatgccatactcatcagccagtgcttggcctttcgcagtagggacagcctggagaaataacaagaacaggaaacaaataagcttctaactagtaatcctcagggaaaactgagcatttgaccacaacttcaaagtggggatacggtatgaatgaacaccaaggataaaaactgtgatgtacccttttactctcatccatatcagccttgttgccaaccaaaattttgttgacattatcagaggcatgttgctcaatattccgaatccagttccgaatgtctgtattgtcaaataaaacagcagtgacaaaatagttcaaaatggaataattaaggaaggtatatatgtaaggagacagtactgttgaaagatgactcgtcggtgacatcataaacaagcaggatacccatggctccacggtagtacgtgaggtaaaatgagatttacttgatcaaaaggttctcatttaacttcacagggttagtatgctgaatggaacaataattataccagtggtaattgtccggaaacgttcttggccagctgtgtcccaaatttgtagcttaatacgcttcccgtccagctctattgttctaattttgaagtcaatactgcacaaacacaaatactgcaatcagcgtggagaagataataaattgaaaagcttgcgggcaggagccatagagcggtcttcccaacatcagagaacatacccaattgtggtaataaagcttgtagtgaaggaaccatcagaaaaccgcaggagaaggcaactcttgccaacacctagaaatggaaaaatgagaaaaaagaattcttataagaaaattggccagcacaaaacttgcctgaggaactgccattagctactaaataattagttcaacagaatacactaacaaaagtgaatttgtaaatattatggactttaaaacagtacaactgctagagaaatagcatgctaccaaaggttatgcctaaaaatttgaactaatagacttacattggatactagaaagaaccaaaaacaatttgtaaaagactaaatcatagatagtcataattaaaaacaagtagtcatcactgagcaaaagaatccaagatcaagacctattagagcacgagctttatgttacagacaatcatgaataatctggcaattgtcatgaaaacaatcacttatttgatcctatcaatgaataagtctcgacaaggaatatagtggaagctctacgggtagtggctcaaagcgagagcacaaaatgcccctggttgatttgagctattggtataaaaatataaatttctgctatgaacttttaaacaattacgctatttcatatagctgtaatgtttgacccattagtttcacccctcactccaactttcttccaacagctacacatttggagcatacaccctcacgagcaaggaactatctagttccactctcaacaacatgtagcacaaattccatggcatgcactaacgaatgaaaattatagaggaaagaatagcacataacatactctctttaactctatctcctattgcatgattgagtgccaaaaaagaaagcattgcttcatgcttatgtgcaacgtttctcagatggccttgcacactgtcgaaataaccttagtatcagcttaatcagaaaagcctgcaattccagttgaccatttccaaggttcttccatccaaggaaaaacttactgaaccacgaaattcatttttttttctcctcgccattttcataactcctaactttgcttcttcttcttctttttcttttttttttacataaagcacagtagtggtagttcctgcctgtatgtactaggcaagtaggcattatgtatattgtaggttgaacagaaaccaaattcacatgaaagacagatcatgcacacaagcgcacaccaaaggcaaatcctttgcaggatcctagttgctcgcgtggcccaatccacctgcgatccaaccaacaccgaggcgcgggaaaacccacacgacatcactcgccgtggaatggaaatgggaaggcaagatctaagctcgaggtggtgtcaccaaccgctgtccccgatgaggaggagcttgatgaggtagtcgtagtccgcccgagccctcgccggcggcgcagccatctcgtcgctccgcttcacaccctcctcctcctcctccccctactccacagcccacccggcgcgcctcctccaccaatccccgacctgcagcgaacggaaaaaaaaaaaaacagacaccgtgagaatggcagcacgacggcggcggcggatcccgcgcgggtggcggccggatcggagaccgcaccggtaggcgcggcggaggatcgcgcggcggcggcggtggcggtgcggatctggagaacggggaggagggagttggttttttttttctctccttttttcccttcgcttttttagtttgctggttgattcgtcgccggccgcatgagcgagcgagcgactgatcagcgcgtgcaagatcagagctgggttttgtaatttgttcggtttttttatggggtccggttcggtcggt

SEQ ID NO: 4298 - DNA, 713 bp, Oryza sativa
tgcacccctttatttgctttgacgaagctctcatgatcatacatcttttagggagtgatctgtgatactcttcgtcgaacttacggccttagcttgtcagctttccaagttgtatcagcagctgctagtcagcaatttttctctttgtgttcttgtagctgcagctcctctatgattagattactcctggttcatggaagcaacaggcaacccaaaactgtcaaaacacgctgtatgttgtacaagagaaaaacattgtacatttcctaccccattttcaccttctccttgtgctgtatgtaacattcaatgcctgtaactggtaaaagtttcatgtgctcgtcatctgatattttggatggaatgaattactctatagctgatcattttatgatgtgaaacccatctaattttgctagagcatggctcactttgtcttgtgattggtcagattatggcctcccgcggtgaggtcttctgttgctgatgaagaaaagttaggccttgtctagattccaacttttttcttcaaacctccaacttttctgtagcattgaacttttctaaacatgcaaacttctaacttttgtcgtcacatcgtttcaatttcttcaaactttcaattttagcgtggaactaaacacagccttagcatcagttgtcagaacttcctgggtgcatcacctgccacaaccaccaagaacttaaaactc

SEQ ID NO: 4299 - DNA, 670 bp, Oryza sativa
taattggcagcattccaaaatattcctcaacgttgacactccatgccacacaatacaatcgaaatttctagaataggcaacatttccgagcatctcggagacaagaccaacatcaccactcgaatgacactgagggggaaatatacaggggaagaagcaaaaatgctatctttaggtagtcgtttgacgacagacagttaagtgtagtgcacctgttgtagcactcgcttactcccccttgtgctccttatctttcagagcatttcctgtgatttacgaacaatgcgtctaacctttttcttgaaatcgtccctcttttctctccaatccttctgcaccagcaccacaaatttcaaagcacacgttcagaaagtaatagaaacagaatatacgtttttgcagtgaaggaatgaagtactagaaacttctagacatggcacaaatcaaattgaatgactatcaagaccttcagtggcacacatgttttgtggatgtcaacgggcaattactctgctaactgcgatgagatcaacacagagagaaacccccatccatgttcaacagagagactcaaattgcggtttttattttaggatgcaacatacaatcaagatatctcactcatctattagtgaaattgaaatctgtaaataagataaatacatttaca

SEQ ID NO: 4300 - DNA, 1080 bp, Oryza sativa
ccctaaaattaaaatgatgtgacagaaaagttgaaagtttatgtgtaggaaagttttaatgtgatgaaaaagttgaaaattagaagaaaaattttagaactaaactcggccatttgcaaaatttacactggctttaagtaaattaacatttgcaaaacttacgaacgactgggcaacataaaatatctgattgctcttatagcgagatcaaagctgtcgaaggagagacccgtttggcccagagtcgagcattgcacagataaaaaaagaaagaacggagcaaaacagagttactcacaataattaactaagaatgcatcgccatatccaaaagctgttcagatgaaagttccaaaccacaggtaaaccacagcgttcctcccccacaactctcacttaatttctaccagaagcaacgacgatacgacagatcaagccacagccaaaagagacgatggcagaaagaacatcgtgagcggcaaccatggagcagtttagtcgacctcctcgatcttggggcctgcgccgctgccgcccgccggcgcgtcctcgtccatgcctccggccatgtcggcgccggggccctggtacatcttggcgatgatcgggttgcagatgccctccagctccttcatcttgtcctcgaactcgtcggcctcggcgagctggttggtgtcgagccagctgatggcgccatcgatggcgtcctcgatcctcttcttgtcgtcggcggcgagcttggaggcgatcttctcgtccttgatggtgttgcgcatgttgtaggcgtagttctcgagggcgttcttggcgtccaccttcttcttgtgctcctcgtcctcggccttgtacttctccgcctcctgcaccatcttctcgatctcctccttgctcagccgccccttgtcgttggtgatggtgatcttgttcttctgccccgtcgtcttgtcctccgcggacacgttcaggatgccgttggcgtcgatgtcgaagcagacgttgatctggggcacgccgcgcggcgccggtgggatgccggagagctcgaacttgccgaggaggttgttgtccttggtcctggcg

SEQ ID NO: 4301 - DNA, 3427 bp, Oryza sativa
gaagtggttcaccatgcggttgtcgaagtcctcgccgccgaggtgggtgtcgccggcggtggccttgacctcgaagatgccctcctcgatggtgagcagcgacacgtcgaacgtgccgccgccgaggtcaaagatgagcacgttcttctcgccgctgctcgtcgccttcttgtcgaggccgtacgcgatggcggcggcggtgggctcgttgatgatgcgcatcacgttgagcccggcgatgacgccggcgtccttggtggcctgcctctgcgagtcgttgaagtaggccgggacggtgaccacggcgttcttgatggacgagccgaggtaggcctccgcgatctccctcatcttgatcagcaccatggacgagatctcctccgcggcgaactgcttctcctcgcccttgtactggacgacgatcatcggcttgtcgccggggccaggcaccaccttgaacggccatagcttcatgtcactctgcacggacgggtcggagaacctcctaccaatcaaccgcttcgcatctgcgtttgagattgagaaaaatcgcaacaccagtgagttcgattgctccatcgattcagcagaaaatttcaaatcaacaaagcaatacaatggtccaactgttcaactagcatttattatcaaaattctacacagcactacagcagtgagactcaatcttcactaaatatataaaagcaaacataatctccaatgagttcgattggtccattgattcagcagaaaattccaaatctaatctactaaagtaaatccaagaagcaaacataatctccatctattttagtggcattcatcaaaattctacacagcagtgagacccaaatcttcactaaataaaaagcacgatttcgatttggtcgagaaactgttcatatactattccagtggacctaacaacatgcctgtgcacaatgaaccaaagcaaaattgacatattaactcctttgggaattggcacgagcagtaagcaagtaaaattgatctgtaacatatgctcaacttttagctacgcgtgaacaaatcgcagaacctctcctaacacatctattcagaagaagaaaccacggagttgcagaactgattccatagctactccaacccatacagattacagaggacagaaacataattaccagaggacactagaacagggcatcatattctcatcgatctagtacactcttttacacatccaaaactaaaaaaccacggtgcagatcgcgttcacagtcacaaccggcgcaagcaaaagtggaagcagggagagggagggcgggaggatgcagggtaacgtaccgaagacggtgttggttgggttcatggcgacctggttcttggcggcgtcgccgatgagccgctcggtgtcggtgaaggcgacgtacgacggcgtggtccggttcccctggtcgttggcgatgatctccacgcggtcgtgctgccacacgcccacgcacgagtaggtcgtccccaggtcgatcccgatcgccggcccttcccccttcgacatctcctcctccttctcctccctctccaaaaacctcgcggaatagaaagcgaatattcgcaaacgcgcgctctcggattggattgcttgctgctgggtggaatttctctctctttctgatttctcgaacgagacgaagcgggggaagaggggaggggcagaggttttgtggcggaggtggcgggggtctagaacgttcgcgcgcgggcgatcctggccgtcggattgggggttctggaagggtcgggagggtgccggttcgcgtgaaaggaagaggggacaaccaatcaggaggcgacacggtggggacgcgttggtgggccccgcttgggcgcgcgctttttgaacggtctcttgaggtctgggaggttctacactgtgctcgtgacgatggataggcggagtcggtcctttgtttccggaaatcctaattcgctaacgtgcgaccgcttgatttctcgcgaacactttccaaattccaacctaagggcccctttgaattggagaaaaaacataggaattttagaggattttaattctatagaaaaattttctatgaagttttttgaaacaaaggattgaatcctattaaatcttttgaaatttctatggaatggccaatcctatagagattttggaggaaatttagcaaaagcttcaatctcttagtaactttgagtctatctctctcatctaattcctgtgttttttctgcggttcaatcaaacggccattcctatgtttttcctctattttacaatcatgtgttttacacttacattcctatcaaaatcctacgttttatcaatcctgcgattcaaagaggccataaataaagacaagactcactagagattatgggtagggttaggatttcggaggtaaagggagatagagccagggaggtgcatcgaatttagagggatggcaccgaaggtcatgaaaaaaggacagcggcgagatagcgatggcggcgccaaagccgcggggtcggccatgggccgtgggccggtgttggtggcgggggcaaagctaaacgaaataggggaggaggagaccgaccgagcaggcccgcgctgacaagttgacgcctttcagtgccgacaaggccgggtggtggcacggtcaggaggtggtggtgggagaaggttggagtcgaaactgacccttgtttggatttcgccataggaggagcggagggagttcgccagaggaagctcgccggagaggccgtcgccactccaggagcccacgcaccgtgcttcagcccccgctcctgctcccgtcgttgatgccgtcgtccacagaaagaaagtcgcatgttaaaaagaaggtagagagagtaggaggaggggctaatgcgctgggctgttggaaagagttcgcggtcttcgagcgccggcccattgcacccacccccttgtttcggtgtttggagcggagagaggcaggtgtgggccgtcatgggcttttgttgcaccctgtaccgcgaaaacagctgcacagatgcacaagatcgattcgtccaatggaattgttcagtacaccgtagctttctcgcctgttttatgcttggattttgacaatatcaaatttgataaattttagcgctgctaaattttgatattgttatattttagtttgatgtgtttctaaaatttgatagctttttatgagaggaaaattccggaactaacaatttttgatagtatgcgattgatcaaatcatatttagtttgttacctaatcaaaatttgatagggttgaaaatggtaataaagtgaacatgcttcttattgtcaaaaccaaggtgtcgaggagtgatcctctctagcgggaggtcgtgagaccccccctttgtgagttcggccgggggataaggcgcgatgatca

SEQ ID NO: 4302 - DNA, 566 bp, Oryza sativa
cctgccgcaacctgggtacaacgaagttctgtggtcctccaacatctgtccaatttatgggcctccttttcactttcgcagtcctccctggcgtcctgcaacatctgaccaagatcatccgcaacgtcgttaccatcagcagctatttcctcctcccccgtttgatttccttcaaatccaacatactgagcaaagtccggaatattgtcgtcttccacttcatcttcttccatttcaacaccttgctctccgtgggatgtccaacaattatagcttggcatgaaccccgactcaaacaagtggaaatgaatagtcctggatgcagaatactccttctgattcttacacttattgcatggacaacaaataaaacccctttgcctgttagcttcggccactctcaaaaaatagtgcacgccgtcaataaactctttggaccgccggtcagcgtacatccattgccgatccatctacatgagtcaaaaaaaccgtacacaaataattattcttacaataatgacagtcatacaataattataagatatctttattcatacaaaaatcat

SEQ ID NO: 4303 - DNA, 1376 bp, Oryza sativa
ataaatataataattatatacaataaatttatatactccatcaatatacttcataaatttatattttcttgataccaaagagttgtcatacataaaaattatttttgttttcccttcgcaaggcgaaactaaaatatttttttggtaaatattatctcacaaaataaactgatacatataatagtcgaacacaataaatttatacaattcatcaatatacttcataaatttatattttgttgatagcaaaaggtaaaatggactttatgatagaaatttaatggtcaactaatggaaggggtatagaagggatccaaactgaaatttagggatatgaaagggaatgagcaaatcttaggggcatagaagggattgggtgaagttttaggggtacacagagaattttcttctcatttaattcctattgcaatgcatgagcattcaactagtttctttaaaagtctctagttgtggtgacatggaatctgccaaccctgtagttttacaatttgtctgctaatatattttagggaaattttgctacaggacactgcttacgtgtgattttagccctaggacactgcccaaactcacttttgggggaaaacactccataaacgtggtaatttgctagtggatattgtgccggttaaaataataatttctgattggagaggagagagaaattgtgtgaaatgtctaaaatgcccttgggcccacatgtcagctctcttctctttctatcccctcctccacgacgagcatcaccgtgcgggccttctcccccgaccaacgccgcagcacgcctagagctagatggtgacgcccctggcgcctaggatggagagccgctcggggccgtccctgtcgccgccgccgccacccctcgataggtcgtgctgtgtcgcgttgaacttctcgccgtcgccccacaacgcgtaggcctcctcgccgtgcgccgcgtcgtcgccgatcatgagctgctcgtcgggcatccgcagcgggatgaacaggccgatgccaaggaggatggccgtggtgaccacgaggttccacgcgatcacaaacgcagcgccgccgagctgcttgctgatctgcttgatgccgccgccgtagaacgcgccgcggagtcccggcaccatggactcgaggcctcgagggagaagagctccggggtggccaggaggcccgtgaggatgcagccgaggagccccgccacagcgtgggtgtggcagagtggtctcgcgcgggggccggcgcgacgacgcacaggtgatgggcggcgatggcgtggcgcggccgtggcgatgcttcgtcaggcggcatcggcgcgcggcgttagtcgagggagaaggcccgcgcggtggtgtcatgga

SEQ ID NO: 4304 - DNA, 546 bp, Oryza sativa
atgttccaatgctgtacgtaaagtagaacatatgcaggactaaattctcataattctatttattctaatgtttctgcatgctattacaggttttatcagaatatagaagaagaggatttgattttgtaacgcaggccatcacctgtccaacatatttgaaagaccttacaggcatatctgatttgaaaaaaccatttgcttctaaaatttcagccagcattcctgtttctaaaacttcggccagcattcctgtaaacctagagaagctgtccagtgcccgatgtctacttttaggtgctggaacacttggatgtgatgttgctcgtattcttatggttagtctttgtccagttctacttttatgttgaactacgaacagacttaacaaaacatttctttgactatggtggaaacaaaacttttcacgactgtggtgtgcggaaactaacagtagttgacagtggtcgagttgttgtgtcgaatttggcaagacagtcactctacacatctgatgatcgtgacatcccaaaagcatcagcaatacta

SEQ ID NO: 4305 - DNA, 541 bp, Oryza sativa
ttttaaaagctactgtgccacgtgtggcgcgagcagctagtggtaaaaaccatcagcttggggctgtttggatggagctaaaatatttttagtccctgtcacatacgatgtttagatactaattagaaatattaaacgtagactaatgacaaaatacattccataaccctagattaattagcgagatgaatctattgagcctaattaatccataatgtgctaattatagattaattaggcttaaaaaattatctcgcgaattagcactcatttatgtaattagttttgtaagtagtatatgtttaatagactaaattagtatcaaatatctgatgtgacagagatttttagttcccagatctaaacaccctcttaaagtttagttcgtggatcaaacacctccttaataagatagctagatagtttctatttcatccatctgccgttgagtccggaaggccgaaagagcgttatcttgggcctcgatctcatgtggaccctgagacccatttacacatccctttcaaccatgtgcaccaaa

SEQ ID NO: 4306 - DNA, 906 bp, Oryza sativa
  unsure (1)..(906): unsure at all n locations
acagcgacctagccgcccgcctcgcagctgccgaacacaccatcgccgatctgcagggcgcgttggactcgtccgccggggaggtcgaggccctccgcttggcaggcgaggtagggcccagcatgcttcgggacgccgtctcccgtctagaccgcgccgggcgacaggcgggcctctggggcgagcggaccgcgaagtatgccgccaaccaggggggcctcgcccaacgcctttcagagatggccgggaccctccagcggctccccgaggagctcgaggagacgatcaagtcatcctcgagggacctcgcccggggggcggtggagctcgtactggcaagctaccaggccagggacccggacttctccccgtgggcagcgctggacgagtttcctcccgggaccgaggacgacgcgcgcgtgcaggtccgggacgccgctgaccacatcgtccacagcttcgagggtacggccccccggctcgcgttcgccctcgactccgatgaagagggcggtgacggcggtgacgaggccggcgacccgggcgtgtcggaatgagctcccaggcccctgccaatctttatatagttttttctttcttcttccgaggccttcgggcccccttcttgtgtagactaacttaatctgcaatcaaataaagaggaaattttttgcgtcaattctatttgttgtgtgtatgagacgaggatggtctgtgccgcggtccttctgtgtcttggcttgaacaagggctcgtgcccaggtcccagctcgagggtgcgagtagagatcaacaaagctcttgctggggggggagannaggaaaggagggatacagaacagcgagatacaggtagtgagtgtagcaganaggagatactaggtgacataaaaaaatgtatcacat

SEQ ID NO: 4307 - DNA, 1972 bp, Oryza sativa
cgcgcgcgtgcaggtccgggacgccgctgaccacatcgtccacagcttcgagggtacggccccccggctcgcgttcgccctcgactccgatgaagagggcggtgacggcggtgacgaggccggcgacccgggcgtgtcggaatgagctcccaggcccctgccaatctttatatagttttttctttcttcttccgaggccttcgggcccccttcttgtgtagactaacttaatctgcaatcaaataaagaggaaattttttgcgtcaattctatttgttgtgtgtatgagacgaggatggtctgtgccgcggtccttctgtgtcttggcttgaacaagggctcgtgcccaggtcccagcctcaaacggcgcgggtcggggctagtgcctggggagatccacatgtcgagactggccaggccgggagcgtggtgaccgagggttatgggtgacccgattgtgggcctttgccgattcccccccggagttcaccacgccccggggcacggctcggttctgggccccttttggcgattttagccggcccgggccaccgagggcaggatcgagcacgagcgtgctaattcaagtcaagattcagcaaaaggaaacaatggcacagacacagtccttaggaaatcaaaaatgcttttattgaaatacagaagagaaaaaagacaattatctgtatgtggtagcccccggccaactctgcacgcctgaggggggtgcggggttggcccgagcccgagacctgacacccgacccccactaggggtagaagcgacgaaggtgttcgatgttccacgagttaggcagctctgtgccgtcgcccgtggccagccgaactgagcccggccgggggacgccgatcactcgatacggaccctcccacattggtgagagcttgctcaatccagcacgcgtttggacgcggcgtaggacgaggtcgtcgacgcagagtgatcgggcccggacgtggcgctgatggtagcgccgcaggctctgctggtagcgcgcggctcggagggccgcgcgccgccttcgctcttccaagtagtcgaggtcatctctgcgaagctgatcttgatcagcctcgcaatacatggtggcccgaggggacctcagggtgagctcagatgggagaaccgcctccgcgccgtagacgaggaagaaaggcgtttccccagttgctcggcttggcgtggttcggtttgcccagagcaccgctggcaactcctcgatccacgagtcgtcgtgcttcttgaggatgttgaaggtcttggttttgaggcccttaaggatttccgcgttggcgcgttccacttggccgttgcttctgggatgggcgggtgaggcgaagcagagattgatgcccatgtcttcgcagtagtcaccgaagagttcactagtgaactgggtgccgttatccgtaatgatacggttaggcaccccaaaccgagcagtgatgcccctgatgaatttaagcgcggagtgcttatcgatcttgatgaccggataagcctcgggccacttagtgaatttgtcgacagcgacatacagatactcgaacccgcccggggcccgcctaaacggacccaagatatcgagcccccagacagcaaatggccacgaaagaggtatgatctgcagggcctgggccggctgatgggtttgcctggcgtggaactggcacgtcctgcaccgccgaaccaagtcgaccgcatcgttgagagccgttggccaatagaaaccctggcgaaaggccttcccaaccaaggtgcgtgaggcggagtgggctccgcactcgccttcatggatatcggcaagaagctcgacgccttgttcccgaggaatgcacttcaggaggactccgttagccgcgcgctgatagagggtcccttctaccagcacatagcgcttggagatgcgctggaagcgttcactcccttcgcggtcctcgggtagagtctt

SEQ ID NO: 4308 - DNA, 609 bp, Oryza sativa
tttttcaaaattggtgatatgccactgccgtcgcgtttccatcctcccccctgccttttccgtcttctttcactgttgttcacttcggcaaggttagcgccaggagccggacgtatggcacgcggcgctcgctggcggcggcggggatctactcggcgccggcgttcttggcctacctggcggcggaggcgtcgcccgtccacccgctcgctgcgcggaacaaggcccgcgccgccgccacgctggtgcaggcatggcgcgcccgccgtcagcctcaccatggccgtgcctaccatggctcccctccccgtgcccctgcccatcgcccccatcccagtctctcctccgcgagccttacgcctgcctcggcagccgccgtcgccgtcgcctctacctccgcggcgggaggaggagggggcggcggtgaggctgaatacgaggtctccgatgaccaccgtgctgcgcgggagcgccatgagcgcgtggtgcaggagctgctccagcgccgccgcaccttcgccatggccgtgcctaccaacgacttcgccgtgcgggcgcgcctccgccgcctcggtgagcccgtcacgctcttcggtgagcgcgagatgg

SEQ ID NO: 4309 - DNA, 531 bp, Oryza sativa
ggcgttgatttagcttccaggcggaggcgcgtgtcaagatttggtcaagatagggtgggtccccacccaaaagaagagtaggtagaagtggtacatgtggtatccccttgagatataaaaggaggaccttgcccacaaagaaaaggggggacgactctgagaagacttgagctgggggaggagatcgagagaaaaaagaaccagaagagaaggaaaaagaggggttctagagcttgaactctcttgctccccgactctctgtaactcttcctcacacatatccaccagaacacaggagtagggtattacgcttctcagcggcccgaacctgtctacatcgcccgtgtctcgtgcgtttgctctctcgcgtacattccacagatcgagggtgaagaacctcacttagcgcccctggccgaaccggcaaaggggggcctgcgcggtctcccggtgaggagccccacgctccgtcatctggcgcgccaggtagggggcgcgtgcgcttttctaagcccttatcctctttcgtgt

SEQ ID NO: 4310 - DNA, 672 bp, Oryza sativa
gatcccaggggctcatgggggccatggtgtacggcgactaccttcgtcgccggattgcgccgctccagcggcgcgcccggggcgcctgggagtacaccgggtccgaagactacatgaggacccaccagggggtcagatgggactgggcccctgaggacttcaagatagtggtccaacgggtgctgaatctcagctccgtggaggcatccctcatcccccaaggagtcctccccctctgcagcgatccagatcgcgccaccatcctgaccatcatgcaggcggtcggggcgtcggaggagcgggctcctggaggccacgatggcgcgggcgggagccgcaggggggaacaatctaccccgggagggggtcgtgcttctgggccccgcgacgggggcccggggagcggccgccccgccgacgcccgggggaaaagaaagcaggaaggaaccccttccccatctcctccccgagggggcggggcggcgcgtgccagcagcaggcgcccggagggtgccgtgccgtcgtcgcagcccgagggggagcgaaagaagaagcggctccgcaagatgggggagaccgaaccatgccggggaaaccttatctcccccccaaggtggtcgtttagccgacctcctcgcaggttcggggatcctctagagtcgacctgcaggc

SEQ ID NO: 4311 - DNA, 2011 bp, Oryza sativa
tccgtttcttcccctccctaatgaaaatgtaaaattgataatttgacacactattcggtgtaacacttgtgatggcaatgatatgtgggatcacatgagtgtttgacagtggctatgaatatcaaacaatcgaatcctaattgaaaaggtgtgaaataatctaagcccaactaatgaagtgtaaaaaagaagtgaaatctaacgaatgaaaatgcatcttgaatgtatttcaaaaccggaccaaaagtggaggggagataaagtagagttaacttggaattaacctccctatcaacggaaccaaaggttcaaccactatgcagctgcagtcaactgatgctaccaaggctgatccaattgtatatgttcccaaacagccaaacattgtacattagtttcactaaacgtcaacccgggcattacatggctattgttactttcatggagcgccacgtcggcggtcagccccactcaaacgaaaattggacctactgtgatttgttaaactaacatcatatatatctaaacgtgtaatttttaagtttgcggatgtaggtgacaccaccgcttatgtttaaggactggacatatatattttactctttaaaagtactaaatgagattttttgtgatgtagtcattctaaaattcttaattaataaatatcgtgctgcactcatgttctttttcatgttttgctataagtatgaaatttcaaatcaataaaaagatttgtatacggtttgaagtctcaattcccacaacatgaagaatggataggttcttaatgtagtccacaatgttaaatgcagatactccctctgtcccaaaaaaactcaacttctagagtttaaattttgttaaaaaaacaaacttctaccatcctacgtaccctcagcacgtaaaacgagaagttttattattttaatatcctttacttacctatcacttttattatttttttcaataattaagggcattatagtcattctcactcccacttttcactaattctaccttagaatgctaggaattgctttttttttttaggacggaggagtatattgtcttggtaatactatctaggggtctaatcaatagtcaaatatttctagttaaagtggtctcatgagagcttccataaaaatgttcaattagtatagttatatattacttcaccaaacaattgacatcaaaattggcaaaacgtatacatgagaaatttcattaccaaacagatctctatgtttatttacaaaaacttttgagatatctgatcctagtaccaagtgtggaatgccaacttaaacatcaaaattgaatgcaaatgtggtataaattaaaagacactttcagcagcacaaacacattcctatggaaaagaatgatcgcccaagaagctagcgaccacacaaaactatgcacacggtttgatcgaggaaacagagcaactatgaatcatcacaacatattcttctctcttgtcaagatcttccctgttcaaatctggcgtagtatcaaaggtgacgaagcttgggagggagaagatcgatgtcagtgagctagcattgtccccattcttgcgacacgaggacgaagccatggccggccagcatctgctccctcaggttcttgatcgcctcgtacctctcggcgtcctcctcgtccagatccttgctcctctcgctgcaccctccgtcgtcccaccggtcctcctcgccggcgccttcctgcgatcgccggtcgatggcggcggcgttcttggacctcgccgtcgtcgtcatgtccttggaagccgtggtgtagctccagctgtagtccttgctgttcccgtccacgttcagctcgatggagtgcatctcgctgccgtctgaatcttcggcgacgcactcgccgcggccaccgccgtcgtcttcttcgtcgccgtcgttgtcgtcttcgtgatctccgttcttgtttacggcaacaagaatggactgaaactgatggccgtcgggtcggcggcggcggt

SEQ ID NO: 4312 - DNA, 1964 bp, Oryza sativa
ctatataaaatttgaattttaaaatataagaaattcaaataatttttttgggtagtaaatgatttcaaacagaaaaattgtcaaaaataaaattgtataatttatcaagatctataacttttattttggtcatttctctatatgactttgtttgaatagtttgaatttgaatttaaaaatataacaacttcaaacaacgttttcaaatactaaatgatttcaactgaaaaagtcatcaataaaaaatttatataactcatcaagatctataacttttattttggtcatttcttcatccgataaagtgatagtaacattattcataaaatttacatatatctcatttggttttataaactataagagagatgtaaattttatgaacaatattactatcactttgtcagataaagaaatgaccaaaataaaaattgtatgtcttgatgagttctacaacttttatgttcatgaccttttcaactaaatttatttactacttccaaatattatttgaagttttgaaattcaaatttttaattgataaaacaaagtcaaaaaaaatggcaaaaataatagcagtaaaaatacaataacatgatagagcatgatttagaaatacaaatacacaatagcaaaaatcatttgtgagtagtgaggggttttttattccgataaatattcttcaccgtatccgtttcgcttcgtattcgctccgtatttgtattcgattctgtttttatatccgggtttccgattccgatttcgatcctgaaaagaattatgaaaacgaatatgatagagctaatttcggaccgtattcgatctattttcatccctagcgggaaggaaccgactgatcgatcgagcgcacagggcagggggcggcaccgctcgtcgcgacgcaacgctgatccagccgccagccgtccgtccgatggatcgcacgctgccacgaggccagaacagccgaaatggacgccatctcggaggcttgaggcaatgacaatgaggcggctacagaaaagagaaacgttaacacgagacgatgatgcgatgcgcggccgggtcacgtactgagctgccaaagccatggcatagctgccaggacgatcatgcatatgcttcttggtgatgatctgtgcacgtacatggtgtgcgtagcagctggaaatgctgacttgggtgtatacatacgtacgcatgcgtacagctccctctctctctctctctccctgaggatacggccgtgtccgggattacatccgttatccacatgcatcagaattgaagcggtcaacaaaaaaataaagaagaagagagagagcgcttgtttatccgatggtaaaattcgatttatctgcttcttagaacgacgggtagatgtagatagttgtagtatctgttactaaaaaagagaggtgagaattacatgtgtcaatgtgtgtaggttctggaaccatctacagttattatttcctctctaaaaaatctacagtgttggcacgcgcggaacaccgatgaacaactaaaaagttggctaaaaaaggacgggaccacctatacatttgtcgacaaattttcttctgaaaatttgacagatgtaattatagtacaatcgtagtataattacactgtaacttgtatgtaattactctgtaacttgcatataactacagtgtaacttgtatataagttaaacgtaattttaaatcgttagatctattacaaaatttgttctggtgaggaagaaaaaaaaatcacatcacacatatatgtgaaagaatttattctcacaacctccattttatcgaaataaatgttatggagagatttttgaaagttacatacatattacattatagttacagtgtaattacatgcaagttacaatgtaattacactacgatggtactgtaattacatcagtcaaatttttggtagaaaatttgtcgacaaattaatat

SEQ ID NO: 4313 - DNA, 1810 bp, Oryza sativa
catatcttgatgacgacgctgagccttggcgtgttgagtgctatgcccgtgcatacatcctgcatttgttgggaggggttctgtttccagatgctgggggtgacattgcttctgcgatatggattcctttggtcgccagccttgatgatctaggccgtttcagttggggctcagcagtgttggtgtggacttatagacagctctgtaaggcctgttgtcgtcaggcaccatcatccaacatgagtggttgtgtgctattgattcagatgtggatgtggttaagactaccggttggcaggcctaagtggaggcaaagcttcactccttggccctacaatgagccagatatggagaagacaacggcctacctgtttgagagtactgctactgcacatgctcaccgggatgtggcatacaagcattatgtcaatgagatggactacttacagcctcaacacgtaagtacttccaatatcatttctagttcgacatttacttctataattgagatactaacctacgacatctcttcaacttttctagattgagtggttaccataccacaccaatgaggcttcaagcctgaccctgaactcgttgtgcaatcgagactccgattacttcatgtaccagtgcccattgatttgtttctgggcagttgagtaccaccttccacaccgtgtcatgcgacagttcgggaagaaacaagattggccggttgaggacatctcaacctgagttgaattacacaagtaatatttcttatctctgtttgctttcattatcaatgttcaatttttaccatttgacccttgtcgatgctcactttgctttcatcaccttttacttggcaaggaacaccagggtaagaccaaaaaaggtgaaggactggaggttagagcataccagatccattgataaatggagggcagtgggaaggaccaccgggtccttcaagataatccattaaacccttcttttctcagagtaccttcgttgggtgcataggaaatttagactgttcttacgccctaattggacggaaatcgacatagaggaagaccgcgactccgatgaggggcggaatccctacgacgtccggactagggttggatatcaaatgaagcacgccccacttatagacagagtcgtaagttttcttgaatttgtcaaagtgatttctatttgcaccttacaccctaacaaacatcttctcacgctttcagtcgagagagctcctcaggagtatgaatgaaatggggcatgccctccaatctccgaggggtggtgaggacacggagaacacactccgcaatatcttagaggtaaaattgatttagcactttgcattacttgagttatgcctaacaaacttcttttttttaaatgcagaaagttcatcaaagataccggaaacttgcagcaagattaggttgcaagtcggttagattggacgacgtgtaccaaccgcggagagtaccaccaccactaccacaatccgcgtgtccaagtaccgctcgacactccatcaggatagaagagtgtgaagaagttggtggctagtcgtcatcacgcattccacaagggaggagaaaggggaaggcgtcggctccacctagcgacgacgacgacgaggaggaggatgaggtctacatcacaccagatgctgatgagatagacatgtcgtagttccccgatgcgcctcaggggacgcagcccacccaatacaacttgcgatccactcgggcagcgaaaaagaagtaaaatgagcttaccattcttatgtgttatttgatttctctcagtttgt

SEQ ID NO: 4314 - DNA, 12932 bp, Oryza sativa
cgcgctccgcgagctcggccactgcgtctcggacggctacggcgtccgccgctccctctccggcgggcggcgcctcctcatccaggccaacttccgcgagctgtgcgccgcggtggcgaacggcggggccaggttcgccgcggcgctggggcgcagcggcgagtgcaagccgccgggcccgcacatgtgcctcctgagcgactacgggtgccacgtcgccggcgcggcggggcggcgcgcgcacgcggcgaacgcgttcctggccgggtggtacgcgtcgcggccgctggcgtccggcgccggcgccgcggcgctccggatgtgctcgcagcccacctgcgggcggccggagacgcggaagcacgagttccggcggtgctccgtgtgcagcggggtgatctactgctcccgcgcgtgccaggcgatgcactggaaggtggcgcacaagagcgcgtgcgtgccgatggcgcactggctcgtcgccgccaacgccggcgccggcaatgcggtcggggccgcggcggcggcggcggcgcagatggcgatgccgtgacccgcggcgacaccgcgtccgggagcgtgtggtggtcgtagctcgccatctccgggatgctcgcttgtgtttcctctgctccaccgtctttgcgtctttagattatcgctcattaatttactttcctgtacttagttccttgttagtgttttaagttaagccaagcctttttgagagggagagagaactagtagcaactcttatgttaatttcctttttttttagttttgagtattatgtttcttcttgtttttgtacatcggtaatcaagttttcatcaaatctacgatgaaacaaaaaccaaacaagtttttgaactccattctgagaaacgcattcaatctttgatcgaggagcagtagtaaataggatgggatggtcggttcggttcgtatcacgcaaatggggtggtaggaatcataaaagtgaaataaaaatctggaggaaacgagcgggcaagccgtgaaagaaacgatgggggtgaccgcctgcttttctggtaacgcccctacggtctgcgatgcgagtcagcgtacgaagttttttttttgtttttgggggcagtcataaattcaggcaaacaaagtgagcagctggctgctgccaagtgccaagcggttgaaaagcggcacacgggtcgtaaatatttggcctgtagcgtggagtggcacagacagacagaccgcacacggcagcagagagaggagcaagcgtacttttggcgcaggcggaagcgaagcgcctcgcgaggattcgggcggggggcctctgctgtttttcttctgcgcggaaacgggacggggcgaccgtcacgaatctgtggttctgaagtctttggtcctttttttttttttcggggaagggagaaatctttgatccttttatatttataccgtgtcaccgtcctacacttgtagcggtgaaaacgtacggaattgttgcaaatcctcgggagaaaaataaaacaaatacaaacgggacggataggttttgttcgcttaaagacaacggataatcttagtctgcgttctttgttgggagttcccaactcccctcgttttctacgcgtacgtttttcaaactactaaacagacggtgtgttttttacaaaaaatttatatacaaaagttgctaaaaaatcatattaattcatttttttaaaaaatagctagtacttaattaatcacacgttaatgcgaacatcgttttgcgtgccctccttccgaacacagcaaatatagatacaaatacaaatatttttttcctcggaacaaatacgtcggagttttcaacggataccgataataagatggatatccaccgaaggcaagaaacatgaaaatttctttcttaatttacacttcaacttagtactctctccttccaaaaatctgagatctatttctttttcatcaaaaccaagaagcaattaactcactcaacatatggcgaaaccaatgaacatgcaaccaataagtattagaatagcttcttggtttccaatcaacaatttaatttagcacatagtgactataaatatgactcagatttgtagagaaaccaaagaatgaaataggtctcagatttttggaaggagggagtacctatttagattttcttttaaagaaacacagttaaaatgtacacacttacaacgtgtgcacactcacttttattaatactcacgcacacctacacctatgaacaccttcaaaagtttgaaccggtataatattggctagaattttttcctcccatactgttctagtgcatcggcctttccttcaacaaagtggcaagaatgtgatctggctctataatttgtttgtataaaaatgagatagataatagatagtatgcccacttttaatatagaccattataatcttgacccatatattaatctgtggcttattaacatgggaatttgtaggtgtggagactaaacatgaaggcttatttttctattattttattaagttaatagattgcacttggggtaattactattcgttggagggatgagcttgggtagacatttgaaaccatgggtccaagatcgaccaagcgttttgggtgaacctgatgcaccctagagtactcgatagtaataaatacaaagcaactatataggtttgtgctgaaagtgcagttcacacctttgagtccaagtgaatgtgttttgaggattgtcgatgtcacctaagggggagggggtaggtgtttcatgcaattacaaaaactaggaacggaaattagaactaacgggacaatccgatactgctacagacagtccgacaatacacagtattggacaatccgacattagccggacaatctgatcaaacgcagaggaaaataggaagtctcacctactagagtataggcctggacaatccggtaccgagcggacggtcagacaacaccaaatgcacgacaatgtgatcacaacaagacaatccgactttgtatagagagtataaaacctatgataaggtatagcacttcgcacactagttttaaactagttgaaaacctatgacaaggtatagcactttgcacactagaaataggagatgatcaataagatataaatatgcaacaaataagatccccaaatcgttcaacatgaaagcataagtgcaaagtaaaaagctaggaggcactaatttgtttaccaaaatttggatctagccaaccctacatctccattgaggggcttcgaaaagccaaatctctttcaacccttttcctattcaagctaccacctccgatggtgccttggtctcttcaagcaaccaccacagacaagcttgtgctccaagagacccactcagtcccaagcttggactccaagcaacttccctctgatgaagcttattgtaccaagcacccaccgagatgatgctttgcttccactattatctcttctcttatggaggcgatgtatataaccttcacaaacttctcctgggcacaccacactccacttggttgaccgcaggcttccccttctcttaaaaatgctcaagttctccaacttgaaacacaagcctctctttttctctagcagcacacaagctatagcaaactcttgatatgggggagaacaactaccctaaatgtgtaagaactcactatcaaggttaaactatccttgaaaggatcttcaattagctgcttaggctattggacatgcacttggcttgctcaggtagtagagggtccaaaagtcttaaaacaactccacggcactgggtatatatagccctaacccctccaactagttgtttctagttgttgctagaagctgccaaaacctgtatggtgcaggacaatccaccataggtgttggacagtccaccatcggggtggattgtccgccaccataggtggcggacaggtcatcaccgggatggattcccgaataatccggtaccttatctgattgtttggcactactaaactcaatttgtctgcccgtctcagacaaagcttctcttggatagtctgctcgctcctggactgtctggccttcacttctccatcttctggctgactcgaatatgggcttgcccgtacaatccactccatcccaaactgaccagcctttatcttcttccttccaagccttatcccattcacttcttcttcaataaatattggtccttagcaacttgtgacttcttatggccttgaccggtccttcgacatttcaccaagcacttgctccttcaccactacatcgagtccttctcttatgcatggtccattgcgtagctaagtcttgccaaccctttactacatcatgccatcttcgatcacttatagccttgcatcacgatgagacaatattttactccctcttcatcatcatcttcttcatcgagctgatcccctactaatatatcgtttgccatcaattagccaaaagcccaaaacccactaggggcatagatgccctttcacgggcctccgaaggatataacaaccttactcttgtctagatcactataagtaagaattcgtacaaagctaagagctcttgatagtactagtcgatttctggaaagccaacccctcctaatgagcatcggatgggattttacaccctttgactctcatctctctgctgagaggaaaaaaaacctttgaactccatgcctgttttgctgtagctgtagatggtttccaggacgccacgtcgggtccgtcatgcatatctaagctatgtgaaaatgagacttttggatacaccatatcctactacattaatgcaatggaatttggagttaatacgatggacaagctctgcagtcggtgcaccgctcttttagctaacatatcatctagcagaatacactcccatctatcttgcttgtgcgagaacatcacataccctttcccgaggtgacaatgggttctcaaagtaagacacctggagtgcgggagccgtccattgctagacgccgacacacgccgccccttggaaagcaataacccacctactcatcttgactcattttagtcaaagaacacctggcaatcccctagcaacccttagtaatagcgccacatcgtccccgacggttaggcagttggccccatgctacactgcgtgggacatatggttgctccgaggagctttgtggacacaccttcgacccgaagttgattgactctaatagtcttagacattcaaccgttctcgaggtttgtaagtcatataggtggtggacccgaggacctccccgcaagacctcagatccagcctaggctggagaagcgatggtccatgacctgcagggtttttccgacttatttaagcaatctggtaatgtgaggggccccttttggccattacactattccatgttaaacaaactggccatatatacgaagggatccccttggccatgatgctaatatctctttccacaaatataaagatgtagtgtttaaaatttatttgtaaatataagatctctagagtactatttctgctagtacccttaatttgatttttatccaatcttacccctaagtaccctcacatctctttttaatgaagaatcattgccatttatatttcttcttacctatctatcgcaagaatcgtacaagtactcctgccacagcgcgcggtatcactgtcattgttatgttccatcacgcgattcatgaagttaactgtcattgttatgttccatcgcacacgatcgaacgagtgtcgtgcctaacacagaaagggatctatatacttagaacaggtacttaattagggtgctcgatcgtgattaaccgccgtgaatcagcaagccatcgagacaaaaaaaaaagcgaagcctggaatggataacaagtaaagaaatgtcaacccgcaagtagcaaacgcatttgtccaaaccatgaggttgttgcccgtcacatcacatcacacacgtagtagtagtacagcacgtgctgtcgaaacagtagtcggaaaggcattggtttgatgcctccgtgtccttttcttttagctacaagaagagatctaggtgagcttagttagcaaattaatgtatcgaattgggaagattaattagttaatcagtttcccaattagtaaggagcaaggacgtgttcatgtggtccattagccacactgacgtctggctaagctagtttacgtaaggtagcttaatttctaggggcatgcaggacatgattagttggttgcttccttcatactaatcaaacaacgagttaagttgcggcagagaagaaatgtttctgtatttaacaatcgtacgaaattttttgctcgaaaataaccaggaaagcatcactgacaattctcgaccaaattaaagtaggcctttaaagggtcacctgcaacatgtaggtcgcggttaaggtcttaaaatttctctatatatatttatgctatgaactattgatatagatatatatgtgtgtgatatataataaaacgtaggttgaggagagttcttttttcttttgtttatttaaaaaaaaatcaaagtactagcaggtgttacctagtagttgtatattataaaaaaatagataaaaaatttgtgtataaaacagactagaattacaaaagatataaccagcttaagaatagaagagctagctgttaacagaggttgagagagagagagagccatcgtgtcgccctcgcgcggaggctcagggacgaaaccctagccgccgccgcccctcctcctccctcctccctgcttcgccaccgccggagctcagtgccggcaaagccgagcgacgccctgggatggcggcggcggggtcatctccctcggctccatctcgtcctggcgcgggcgtggcgatgacggcggcgggatggcgagattgcggcgacggcgcggtggtggggctctccgcggcgacggcggtcgggctttctacggctccggcgacgggcgacggcgtcgccatatccggtcgtcccgcttccaaatctggccgaggtgaccggcgacaggctcggttgacgccggcaccgctcgggcgtaggcgggtggccggtgacgggcatctccggtgcgggttcgtcggcgacgacggcatcgggtcggtggtggctccaccggccagtggtgctctcggcggagcgcgctccagcaccggctgccgcgtggacctggccgggggcaacaggcctgctgtggtttttgccggcgacagggacggcgcttccatctccctccctcctgttcctccagatccgattctccccttcttcagtggttgttcttttggtgctcacaggcggtgtggcgcccgctcccctcttcttaggtgctcctcccttcttaggctaggctgtttccaatcgatgccgggagctccttggttcggtaggggtgacgtgtggagttggtttccggcgtcctgtcttgctggtcgtcggccgcgccgtaggtttgctatagctaggttcctgcgtgtgaggtggtctctggtcgagttgcagtgtgattgactgttgaggcggagtcggagctgcttgtcttgcaagcttggcaacgatgaccctcaacagacatctcggcaacgcaacaagggttcggaagtggagcattttgagagagcctcgggtgaaaaccttgcctagtgctatcctaggttgatgatatagacgcctgtgggcgccgtttcctccttggaggtatcgtcatgctggctctctctcccttcaggtgaaaaccgggttccgttcagaatgggcgttgacagcatttttgatgttgttcccttgttgaaggcttcgctcagaaggtttctgcaccactagaggacgtttggtggttctggagacctcgttcgcattatgttgtcaaagttgcttgcctttggtaagctcggcaacgacgacttttgtgaggtctcaatagttgctttcttctccttttctgtaaaggtttttatcggtttcccatttaattatccatgtttgttctgtttttgggtccggtttcccttattaactgggccaattctcttcttctataaattctggcaggagaaactcatgccgttggttcctcgaaaaaaaagttgttaatagaagttgtaatcttttgctttggaccatatagcattatagctagcttatttagatgttttttggtgtaagctagccagcgggtatggcttatatccattggaaataagaagtaagcgccatcaagaggtgagtaccataattaacttttaagtactagaaaatttcatatctcctcaaaactaacaactgagagtcatcaaactttacaataaaaattgttaatgtagtactataaaatcacacctagaaaaatatacatgcatatccataagatgccggtggcagatccagaaagaatagtagtaagatctgagcaaactagatagagttatagatagagttacaatcccccttctatctaaatatggtaaaacattttaatggggtcttcgtggggactctcatagtcttcacgccagtagtgggggctcgagaccttgccgctctcttgctggatccgcccttggatgtgggtttagttgacctccaaaaatttttcacgaacacccttgtaagtacattttactccctccatccacaaaaggttatacatatattcacatttgagtttttctaaataagttgtttctatttgtagtctttatacattcaagacttggttgcatgcttaggagtcatggttgcattcaagacttagttaccaataaattaaatgttttattagaacctaaggagtcatctaaatactcattggttgcatgcttgcatccactccttgattttgtaacatctaaggtgatttaatttcttattggtcttggtgttaaaagtaatatgtgtaacttttctagatggagggagtatatgtaagtccaatttacataaatggcctcactaaaatataaattgctactaatcgactctgggttaaaaagttacttcctccgtttcacaatgtaagtgctagaaagtcttacatcgtgaaagggagggagtacagatctgccacgccgtgtatacccttgtcgatgtattaacaaaaaccccaagtgcttattactccctcattttctaaatatttgacgccgttgacttttttaaacatgtttgaccgttcgtcttattcaaaaacttttgtgaaatatgtaaaactatatgtatacataaaagtatatttaccaatgaatgaaatgatatgaaaataattaataactacttaaattttttgaataagacgaactgtcaaacatgttaaaaaaggttaacagtgtcaaagatttagggatggagggagtattaaagatttaatagtagaaactttagttagcaagttgttgagagatcatctatcgatggttcaaaccagtacgtcaatgatgaagcaggcatgcatgctcaaatttttacattttggtcctttctgaaaacttattttacaaatagtcccctagaaaaacttaacccgggaattatcctttttggagcgctagagaggctagtgccgtggtccaacatggcggcgccgcgcccgtgccactgtggcactagggctatcgtggccgtgctgactgggcagaggggggggtgctagccactctggcaccgcccccccatacgacggtgccagcctggctggcgtacccctcctggaagggccgcgcccttaaaccccgtcggccctaccacctttctcctccccacagccatttgcgccaagtcccagcccgagcagcagtagttcttctcccttactctctccccctcacctctgcacctcaaatccactcaatttgaagccgtttttttgcgggattttttgtggaaatcgaagagaaaggtagactcatccattcccccctcttttttttttcatttttatcgattgaatttgtagatcggagggtaaccctagaacccctttcttgcccaaatttgtgatttttagcatatgttcttgggattagcttgttgtagtgctgtatgtgtgcaatgtactcattgctgagttggtacgggaagacttggaggggcaaggagagaagaagagacctttgtttgaaaatgatttatgggaggcaggaccatcaaatagacattgcggtagtgatgatgtggacgaagcgagggagatgaaaagggagttagtacaagaggggcttgatctaagtgaacatttgtcggagagtgtacattggtcgtcgtatggaggcaaccctgaatacccggcgcaagtagcaggccaatatgtgaatccagatgattactttgttgtcgaattgagtggtggtcacgattctgtttcagtagaagtcaatagggaggaggttgatgaggaggcaagtgttgagaaatatgatgttgaatttgctaaagactattatgatgaccgtccattccctccactaattaacaatgacaagttagcattagaggaatgtcgtgcgtttcagaaggtgtttgggagaaagccgaacattcatgagtttagggacctaacacatacccatggtgcaatactagatggcggaatcaacttagatcagttgttagaaccattccaggtggatggtctcaaaaaggatttagagttcccatccatggtaacattgaagctatggctccaggagtacgccatcgtgcaccatcgtccataccgtgttgtcaattctactacaaataggaggtatatgttaaatgtgaaaacccacggtgcaaatggaaggtccatgcaactaagaggtctagtggcacgtggaggatatcacgggttggtaaggcacatagttgtgctactgccgaaggttcagggagacaccggcagctgacatctaagttcatagcaactaggttatgcaatgccataaaattgcaacctacactctgtgcttctgcattagctttgtatatatttgaggttttccagtatagggtgaagtatggcaaggcttggagcgcacgagaggaggctatgaagctcatttatggagaatggggtgaagcgtacgtccgtttgcccactttgctacaagccattaagcagagaaatcctagtatggtctaccacatcgatactcatcctgataggtttgtcaacattggaggagtgaccaagaaaatttttatgcgtgcattctgatgctttggtccttccattgaggcttttaagcattgcaggcctgtactagctatagatgcaaccttcctaactgggaaatacagcggtgccttgatgactgcatatcggctgatgcggaggaccaacttatacctttagcttttgccttagtggagaaagtgaattcacgagactggtgctggtctatcgatcttgtccgacgggttgtggttgggccgcacagggaggttgtattatctcagatcggcatgctggtataatgaatgccatgaggactcctgttccaggattgccaccagttcaccaccgatggtgcatgaggcacttcagtgctaatttccacaaggccggtgtggacaagcatcagacagaagagctcctaaggatatgtcagattgatgagaagtggatatttgagagggatgttgaggcactaagacagcgtattcctgaaggtcctcgtatatggcttgaatatgagttgctggacaaggataagtggtctcgtgcatacgatagaaacggctaccggtggggttacatgacaatcaacatggccgaacagttcaatagcgtgctagttggtgttcgtaagcttccagtgacggccatagtatcatttaccttcatgaagtgcaatgattactttgtgaacagacatgatgaagcagtgaagcgagtccagtcaggggagcgttggtccgccaaggtagctagtaagatgaaggtgcaaaaaagcaaggcgaacaaacacacttcaaggtgtttcgataagtagaaaaagacatacgaggtcacagagaggggtggtataacatgtgatggtgttagattcggcgcaagagccttcaaagttgaagttaaggggaactcatgttcttgccaaaggccattgctctaccatatgccttgctctcatctcatccacgtttatctgattcatgtaattgatgagaaatcttccaaccgaatgccgtatcagttctcttcaagagccgttgtgaacacatgggcaagtcgctttgagccatacctcgaccccacacagtggccaccatacgatggtgaagaatttgttgctaacccagatttgaaggttaaaacaagagggcagaggagatcgaagcgattcaagaacgaaatggactcgggtgttggtggttctagaaggaaactgccttcaggtgttcaacttgatgctgcgccggtgcaaaatagatgctggttatgtcaccaggagggtcacaagaaacctaagtgtcttaagcgtccaaaaaagaagaagtccaaaaaaatagtgttagggaggtaaatcttttgttttcctatttaagtcaatgcatgttttattcttgtctatttagtgtctatttatttattttggattctcgcattcattttctttaaagttatgtcatgcaattcttggtaactaacggtgaatttattcatttttcatgtaggatggccgaggaggaacaaccgccgacttacccagccttggaggagtactacgaggcctgtcatcgcagggctgcgatcgaggcgggaagggtatgaatcggcatcgattcacttatacctaagtattagtagtgtgtgtttgacattatattaactaattgatttacaattgctaatgcatgtacttcaaccgctccgagttagagctcatgcccccctcc

SEQ ID NO: 4315 - DNA, 3273 bp, Oryza sativa
atatccgatgtgacacgccaaaactttatacccttggatttaaacaccccttgaagcacttcgagacatcgctccagtaagagttggatcaagattaagtttttcatggcacgcttttcaaactgctaaacggtgagtttcgtgtgaaaactttctatataaaagttgttctaaaatatcatattaatctatttttcaagtttgtaataattaaaactaatcaatcatacgttaataccacctcgttttgcgtaaaaaacttaatctttatcttcaggagaaaagaacaccaatgatgattgtaaaattttagcaagatataagtacaataagctgcaccaatacaatataatgtacgtcgatgcatatacactactgcaaatagaacttgaggaagcttccgtccttcatttatgaagaaatagtcttttgggttgtttcagatatggatcagcatggaggacaactaagctaagtttgtaaactgcttaagcgggaaggtagcattcaagataaacaaaacgaaacatcctcgcaaaatatgaaaaaggataaacgaaatgagcatgtgcaagattatctagtgtacgttaccgattgacctggtagctgttctctcgtccatagctttctcgagctgggtcatatgtcagttatgtctaatccagttggatcagttttatagtagttaccattaaccgtggtttagccaggtccaaataaatccaatatttatcgggcaaaactccctgtccctgcaattgtaactgccaactcactttcacctcacgttttctcttggttttgttttagcccacgcgtagatggatgagccctctcctcttctggttatcatgtgaggttaatttttttttctccctgtgataaaatgatagtgtatagattttcaaagaagcatgagaaatgttgaataaatgtatgcttataaaacccatgaattttcagcatacacatttcaatgcacttctttttgcttaattagaattaatttacaaatataatagatttattttttatcgtgatttttactgaaaatggcgttaaaggccatgactaattttagtaggtgtaataagtaagatcacaaaatttttggacaattacttagacaaagtaaaacaaattaactaatagtacccattttaggttaattacaaatgactacacactaaaaattgacatgatttaatttcctatcgattaaagggaagacgcacacggacaccacgcgtgagaaatgataccgggattgatcgtaagttgatgacaaggtttctgactctgaaattaccttcactatgcatgatcctaacaaattatgggtactttcaaaattcttagcattaaatttaaataaatgtagcttaagaaacaaattaaacatcatatataatgtgtaaagctaaacacatatgaggtagagggttcatggaatttaatgcaaggaaaccgtctaggttaaaagaagaagttcattggtatgcattaattagcttactatctaagactaggcttttggacccaaagaagaagtataaaaatcttatccctaaatttatttccctttactttggtcacgtgtcttctgtttataaactgtaaagatgatttccaagtgaacctataaaaaaattaatatatctttagcaacaaattaaccacctcatataatatgtgaaaagccaaacacactatgaggaagaaggtttctggaattcagtgtcaaggaaactgcctaggatagaaaaaagaggtcatttgtagtatgttttaattagcttaaaggatatattgatctctaatacttccatctttggtgaatgaaaacatatagcgaggaaaaatttggtttattcctagaagtttagatgatacaaccgtcaatatttacagacagtataaaaattcactaatttcacctttcatagaaatacagctagcacctgcaaaattcattaactcagatatgcattgtgcaatcttaaggatacaaatgaagggcacctaaaattgcactgcacccaaaataagcacatatatcctatacatttaagcgatatatgatacgctgcatcaccttccgtccaattaactgcgaccaaatctgggtttatttttacttgccaaattcgaaaacattaaattggaaaaatgtgtgcacggttggttacagcccaagattagaggtgaaaatagatcaccagaatagctggcataatgaattagctccaaataaagctggcttggaagcacgtagtataagaaaggcagcaggtaaagaaggaaggaaactgaaacgggaaaagagatcaggtccttttttgcgaaattgcggatacacccttcccgaagagccccagaacggccggtcaacggcaccgttgaccgtatgagggggggggggcagtttcgtaaattccacgaaacactgtcccactcctcgtcttcttcggattgcctatatataaggccacacctcgtcttctccattctccgtctccaagttttttttttctctctctctttggcgccgttagcttgaggcggcgaggagctcgaccacttggaggacatggtggcgaagcgcggcgccggcgcttgtgccctctcctgggatgagaagggcgaggtgtcccccggcgagaaaaggaagagggcggatggggatggctcgtcggacgttggcggcggcggcggcataggggcgttcgacgcgctgcacgacgagctggtcgtgtccatcctcgccgacgtggccgcctccgccggctcgccggctgacctcgccgccgccatgctcacgtaagcgcccggcccccgccgttgggtgttccgtgttcggtttggatccgcgcgccgtctcgtgtcgtgtccgagtttccgttttggttcccgcgtgtgttgcgaggaatcgggccggttattgattgggattgagattttctgatcggagtttgttcggggattacaggtgcaggagattcagggagctggggaagcacgggctggtgctcgcccgggcctcgccgtcggccgtcgccgtgcgcgccgcggcatggtgcgacgacgcgcaccgcttcctcgtccgttgcgcggaagccggaaacgtcgaagcctcctaccttctcggcatggtgcgttgcgccgcgctgcttgcacacattccatttcttgttgcgttcctcgcgtacgtacatgcgacctctcgattgctcgagtgcgtgctttgattttttttttctttttcttgtt

SEQ ID NO: 4316 - DNA, 3113 bp, Oryza sativa
tttctccccctctgcatggtaaagcgcagtcttgagatcgccatgagtgcacctgaaaaaaacacgcagggagagaatttgaaatcgaatatgtcatcttcctcaagagctttctgtcgtgtttttctccttctcaatacattcaggcgaaaaaaataaattattttgaagctttttcacagtacaaactgatcaatgagggttgccggcacttgcaagaaaccagtactctgaataagtacacagtaatcagttatgtttatctgaatcgcttattatcaactaacaaaacttatggttaaacttttatatacgtgtttttagctatttaaaaataaatactgtaaaataaacttcgattggaaagctacaaaatcaactacaaagttaagtcttaaaatttaaatttttgcttataaacataaaaggaacgttaggactgccaatctctcgacattaatcgaacaagtcctaaccagtactccctatgttttatattataagtcgtttcacatttttcttagtcaaacttttaaaagttgaataagtttgtagaaaaatatactaatgttttcgatacaaaacaaatgttttaccaaaatatattaaatgttaaactaaatgaaactaatttagtgttgtagatgttgctattttttttaacttaggtggtgtttgaaactcatgtagataaagatgaagattaagagttttaattattacaaacttgaaaaatatatttatctaatattttagaacaacttccatatagaaagttttcacatgagacacaacgtttagcggtttgaaaagcatgctacgtatatccaaattttcatccaacttttgttagagaaaagaatggggccttagtcaaacttaaaaaactttaactaagaaaaaatcaaacaacttataatataaaatggaaggactagtaatttaaagttagactaggtgtgtgacaaaacggttacacgtaaattttaacatgtagaattcgtacttataaaaaagagtaaaatgcaccaacgaacttgttattaagtttcatttaggttcacgaatttacaaagcaatcgaagtccttaaacttggtttattgtatcatcccggtctaaagacttgtttgaccatggtcttgcctatgtggtacgccatgtgaatgatgacatggcttttttttcctttcccccttctctttttcatcctcttcttttatcttcttcctccgctagagccacctcgagctcctccacgccaactgccaccgacgccaagtgtcactgctgtaagaggaagaggctaaagggcatgatgcctaattggtggtggattggaggggcgaagttgcggccaggacgcagagcgcagcggcaaagccatctatggtggcggcttagcacgatggtagctagggtgtcggcaatgcacggccagagatcggcggtgggcggcggagcctgtgctcgtggtggaggtagggttacggtggtggattgggggagcggagcggcgaccacggtagccctcagagcagtggtgccggcggtgtgagtggagcagcgcggtggcacccagccgaaagatggtggcaagagggagcggcacggaggacgcaatagagggtacgacaggctcggggagttggggaaaatggtggaggggagcacaggggtggaccttatatgcttgggaggttggaatcgtgctcgaggcaagcagatttgaagtaggaggagaaggcggcgacgtcggctcgggcggctcggctcagctgccggtttgcgtacggaagtggggaggtgggcgacgaccgcgtcccccgcacgtgtggatgatgcgggaaggcgcgaggacaatggcgtcgtggggagcgacatgcgcatgaggggtggccatggcggttgccgatcagaggagaaagaaagccctgacaggtgggcctcggccccacctatcggcgcctcggcggcagaagcaagaggagggaggcaaattggagaaaaaaaggagaagaagggaggaaaaaagaaaaaagaagggagaaaaagtaaaaaaaattccatatcgtcatccacgtggtatgccacgttgataaaaccacggtcaaacaagactttggaccgggatgtgttagaataggtgtcgaatatactagtcctatttggttacagttggacttggagttgtaatagatgttgggggtggagttagagtcgaactctgtaacccggcatctctcttaaatagagagagggggcaccacaatgtaactatggcgactacaatgtagcgtagacacgcagggagatgatggcggcgtgccatggactcatagcggctaggtgctatgttggttggggaggagcgcccataattagagccccggggatttaggcttcggctgaaccttgttaacaaatatcgtgtgttcttgtgtcgtcatctggcatgtcttgggtgatcaacgactgaagcgatcgggaaagttagttgtcgttccactatatcgactaacttttataacaagtggtatcagagcagaaggtttcagtattggatcaagaagacatgtggagaaggaaacatgaggtgggatcgcgcatcgacaggagatcgtcagtcgtggcgatgagatcgatggcgacaacgaggacgttgcagaggcgacgacctcactcacgatcagactgacgatggcggagcgtgaccggaagacgaggccgggcgtggccgaaggcgttcggagagatcggaggggtagcgccatggacggcgcgcctgacgcacgcggcgaacacggatccgcggcggcaaggaggccactgacggaagggcaaaaccggctagcgtggcgcggcgcggcgcggcggacgtgcagggccgatgacgatgagatcgtggacggtgaacacgagggttgcgactgcggtgagtgcgagggcacggacagcatgtattgagtacgtgctatacacgcacacatgcacatattgtcatcgggagagcataatcaccacggtacggatgcagagatgtagaagagaaagcagagaggttgggtatgaagttgaacttgactcggagatgggttcacgatgcaaggagga

SEQ ID NO: 4317 - DNA, 14548 bp, Oryza sativa
  unsure (1)..(14548): unsure at all n locations
caaatcgcctcgccgcggacgctccgccctgtgctggtgctcacgccggtcaccgctgacgaggtgcgcgcctacgtcgtctgctgccgcgaccacggcctcaccgtccgcgcgcgcagcggcgggcacgactacgagggcctctcgtactgctcgctccggccgtccggcgacggcgagggggcagcacgtttcgccgtcgtcgacgtcgccgcgctccaggcggtgcgggtggacgcggcgaggggagtggcgcgcaccaaggcgggggccacgcgcgccgtctgccgcatcggcgccgctggactcccgcctcccccaccggtctcctccggaagcagatcttagagggatgtacttcgcttcatcagcgtccattccgaatcctacggcgacggcgcgatttcctttttcgtcgtccttcggcccagtagctgtccagcgttcggcccagttgtcagttgcggaggccgaaggggaaaaacagagcagcgaaaatgaactagaaaatgaaacagagcagggaaaatgaaacgccagcgaccgcctccttcgtcgaccacctctcgccgccgctcgtcgcctcctgtccaccggcgctggcgcgagtggagtaggtaccctcagccgcgacgctctcgcctaccctcagccccgcgtcctccccgtgcgggaactctgctgcccctccatggatgtcgaggtctgccgtctccgtcgacgacgtcggcctcaacgcctcctggttcgaggccaccaccatgggccactgccgcgccaccgtgggagggagggctgctgctgctgccaagcccacaccaccgcaggaggaagggcggccaccaccaccatgggcatctgtaggagtgcgacggcaacacaagccactgtagcagcttgagaagccaagagtgagattgagaaatgatatgaattgatgttgtaaattgatttgaattcataatgtggctcaaactgattgagaaattatatgaattgatattggatgtgtttgtcaatttgtatggcaaaaagagattgattcagtatagcagaagaatcaagaatgtcacttgtgttgctgttgctgcattgaacatatgtgatggctgagtttttatacatatacagatttggttccagaatgtttgcttgcaaaatggcaaaagaaggctaaacctgactgttgtgctgtcaatttgtgagcagatctgaacatgcttataaactaacttctccagggcagacttttttgcttgcttgcaaaatgccaaaaaaaagaagagcacaactgaacatgcatacaaactaacttgtccaggacagacttgttttcttgcttgcaaaatgactaaaaaacataagtacttcaccaggacacaagctcttcagtaaaaccatcatctgtgattggtcactgtaaaaaaaacaaaaataagtaagatttttctaaacattatctcctctagatttgtaaactaacttactgtcaacagttgagtgaagctatcaatggcctcgtaatcttcaggctccttccatttatccataggagcactatcatctgcaagttgttcttctgcatcacctacctcttccctaaccttttgtatcttgcagacaaagaaaatttgagggtttagagaaataatggacagaatgataacactggaaacataattgttcttcagcaacataccactgattttttttgttttgttttttcattttttcctctctttttcctagtcttctggtttttatcgagccaacctcttgttcgttttgaacttcttgttttgacctcctttttctttagacgtgcattactcaacaagtcatttggtggactaacatctgtctaaactgtacatggatcctcagaaatgcttgtacatgcactgattttgtcttcaatttgcttaccaaggatgtcaagtgcactgtctactaacatggtgcactctggaaagttggctgctcgatgtgctaaattgagaaatttgtgggacataaacctgtagcgaagcatagcatccatgtttggattttcgattatatttctccccaaattgtcttgtatagttccactccttgcttctcgtgtccatcgcttcagcacgtagtgtggtggtaatgacttgatattcatcaaatcaagaactttcagagcatgggcacacaatatcccaattctatcgaatcgcctgcagctgcattgaactgtttgcttcaaaggatctccgataactttgtactcctcctcataggtgaaatctcctactagatattcattgttaccatccaattccttgctgcaagctgccaaggatttttcatattcaccttgaaaagcttcaaatataataggtgtatacaacttgctagcttgcaccaacataggtggtggcctccgcatacagattttaggcaactttttccttgattcaaattctgaattcagtttagtattcctttttccttgcaccaccctttcaaaatgcttaaagaaccggatgatatcaaaatcagatttaaaatggtttttcaagtcattatttagactttcactcaattgtgtacttctcattcctaatgtgaagacatctttcatatagcattcggcccatttttctttcaacttgtatatactatccaaccaggtttgcttgctcacttttgccctcatgatgtcaaatttttgttcaaatgctgccatgtcttcgtactcatatatgcatgcactaaaatctgacagaacacttgtgtcttctttgctctcctcattcttcactccacctaaatgtttgattgcataatgtggaaggtgcataatccatgccacgcttctgaaaacacttctgcaactgcctttcccattgccaaatcttggtcggtatagattgttttaggctgctgtccattatgagcttttagaaaggtctcaaacaaccatttgaggactcaaaagtctcatcatacatgagagcagcactaaaaattacagtttctctaaagtgattgaatcccacaaagacaccaaaaggcctactctcattgtttgttccaaaagtagtatcaaaactaacaacatcaccaaaacgtgcgtagtctgcgatcattttagcatcagcccaaaatatgttcgctatttgttcttcacaatccatttgcaatgcatattggaatgatgggttctcagcaattttgtcttgaaaatacttaagcatgctacctgcttggccatatgccatctcccgttgtcgcttggtccgtagatagttcctatgatctcggagtgtgtagctaaggttgagggatccaccaacttggcgactagccaactcatgtgccgctttcggtcctattcctgcatcatcggctgtttcaatttgaaaagcttgcaaatctgaaatttttctttgtgacaccattaaatgtatggtttccggcaagtgtagtgcatggttgtgttccaatatcagatcagacactatataatttcccttctttctattcattttgagattcatgtggacttgacaatcggttctagtttcagctcgaggacacttggttaaatgatcccttttgtcttgcaatcgatgaccttcatttgcacaaacaaatctacatgatgtaacactgccatccgacttgcttctgtttgtatacctttttctaacctcaaaacctttctgcccactgtagctaagccaaaatgcccaagcctcatctgaatttgtaaattccatgccaacccgaggtaccaaaccaggcatcaagttatctctgtattaaaaaaaaactaatgagtatgaaactagtgcatagatatgctgaccaaaaatcgccaaaaccatgctgtaaacattgattacatattagcacacattacatgctgtccatggccttgtataattgtattacacaccaatgtgcttccatcgcaggactgtttgacattgtttgatggcaggtctcggcaagattttcagctagctgcttcttccatgagaaaaggggaaacttgatcgatttcaaagcaacctaatggtggaagtttgattcagtgagccattcatgagaagtagaggcctagagggcataagagagggtttagacttacaagattgaagtgcagaaaagctcctgtccggcgatcacctcctccactcacgccaaaacttaacaaaattgttccatccgggtacggcgatcgctgctcattggccgctcgcgccaaaacgcgcgagtgtgttccttctcgcgcgctttgccgccaatcccttccactgacgcgcctttttacctccctccgcatggtttgcaaatgggccgaagggagcagctgggcaacgctgttgggccgaacaatatagaaccaagcagctgaacgtacgaacaaaaaggaaatcacgctgtcgccgttggattcggaatggacgcggatgaagcgaagtacatccctctaacgtagatgaggatctgcttccgtctcctccccacccagcggctgtgctgcagtgagccagtgagagaaaagaagagagagagagagagagagagagaggtggagagtagggctgtcaaaaaagctcggagctcgcgagcagctcgagctcggctcgtcgcaagctcagctcgagttcgactcggcaaggattcgagccgagctcaagcttgtctcaaagctcgcgagctctaccgagccgagctcgagctattcggcagaagcttgaaattttcactcccgctacccatcccaatttttcccgcactccaattccaaaatcctaccaccaacagcagtccatcacctaaccatttatttcccttatatccccatcccgtatccaaaccatagctcatttgctctcttcctcgaaacatttctcttctagatctacaatcctaggctgctctagtgctccactgaccactgctgtggatctagccaagcaccgtccatccttcgcctctcctgtccaggaagaaccccatggaggacagcagcagcccaccgcctccgccgtgagtgacgaaccgacgactcggatctgagtaagtttcctcttctttctttgttttacatttttatttcttttgcacccacatgtatctagggccctacatgtattaactgtgtagtgtttagttgcttgatgggtgttattgatttacattgaattttatggactaggtggagacatggagtagtacttatcttgctgtgctcctcttctgaagaaagactgaaggttgcagaacaccgtgtgtttgccatttgccaaggtaaattgatggcaatgcttttcttgttgtacttgtttgattccttcccttgtgcagaatatatattgatagcagttggtatttttaatttttgtagatgtctgtaaacctgcaaagacagctatctatagagatcgagtcaccgagcaatagggatggcatagcagcaacagaagcacaaccgaatcagcagctagtaccaggtgaagtaaggggagaagagggccaagagggaaacccaactaaagccaccaggaaaaagaaatctccattgtgggatttctttgaagaatgcactgtgccatcaaagaagaagaaaggagaaatggaaaataaggtcaaatgtaaggcatgtgaaactctgctcaccaagaatagtagtggcactacaacacattggcggaggcatttagagcagtgtgattatcacaagcttcaacaaaaatccataaaacaacataatatcaatttccctagccttgatgaaggtgatgttgatcttgatgctccttgtgtttctgtccctggttattatgatactacaaagatacgtgagcttatttgcaaaatgatcattgtccatgagttgccattttgccttgtggagtatacatggtttaatgttttgctaaagaggctaaacccttcttacaaaaaggtctctagaaataccattagaagtgattgtatgaggctttatgaatctgaaaaagaaaaactgaagaggactttcaaagatgttagaaagataagcctcacatgtgatctttggacctctaaccaaacaatttgctacatgagccttgttacccactacatagatgctgattggtcaatgcattgtcgtgttattaactttcttgagttggagcctccacatactggtgtagttattgctaatgccatttctgattgtcttgcttcatggagaattgaggacaagatagctagcatcacatttgacaatgcctcaagtaatgacagtgctgctaacctgttgcttgccaagtttacaaaacgtggttcactttggttttatggaaaattccttcatatctgctgttgtgctcacattttgaacttaattgtccaagatggtctggctgtgattaagcatataattgacaaagttagggacactatcaagtacatcaagaaatcaaacaatccagcatacaagttcagtgctgatattgattctctcaaccttaaaagtgacatgggtttggctattgattcctgcacaaggtggggctcaaccttcaaaatgctgcaatctgcatttttttataggtctgccttggatgtatatgctgcaggagatgcaaactataggtggctgccaacaccagaggaatggaatctatattgtgaagtcaatgatgccctttctgtcattcatgcagccactgaggagttctcaggttcaacctacccaacatctaaccttttttattctcacattgtcgatattaagagagtactaggtcagttgttgaagtccaaagacccaattcttaaataaatggcaaatgcaatgcttgaaaaatttgagaagtactgcggcccagaatgcaatactttgtttgcagttgctttggttctagacccaaggtttaagatgggtatgattaactacacattccctgctttgtatgaagaaactgtacttcctaagaaacttgcaaatgtcgaatccacattgaaatctttgcatgcatcatatgaaagtgaactccagagcacatcaaaggaaaatgatgccaccactcaatctactagtacatctctaggcactactagtagtcatttctctgctgctagccaatttcatgagtatatgaaatcaaagaatgctgctagtcttcctaagtcagatttaaagaggtacttagatgatcctgttgaggatattcctgcaaaaagtttcaatctacttcagtggtggaggatgaatgaattaaagtatccaattgtggcaaagttggccaaggatattcttactattcccatcacctcagtctcatctgaatcagctttcagcacagggggtcgagtgattagtgattatcgcagctctttactcccatcaacagtacaagctttggtgtgtacatctaattggattagaggaggccaccacaaaagcacagatttagtaagttcttatattttcatgtttctacccaattaatagagatacacaatctaataatctgtgtttacttgtttgttgcatactaggaggatgatactaattctattatccttgtcccaactcaagcttcaactgcaaattcggttgtgggcagcaattagactcgtttgtcaggtatatgtttgaggttatataaattatctattgctaccatatcaattcctcatcactgatgaaacattacctataatctttgcacatggtttcagatttaactttacgaaacattaatgcaggcatatagcatagcatcaacaattagtttgaagaaagtgcttggaggtttcacattggcgtactgccattgccaatagtggagtaaatattttgtgacagttgaaatttgaagtacgctgtgttagtagtataagtaatatttagatattagagcttttagatggaacatatgttgggaacttccggtgggctacttttgatgttaattgatgctctatgttctgtcaagtcattgacacatgatattgtaatgtttcttatggtgttatacacaccggtctattataaagtagtaatcctattatgacttatgcactactatgaatttgtaatctttctagtatatacctgtcgagaagctattatattctataatgaatttgtaatcctactttggcttgttaagaagcttttattgggagataagttcagattgctgaaggaaacagtcttaacgagcttctacgaattgagctcgagtcgagccgagccttgatcgggctcgaaccgagcctaccttcaagctcgaaggtaatgctgggctcggctcgagctcggctcgagcctgtaccgagctcgagcttaggtaggtaagctcgctcgagctcggctcgttgacagccctagtggagagggggaagaagaggctgacacgtgggacccacgctgagccagctgccacgtcagataaaaccggagttaaaaccgccaagggacctactttacactggttctgtaagttgagggatacgttagtatccggttttgcggtttgagaacgattttgtaactcgatgacaagttgagggaccttcggtgtactttttccttgttttccactggcgaaacttgtgtaataaaaccgcgacatctgggacgttgatcgccgatctgacggctctgcgcgtgtctgcagccactctacaagactacaactactgccaatcccggcccacgggccaattcagccgcgcctctccgtgggccagaagatgctgcgccgcctaccgntccgcctcgcgccgacgctcgcgnncgncggcgncnggcgccatcccccaccgcgtccttcgcggcgcgtgcaccacngcgcaagcctcaaggccnccgccctacccgctctccccgtcngacctagacgccgtctccgcgctcctcccgcgcctggtctccgcggggaacgtccccgccgccggccgcctcctcaccgccgcgctcctcttcccgggctccacggagcgcctcccgttctcnccgctcgccgcgcacctcgcctccatgcccacccttcaccccggccttcgcgctccttcaccgccaatccngccaccacccgctccgcccctcgccgctgcccctcgccacgccgctcatcgggccacctcctctcgcgccgccgcgcccgcgaggccgcctccgtcgtccgctggctctgccgcccggactccccgcagcggcccgacagcgccaccttcgctgtcgccgtcgcggggctctgccggctcgaggaccccaggaacgcgctcgccgcgctccgggagatggccgtggacgggatacggacctcggcgaagctgcgggagtcggtgcgggacgcgatgctgcaggacgcgaggatcgaggaggcgtgggcgctggaggcggcgatgaagcagccggactccggcaagctggctgagctggtccagaagcttctcgaagagtgggaggactgagacattgccgaggtcgaaggatattggttctcccttgcttctcgatcaaggtagaatttcccaatgcatttttcttcgatttgttcaatgtctagtgcaactgagcatgtgatgttatcactgagaaattaattagtgaaatactgatatactccatgtggtgatatgatctttgatagcatctgtaaattgttcgctgagcagtcgataatcgtgtcaatgcgattctctaaattttcgcaaacctgaaagcttcacctgatagagtttgcaaatgggttgggaatagcatatctatgaaattgtgtcgacattagttcagattgttgcagcatgagagcccagaaattcatatggtggagctttcgcaacaattttgcagagtttcttgaatccaaatacgagaagctgattttgctacaggttgatgtaaaaaatggatgtgcagtttggtgtaaaactggatgtggtgttcaaattttgcaaccataccaaagcatacttttcattatgaaagatggacaccggtgtcttatctatgcacaattcttaaaaaggaatagtaagaaaaagaggcaaatggtcagacctactagtagttatatgagggtatcgtttgttgatgggaactctctgttcatggtctgaaaattaacacaggcaaactttgcattcttgcaggcacaacgtgttgaaaaatggacttttttcagaacaaagaacagacagttctccctaaacagagagtacaaagcttcgggtttataagaacttgcaagattaggattacaaagcttctagtttataaaaacttgcaagattaggattagcgattgatttatctatcaaagagatgtttataagaacttgcaagattaggattagcgattggtttatctatcaaagagatggtttataagagatgataagtcacctgtacaatgtcgtgattctattcttttagggtgtgtttggataatgaaaaatgggggatgggattagaattgggaaatgaatgaagggttaagattaaatgaaagagggagaatgaacagttacgatttaaagatgtctttttgtaggtgggaaatcatttccctttcccattagccgaacactgccttagctgaagtcatttgggttccacataatttatctacatcacagtggctagttttataactgactggaacttttcgcttagactctatttagtttccaaaaaacatcacattgaatctttgaatatatgcatgaagcattaaaatatagataaatgcaaaaaaaaactaattgcacagttagggaaaaaatcgcgagacgaatgttttaaacctaattagtctatgattagccataagtgatacagtaacccacatgtgctaatgatggactaattaggttcaaaagtttcgtcttacggtttccaagcgagttataaaattatttttttcattcgtgtccaaaaaacccttccgacatccggtcaaacatctgatgtgacacctaaaattttttttttcacgaatgaattgaatcgcaaaagctaaattgcatgggccggagtcttgtcttctgaattattttttcaactcctggttaccttctggctgacaaggctttctttgaagcaaatcacaaaagctagggtattgatttacagatgcctcaaaatctgaggtttaacagatgaaattaccagagagtggcctgcgccgagagtgggtagtaccagaacttttggcctgtttcgtgaagaattttgaggtaaattgggtgtagagttgtaatatgaacatcatttcaaccgcgctaagcctctcaataagaagagagcaaaagccaggacaattgagcacagtttcagaatatcccagtattattgagaataatcacgcaaaattggcagacaatctggtacagtaatgcaaaaaacgtttaacttgtttgcaaaagcacaaaactgccaaagtacaaactgcctaacatcaatatcctctgttccagcgcagcatttatcaagcaaaaagaacaaaaacatccagcatttcttttctttccagatatacagcatgagaactcttcttacccacttctgccccccttggcttacagaaaagggtagggacgaacacgcaaaccacaatctcacaccttcaatgagattcagcccggttccttcaaaaacccaccgaacgagcaccatccttcgcacagtccgcatcgagcacaagaacattttttcttcctcgagcgaccaaagattaacgaggccagccacgacaaaactgatgcaattcaatagaaacagcaaaaagggaatgtgtaaatccttaggccacctactgaagaactaggcatgcacgccatttccattgggataatatgttccattggaaagaccattggcaagcttctttgcgtgcccattttggtgtactgtagatgtgtaagcaccattgctcagagaatgtttagtagaaaccacgtggccattgcagctgccttgcagcaatctatccagttgcccagatgaggcagcaattagtcctgcaaaagtgtagtgatgattaacatgtagtttcgaaagcttgtgtttacactttacaacacaaagtacaattaaaaaggttcgtgaacaagcatactgaaccaaactacaagcagaatattatttggcatcttaccgacaaagagtggagacggttttgaaggtcttgacttgaattcaggatggaattgtgcaccaacaaaatatcggtgattggggatttcaattatctagaaatagcaaatctgtcaagaggtaacagtggcaaaaaaggaaaaatatttaagcaagtctcagttttagtcgaacctccattctccttccagtctcatctttcccaacaaactgaagtccagcattttcaaactctggcaccatatctggattcacctgtgaagttgtagatgtttcagtccatgttacaagaagcaaataaatcgaaacttataagagcttaaagaccatacaatacatggaacatttcatagcatttagatgtacatctatgaaccgacacaatgtgatcaacagacctcatatctgtgccgatgcctctcatctacataactgacattgccatacctacagcagaacacaattatttcaggggatgcaacaaatcgcaaggactcttaagcactggggccataatggttatgcagaaaggcctatatgtgcactcacaatttagcagacttgcaatcagcaacctcgaaaaatgtcctccttgatcctaggcgcatcgtgccacccatatgtgttttagaaccctgagttaacatacataaagatttaattcaagggaaggcagtgggaagttgactttaaattcaaagaggttcccaaaataattacctcaggcataaaaataacacatggggtcttggcattgggatcaaattctgtgctgtttgcttcagggagattcatgacacttcgagcaaattcaaccacagcaagttgcattccaaggcatatgccaagatatggtacattgttttcacgggcatacttggcagccaaaatcttcccttgaatacctctatctccaaagccaccaggtactaaaacaccattggcaccctgagatgacaaccgttcataaaaccatgacaggcaataatttatccattataactcatatatgcaacagcattacaagtttttcaaaacgccaaaataatttaaaaaaaaccttaccttcagtaaatcccatgctgctttataagcatcaggcgcctagaaatttagcaaggaatgattaagaaaagaaaacagctcaaattggtttgaattatgctgctactgcctaacctcaatggcagtggagtcttcgagatcagtagaagcaacccaatcaacaagaagcttcctgcggcaatcaacagaagcatgcaagagtgcctacacatattacgcagcacactcagatattagaaaacaactgtcaaatttataaaatacaagcatattatcaccatggtaatctagctcaccttcaacacagagaggtatgaatcagatagaccagtatacttcccaaccatagcaatcctcacctgaaatgagagcattagtcaatgggaactaagaataaaaagaccaaatgggaaaattgaagtaagaaaaaactaacagtatcctgaagtgcatcaaataacgtagctcttgcgacccattcatccaactttggcccccgagcaaagctgcaagtttataaataaatatccaatcgcatcaactgcctcaatacacaataatataggttggggaaaatttaaatgactagatatatcgacaaacctatcaaggttcagcactttaagaatggcttcatgtgccttttggtcctaaatggcagaaatgagatatgcactgttaaaacaggatgtgggatacgccaaaaaagaatttttttgtaagggggaaaagagagatgtgacgtacccgtagcaacaaaggaatacgccaaatgttggaaacatcatacagagtgacaatgttagctgcctgcagaatgccaataaataatgagctaacaggagcagttttagctgccaaagcttattgatcaatcctgacaacataagtttacagtacattaccggtacatggcagaactgagagagtttctccttcacattttcttccagttcctgataaataatattgcagttcaagaaatttagtcttaagaaaagattcagggactaccaagatacagaataaaggtaaatgaaaattttcagctaaccttagtactgcgacaggctaaaatatttggtgtgagcccaagaccccttaatccacggacactatgttgagtcggcttagttttctacaagagtaaatagcatagatgtagaggaaattgtcaaatgtattgcgactgcaccaacttaccaaaataagaccataaaagccataagatggattaataaacagtacaacataataaatgaatcaacagtgtggtacctgttcaccaacaacattcagaactggaacaagactaacatgcaccaaacaaaa

SEQ ID NO: 4318 - DNA, 8457 bp, Oryza sativa
gacttctcgatcgctcatgcttgtccacgcgcgcgcgttaatccccggccatgcccgctgactatgaaaatttggaaagcatcaactaaaattagtgccatgcatgtcagtttgatcagagatttggaagggcgccatcaacagccgagatccatctacgcctattgccgcatgtcgacggcgtcgtcacagagcacttgggcacggctgagctctacttatacttgccgccacatgcggacggcgtggacacagagagagcacgcgcggtcgaactccatctatgcctactgccgcatacatatagtgcttgcgaccatcgactcgccaacctgccgcctcgcatggtttcgcatctggaactcctcccgtgcagtatgctctgtcaacaccatcgtcggccaccatggtaagagcaagctttattattgagaagaaaggctcgcgggtagtgctgggagagagaagcttttttaactaaccaaactcatcagcatatgttgcatgtgctgtaaacgggagttgagaaggtaagtcttgaatgcttgcatgcatatgtattggaacgaacaaaacttcaatgcttgcatgcgtttaaacggctgccgaggaggtgccgccttatattgtgggatttgagaaaaaatacaggtgccccctatattttgggatggagggagtactatagtactagtgtctatctagttagatgatattctcaaatactggtacataaaaaattttgatcttgtgctctgagcgatggctaatcgatggcaagaagtggcgacatcataagggttggaggtaagaagatgagctcgactcctcatcaccagtttattgtataaagatagtgacaatgggctgagaatggtgtgaagctaagccaagttggtactccaaaatctccaattttatgttgtttcatatctttcgcattctcgttaagtatgtgggtttagtggatgaaaataaagacaattctatccttgttcaaatgagctatgttcacaagttgagttttattttgctaaattatcgaggcttgtacgactaataataagactgtaaaatgttattttaataattatgacatgctaaataaatgtaagacttttcatgcaaattttgcgtagcatcttatttgcataattgttgcaatgtggtttttgaattgtgccatgtgttattggtcacactctggctatgacacatttacaattttatcttggatccaccactcaatcaatatatggcatattttttcttaaaaattactatgatctaaaaaaactacaaggactatagattcatttttctacaccaatttaaaatagaaacatagcgtgacacaacataacaaaccaatgcaaagtttgatgtagccactttccaatttctagctaaacgttgagatatataaccattcgtatcctagtggctcaaatttttagcgaggaagcttgattaagaaacttaattccacaaaatatatgtaaaattggccgattaaatatgaaattactatactacgctaagagtgtgttatagctaaaacgtgactcaaagtagtaaatttttaactatgagggcaaccatcgtcaaatacccctattgagcctgttagtttttgaggacgatataactagaccgtaaaagttttgctatgaatgcgcatagttaatgcacactcaagatactttttagtgcatccgctattaaataaacacatattttaataacattgattttgtacataatgcaaggacaaaaaagaatatttgttccattttatatattataacgttttgatttttctttaaaagtgaaactttttaaaatctgtccaagtttacaacatttacaaccctaaattattttaagtaaatctaatactgaatatatttttgctaacatgtttgttttatataataaaaatattaacatatttattcgtaaaattaattgtaaattgtaatatgataacaaggcccaacaaaccgttttccaggcccatgatagcacagcctactcgccctgccgccgcccgctgatcccccgactccccccaaaacccacgccgccgccgccgtctcttccctcccttctccgccgcagccgccgtatcccccctctctctccgggagctgaaagcgcccgaggaggagatcaggtagcctgtttattctcacccctagtatcccgacgcatcttgttttcttcttcttttttcgttacattttgtggtgggtgtggacgttgtcgcaggttctttggccatggtgggctggcgggcggcgggcggcgctcgtgccgttcttcgccggctcagcgcggcggcggaggcggcggcgaagcaggacggccgtgtgttcgctgccagctatagcggcagcagtggcggcgtgaatgctccgtttggcttgggtgcgttcccgtttgtctctaggtcttagcttttatttagttttgaacttatacatgatccgaatgctcatcagaagtacagactttaggtgatttatagttgatgttgataagaatgctgaattttttaggataaatcgcgttgtttctgttaaactctagtattaattttggattcagttgttattacacccttcagtatgtgttttttatcagtcgcactccgcattggtacttgtagctttggtactatcagttctttttataagctctgatataatttgaaatgatatggtgtgctgtcaagactatgtatttggggggaatggctgaatacataatttcattttgcttaaagctcttctctttatttcagtaattagtatagcgagaacattttggtcttgatattctcgttacgtgctaacaatgactgccaccatgtaggccaatatgcaaaccttttgagggcacaagcttttgcatccaggggagtcgcgctgaacttccatcagctgatccgcaatgctgtaatgcactcttccccatgtggccatgctacttcatcttcttttgcttttacatttcttatctctacaagttgatctcctgttagaactaaatcaatccttttacaattgcctatgtatgacactgattgaattttgaagagcacctcgataagtagctgattttgtgtctgttccatattggagccacatgtatatatgatcacattgcgttgctttgtaatggaatatattttgcttgttccgtgtttgacagaaaattaaattaactgaacttcggtcacactcttatttacatgggtatttggctcttttttttttctgtagggaatatctaccacaaggaacctgcttgctgcagatgatgctatggttcctgtttcttctcctttgacacctccacttggtgatggagaacaaactgacaaaaagggagcaattgttaagcggctgaaggtccaagccatcaagaaggatatcaagcaggtgaagaacaatgaaatactaactatatttccccctaaagtgattacatatgctgtcaccagcagtgaaagtttgaacgtgcagtgtgtcatgcctttgctgcattaactcttttatgtatcctctaacatgtttaaatgagactttcaatggttagtggcaaagcacatttaaaagtaacataatgaaagcagcaacatttcaatgtctgatgccccttttttagaagctgcaggtattgtttagtatatgtttttagcttctcattcataacttaatgttatatagttggtacaatcgtagtgttcactgagctgtttcctagttatgatcctgcttgattagagtaagcatatgttcatgtaggttatcaatatatcgagatagtagtgtagcacagactttctttatcttgtttagtgcacatattcttttactactatcatcaatagatgctcatctctctattttccctttttggctgttttagagccccaagaaggtgaatctggtagcaaagctggttcgaggaatgcgtgtggaagatgccctgttgcagttgcaagtgacagttaaaagggctgcaaaaactgtatatcaggttctgtagttaacaaaattttgtcctgcaactgctccttgtggtagatagggtcaggtgtgaccaatatttttcatgatcattcctttctatcaatcactgcaggtgattcattctgctcgtgccaatgcagctcacaatcacggactggatcctgataaacttattgtgggtaagaccttaagacaacatccatctcccccttagtccctccaatagtcattcgtaatggtttcaatctcattcctttctttccacttacctatcataccacagaagaggcttttgttgggaaaggactttacctgaagaggttgtcctaccatgccaaagggcggtgtggcgtcatggtgagaccgaggtgcagactgacagtagtggttcgagaggctaccgctgaggaagaggcaaagatcgcgaaactcagagtcagcaactataagaagctgaccagaaaggagaagcagctaatgccgcaccgtcttatcgaggttagccccgaggtgggctcgcaagaggaaagaggaggctggtgctgctgcgtagcatggcttcccatttgcaggatgtctgccttcattggccttgaagcggtgagtagccgcatatgctgaaatttacccaagaacaattgtagctctctcaagaatgaattcaaaggtctcatttgtcaggcctgtctttgttctgtttgtttcatctgtatgaaatttgtctcatgaagcataggaaactgtggcattgcccacgattctactcagaatgaataatgtcacctctgatattttgttcggcctgcctatttttatagttgtcttcgctgaagatccgtattcaaagttaaactattgttataatcacaagtcagatttgttaattccgttgatctcggttcatggaatatggtgtgccagtttcgggctcctttggaaaagaggaattttcgcgggaaattttgatgaaacaactaattcctataaaattccttcgttccaagaaagccgttgaccaatttacatgacatcaaactacaacagttaccggaaaagattcagttgaatttcagtccatcgaatcaatttcactagtacgatgactgactttgttcaagcaaacggtcacttttgatccactgaattgtatacaaaatttcctacacaaatatataagagaaaacccaagaaatgtcattgacaaacgtccaagtcctacaaatgtcatcgaatgagtgcgagtttcatgaaatgacatcgtataaacgaccttgtcccagaactatcatcgccgttagggtcatttccatcttgcgtcgttaaatgcattgtttctcctataacacttaatgaatggatgctaacggaaccctaacggtgatggtatttttggaacaaattcacttatacaatgacatttcatgaaacttgtacttaaatttcttagaattgtgcgcttgtcaatagcatttcttgaattttctcaatctgtaaacgcaaggctacaatatttgggccgcaaaatagactccaggccttcaacacgggcccgcctcctcccaggcctcaaaattcgctcaactcgcaataaaatttgccaaaatttggcaaaacccggaagagtcgcggtgcctaaaccctagtaccaaaccagaggtcgatccggttcccagccatggccaccgccgccgtcttctccgcctcggcccgccgcctcctctccaccgtcgccggcggcgccggggccggatccgccgccgagctccccgtcttgattggccacctccgcagcctcgcccgcgcgggccgcctcgccgacatcgacgccgccctcgcgccgcacctggcgtcccactccgtcgcggcggtctccgccctctcctcggtgggcctccccgaccgcgcctccgcgctcctcgccaccatccggaacccaaccgccgcgcacctcaacgcgctcctggccccgctcctccgccgccaccgcctcgtgggcctcatccccaccctcctcgcggcgcacccctccgtcccgcgcgacgacgccacggagggcatccacgccaaggccctctgcatcgccaccggcgccgactccgcgctccacctcctccagcgggagtcgccgccgccgtccctccagctcttcaccagcgtcatcgactcctactataagcagcgcaagccccaccgcgccgagcagctgtggcgcgagatggtcgaggaccacggcatcgtccccgacgccgccgcccacaacgtcaggatcacctacaaggccgccaccggcacggtggaggaggtcaaggagctgatccgcgccatgcgcgaggatgccggcctccagccggacatcgtctcccacaacgggctgatgcgcgcgatggcgcggcacgggagggtggacgagatgatggaggtgtacaagaggctggagaagggtagcgcctccgccgcggcggagggcaagtcggcgccggactgcgcgacgtacacctgcgtggtggccgcgctgtgcaaggcggggcggtggtcggaggcggacgacgtgttctacgaggcggtgaagcggaggaagctggccgacctcgggacggcgcgcgttctggtgcgaggcctcaaggaggccggcaaggggcgggcggcgaggcgggtggtgatcgggctgcgcaagaagttccccgaccgcttcgacggcccgtggaaggatctcgaggagttggccgggatcgccggcgaggatgaggagagcgatgtcgaaggggaggacgacgagcagccgccggcgacgacgacgaccactgccgcgtgagctctcgcagtaatttggtcgtgttcgtggttttagcaaatttgcattcgtggtaatacgaagaccatataatggtttaggattttagggctggatcaataagaagcaaattctgaggatgcgagaatcactcaaattttgtcaaactagcttcttgaatcacaccataaaacttctttaatgtgatgtctcgttgtaatgattgatcttgtttctacatctgatggctttgttttgtttccactaatttcactcacaaatacttttggatgctgctggctatttggtaattgccaatttgatcaaatcatgcagaaaaagctactccatccgcactaaaatatacatgaccggattagataggctccctgtccacgctctaaaatgtacaatcgatttacgaccggattagataggctcgttgtccagactattgttactgtcaaattcgatagtactaggattctagattactgccaaattcgatactagattgtcatttacggctgggttggagtattagttcgttcttaggttaaacacatctcccatcctcgaacttggcacggtaagtttagttttgtgcctacattagagaggaagatggcaaaagcttacgcaatcgacgcttaattacaagttgttgacgatgtgagtgataatgagttttctgttagaggaaatgcgccatgtttctcacctttaagcgcatgttaggatatcttgctttttagcataagctgcacattgttttctggaaaaagtacaccgaagctccctcaacttgtcatcgagttacaaaatcgtcctcgaaccacaaaactggataagtagatccctcggtggttttgactccgattttatccgacgtagcagctgactcagcgtggatcccacgtgccagcctcctcttcactcctctccacctctccctctctcctcttcttttctcaccagcagaacagcgacagccggcgggtggggaggtccgggaggaggccggtgggggaggcgggagtccggcggcggcgggcccgcgcggatggatttgggcggctgcatcggcttcgcggggggcagccttcatcgccctcttggcgcgggcggggcgaggggggaactgcgcgccttcttctcccacttggcagacgccgccgccgccgacgacgcggcttcttagcggcggcggaggggcgcggggtcctcttcctcttggcgccgacgacgcccttggcggccgggctgcgggcagcgaagcagagacaggcgagcgcggcggacgagttcgccgttcagtgagggaggctgccgaggagaagaaggcgacggcggccaggtccaaggccaagacggccgccaaggccaaagctgagcaaagctccggccgcgaccgcgagcaagatgaccatggagccaagccgctcgcgcctccctctcctccaccacttctcgctgctcgcctcgctgtgttccgcgcggtggcgagacgacagccgcggcttcctctggtaccccgccccgcgcccccctcggcgtggcccgcttgctatcgtagtctacgctcatgacgagacggccatgtcgctggagcaggaggtagagctt

SEQ ID NO: 4319 - DNA, 9005 bp, Oryza sativa
atatatatatatatatgtgtgtgtgtgtgtgtgtgatgaattcaaggatggtactttatgagatatagtactaacaaaagtacacgtataatcttttttcaaaatttttggtaaaatttgttagctggtgtgtacggtatgtatacaagaaagcttgtgtatataggataagttcccgcttacagtttgctaacaacatctttaaacaccaacattgtggcatgttcatcagggtggtcactagtcaggccctaggtctactatatatatatttttaaaaccatttaaacactttgttatataattaagacatagttcagggaaaaatcaccagtacatcgtcaggatgatatatagggtccgtttggcacagctccagctccacctcgacctctcctggagctagagctcagccaaacagtttcagttccacctaaaatagcagcggagctggatggagctctctcacaaaatgaacagagatgtggagctagatttaggtagctccacaactccactctagatccaactcctgtaactaaatttagaagttagaactctaccaaataggctcatatatagaacaaaagcatagagccactctttgtttctaaacttccatatagcataaaacacatgagttcttttttttttaaaaaaaaagagagcatacagccatccttttcaaaaggaatgtgaactgaacaaaacaaaccaaaggcaactatagattagggatgcaatatagtgtaaagcacgtgaacaaatagcatagccactagtaaacctatatagcaagctaaagacaactatagggagatctttctcgccaagactaagaaaaaacaaatcatataaaaaatagtctttttcaagataaaatgaagcacaacacactacgactttacaacacccgtgaacttttatagggaaagatggacaaacatttaatatttttttaaaaaatgctaagttcaatctctatggtgataacacgaaaattttgtaagtcgtccactagcaagcccgagaggttgctacatggtggatacacagattatggttattgtacagaattcttagcggagaaacttaataccatgataacgatggacgcgtgaatttctaaagcccgagtgaataacatgtgtaaatcacatcaaaggcccacgctagcattgtggctatttacaactaatacctccttccaaaataagaccatcattgtttttccttatttgtcttatttgtttcaaaatagctacattttcatcttctgctttattaaatcataatacacctgttttccactctatctagtttcgatctatggctcatcatcggtgagccttggatcgatcgtacgcgcatccatggctcaaaaggtcactgtccaaaaacgctcgatccatccatgaccgtttccatcgtcatcatcttcgccatcgctcgtccataaagcgagaacagaaaggacgccctctttaataactgccacacagtgccggtgacgtcacatccagttcagtagccagcacagcacagggggtgatcgccagatgcagccgccgaccgggccggccacgcggcgcaaccaacgggcaggcagccaggcaaacgaacggcgtcgccgccgccggctgcccggcgaggcgaccaggcgattgcaaggctgccacgcgttataggctctcggcccgacgccgtgggatgtaaaggcgccacttggggtgcaaggcgaagccggtgcccgtacgcgtgtaccggctgcgcctgcaccgcacgccgtgtgcccgcaccgagaaaatggccgcagccttagccttcgaaggtgactcgagctcggacaatggccgtcgacggtaaagaaagctttagagagagtaaagtatgtctaggagttatcgcatcagatttgtgtcgagtttgagaatagagaaaaaaaagggagatgcgtattagaccctgtgtatagatgggagttaaacttatcagtccctatcacatcagatgtttggatattaattataaatattaaatatagattattaataaaactcattctataaccctggactaattcgtgagatgaatttaatgagcctaattaatccataattagcctatgtgatgctacattagacatgcgctaattatagattaattaagcttaaaaaatttgtcacgcgaattagttctcatttatgtaattagttttataagtagtctatgtttaatactccaaattcatccgatatgataggggttaaagtttagtcctagatccaaacaccaccttagtcttacatatttataaccagctaaagtaaaaactctaacaagctttatgagaaaaaaaatattaaatctatagataactattatataggtgagcgaccagatttttcttttaacctataagctactagattatggttgtagatgatgtgctaaattttataactagaaatcgactatcctattaaatttgctcttgggagcagtgaaagaatgaagacgtccacatgaacgcatagtaggtctaatttggaacgaacaattaaaaaagaaaccacatagattcattctattttcataggaataaaaaaattgttgttcaatgatactagtgcatttaccaataatctactgccaacttccttttcttctttgttctacatattctccacggtctccaacgtcaccttgaaaattactatacctctaaaagaataacgttttgacaatgcacgtgttttaccattactttctcaataatatatatttatagaaatataatatgaaagagttgttcataacaaatctactaattaaatactcacattttaaatccttttttcccgactattaatgatttaagattcaaggtttggttgcacacattcaaagagtatatattttagtatcctttttgacaacagaggtagtatatattttagttagatatgctcaacaaagtcaataaaaaaatactatagcatatgatgtcacctgcacatgaacgcccaaaccgaaaggtgcatatactcaaaatgcatcagctaaaaccactaaataacagggaatacatcagatgccacagagatctacaaagacgacatacctacccaagtagtgcggtttcatgtttaattcatatgcgaggaatgaataaggcatggatttaattcggccttgcgtcaatatatttgtctctcttctcagctccctgaattcgacaccttggcgatagcctcctgagggggtgggtggtcgaacttgcactgcataccaaacttgcacacgccagtcttcatgtagaaggcacataccacggcatcctgcatatcagcatatgcattagtttaggcatcaaaacaaatgctatccaggaggatattcatacatgactacattccgagaatgcatctatgtagctagatgaaagggtgaacaagtgataacacctcttcttatatgatgatgaaaaaagcaatccagggaacatcatcaagatcgttacaatatgcagggtgacggttacgatatgcagcttactatatcatcaagatcaatgctaacgggagaacatatgtaaaaattgaaaggactgcagcccaaaaatagtaagatcattggaacgagcggagtagccaaggtattaccgacaagctttgaaatgttacctctcttcttggtaggccagcaagagtaagctgcacagactcctcagcaggctcccagtttgcagagggatcgggagcagaacgatcaattgggtggtgaaacttgcatcggtcagcaaacttgcaaaatcctgtcttcatgtagaactgcattaagaaaagagcataacgctgtagaggcacacccagactatatgcgtaaagtagttgatatcaatcagctagttaataattcatagcgaagagactgtcatacatcacaaacagttgctccaggcctctggggataggtgactggcccaggtccaacctgcattttacaaaagagcatatcaacttgtgtatctcacagcacctatttccaactttaatttcctttgtttactcttacaggcatgtgtgccgcatgaaaatcaaagccttgcatgaagtttgcagatgaatttagcagcatggattccggagtagggagaatggtttgacccagtggaagtggaaaatttaaaactgcattgagcaccaaattaccataagaatacatgtcgagtcataagattcaattcatgtaagaatcatgaacactatcagacttgtttaatttagatgcaataacagatatggcagaagagtgcggctatcagattgaaggtgttaagttcaaggcatggacagttttgaacgttgaatacaatacaagcttgtttggttcatatggcaagttctctgcttgttttggctttaaaggtacagtagaaaggacacggtcttaaaaataatgtgtccaaaaagaagaaaagaaaaagttagtaaaacctggttagtatttgtctaatgtcttcagtattccagtcaaccgtgctgcaactcataacaagatctgatcatttattcatttcataatatttacatcagatataagtagctttacattgccccatacttgaattaatgaattttaagaaccttgaaggtacctagagaatgaattcattccttctcttattctttaatgcattgtattccttctgcctcgcagtataagaaaccatgcagcggcataagaaaaggttaatggcaacagataccaatttctattgtactgccacatggacttgggatgaataagctgaggtttggtggataataacagattagaaggaagacaggagtctggatggatcagataaaacagggagaaatagaagtagaggtaaataaacttgtttattccttgctgccaactaagggttgtagagatcctttttcatagccacataaacagataagttcagccaatgcatcagctcacaaactatatctccaacagataagcctaacaacgtatctgagaactaacaaactaattgttgagaaacagataaaaatacacaaccaccaccactcaagctcttttacagcagagaagtagggggtgcaaccgagtggaaactatgccacaagtacacccttgatttctgcaaaatattatgaaaaaaatgatcctaaagaaaatgcactaatattatgaaaaagaggagtacaaggctattacgtaagtgctctatccaaccagggcaaattgcaagttaaattatgctattaaatagacgagcagctagatgatggttgccacgctccttctgagaagtggaagaaggccaaaaggatcttaactacctcaaattcatgtcatgataaatttaactttgtgaatatggttagttgtgaccatgagtgacaaacctagacgatcaggatggttgaatcgacaagtagaaccgaacttgcaactgtagagggacaaaaggaaatgtgagattccaagtatctccaaactcatgcagaagtgccaaagccaacagaaaatagtgttattctgcttaaggggatacctgcccatcttcatgtaaaaaggacaatcaacttcaccctgccatgaaggagaagagaaggtattaaacaaaacaagcaaaaggtatttcacctagaatcatgtaaatagacaaaaagatttcactatatacaccagtatattgataaaaaattcagtcttatcaataccccaaaaaacagaacttgttgagagaggaattatgtaccaaaaccatgtaccaggaattgagtacaaaatacagatgtgcggaatctaagcatagagcatcctcaacatcgttatcttgcattacataattcacaggtcttctcaaaatggtttacgaatgaaacaaagttatcaggcacttgataaggacatactggtctcataggcagccctttagagttaaactcttgcgcagcagcaactggagtttgcatcttcgctgaaactgaatcagctgctgaaccaatatccgtttctccttcaacagtcactgcactttcgggttcattttgacttgaaggtatttcaatatccttgggatgattgaacttacacattgcacgaaatttgcatttgcctgtttttgcataaaactgaggtacaaaagcacaactgaaaatcggtttttaagcttgatgccatacaaaaaggaaaagaaggtgcagtagcttcttacagaacaaagtggctcagaaggcctcactggtaagatagaactatcagcaattagatgcttctgcaatttcataaaagagcatacaggttgagacctgagcggttgagatgatgacatgttagtagtctagtaagtaaatggaaacaacttacatcattggtatttccagacgctaatgcattaaccttttcctttggatgattgaacttgcatttcgatccaaacttgcatttaccagtcttcataaaaaactgcatcatcaagaacaacattatgagcatatttgtcatattgattcaaaaatagggctatgaactgcttacaggacaatctggttccccttcttgttctggataggattcttcaacatttgcagcctgctaagaagttttaagaaagcaaaccagaagggatgaatttggaggataaaaagacacaattacaaccacaaacatcacaataaatatttcggaaaccttaaaaacaccaaattgcataaggtaattaaccagagccagagcattttattaaaagtggtctagaaaaaatatatctactgaaaactgtagtcgtgtcttttttataactatatacccaaccccccaaaacactcaattccgatgtttattggcagttgaagacttgatgtacagatgggcattcatcaaaagattaaaagccaactactattaaacctatgactgtgaagagaaatgtttaaaggcaagtgtgcaaatgtttgctgattggtctacaagaaaacaagttcctctaagacactgcaatgccagtacaccctgagtcccacaccagcaatacatttgtcagatgagtcacagcatgcttcattgcttcagccagatcaaactatatattctccataaaaggaaaactaagcagatgtatgcagttgcaactgcaaagaaattatatgtcatagagtaaccaaacagtgcttaacactgacatatgcatgaacaagagccacccctaagctcaaatatataagccacatgatcaacaaagaatatcaattccatgtctttattgtgaaattcacacttgggatagtcctactcacaaatcttggctggactcctagtgctgtaaggtaccaaaaaacatggtgttgacacgaattgccaatatagcccttatacaagatcagcgtgttatccaatgcttcaaacagcagatgctaaagcaatgcagcaacaggagcagacaaatatatgccacaaatgtttagttcacacaataattttttttgtccaaaatatccggtttcctgtcacaactgtttttcacttaaatactgtcaatcaataaatgaaagctttgattcctaaattctttcttctaaggttcaaagaaacacacataattaaccccacctgcactcttagattctttctttcctttttgctactagcgatgctaacagtaatacacttttggttttcaaagtaacatatacaccttaaaaatagtattataatatacattactataaaatatagacctctataaataataacattgacaggtgatcacctctttccaatttggaatcccaccctctggaacccattgtggatggtcaaatttgcaggaacctccgaatttacaggttcgggtcatcatatagaaggcacagtccttttcccccggtcgctgtggatatataggaaggctgctttcaagcctagggcgcttggtcatagtatttgaagaatacaaagcctcaatctgttcaacagtactatggcttcccataattggctgatgatagagaactatagtagatatacaaaagaactttataagctacatgtattagacaagaacaaaagcaaggataatagtaatagtgaataggtagtaataatagtaatagtagtatagagaaaaggatcaaggatgacaactgattactgcactagtgcactacataagaaaacaagacaagtccagttaaccaaggattgagaaactatcatgatggtaaaatgacaaactgcacaaagctctcactgctagaagcacaccaagtccaaaggactaccaagtaacttccttcaagttggacgagcaacagaagcatgtcaatgaaaacaactaagctcaacctactcaaagaagatctatcagaagcttctccgactgagaagctagtgaagaagatcagtggtggagccaaagctctaactttgtggtgtcagatgcatgaaatgtgggaccaattcccatagatttaataatgttctgtaggcatatccactaatccatacatgcttttgctgtatgttgcaaaaaactgtaggggcatttcatttcagtcgaccacacaactttaacatggctcccgcaatggagaggataggttagtgatcctgaaacgcttccatcacacaggaacaaaacagttcaaccttacttgcctcagcctcagccatttttaataatttaaaaccgaccgaccacgagacaggcatggggattggttagtgctaaattatgctatgatttccacgtagccattctccgctacattccaattgaaattaaatatccaaatggagcgcatcttgcggtaaaacgaagtaaatcgtacgtgttgggatataatacaaggtaacagaacccagccacaattctctctaccaacaaaatgaaatgatctgcactaaatgctgcaaagaatcccccctcctcctctttcttgtcagcctaacaccgacaacaagccgccatagcaaac

SEQ ID NO: 4320 - DNA, 15381 bp, Oryza sativa
accctgcagagcatgaatacttatattaaggtctgttttcctgagttaaaactccatatgtacagactgcagaagctgacgctttcagccatcaattgtccactaagaagactgtatagttgcatactatttatgttttgtctgtctcataaaacttaaatactttccatgaacatgttggcattgttatgaacatgacttgtattcaccagagggcaatagcccaaatatatacacagatacagggaaaaccaaaagacaggaacatggaaagccaaaagacataaaaccataaatacaacctatctaatacacatctaacacccccccccccctcaaactcagggtggatcaacaacactgagtttggagagatagaacctgtgttgagctctagtttgtgcctttgtaaagaaatcagccaactgcaactcggaaggcacgtactgaagagcaaccacctgatcttgtacctgtgtgcgggtatacgaggcatccacaccaatatgcttagtaagctcatgttttataggatcacgagcaatactaatagcacttgtattgtctgacaataaagaagtcggtgaagtcacaaaaacaccaaaatcctcaagtaaccatcgtagccaagtaacctctgctgtcaaaagggccatagttcttaactcagcctctgcactagaacgagaaactgttgtttgtttcttagtcttccaagcaatgagggaaccaccaagaaaaacacaaaaagcaaaaagagatcgacgatcggaggaatcactggcccaagtagcatcagaataaccctgaagttgtaaagatgtggagcgtggaaagaaaagacaacacgagatagttccacgaagatatcggaggacacgaagatgactatagtgattttgtgtgggggcagaaacaaattggttcaaaatgtgcacagagtatgtaatatcaggacgagtgacaccaagataacaagactcccgacaatatgacgatagcgagtgggatcagctaacggttcaccatcagtggcagaaagatgaagattaagctccatgggagtttcaactgtgcgttgatcagtgagagaagccctatccagaagatcctgaatatacttggcttgagagatgaaatccctcaggagtaggggaaatctcaatgccaagaaaataacgaagaggaccaagatcagtcataagaaactgctcactgagacgtgctttaacaaaagtaataaactccgcatcttcacccgtgattagcatatcatccacatagagaagtagaattgtgcgactgtggggtgaagtgtgaacaaagagagcaggatcatgagcactagctgagaaaccagcttccaggacaacagaggaaaaccgttgaaaccaagcacgaggagcctgcttgaggccataaagagagcgtcgaagacgacaaaccataccctctggaactgaatagccttgaggtggccgcatgtaaacctcttcatgcaattccccattgagaaaagcattcttgacatcaagttgcgatatattccaatgatgagcagaagctattgcaagaagtgttcaaacagtagtcatgtgagccacaggagcaaaagtttcatcatagtcacgaccatgttcttgttggaaaccacgcgccacaaggcgagccttatagcgttcaagagttccatcaaagcgagtcttgaccttatagatccacttacaagtgatgggacaagcatgagaaggtaagggaacaagatcccaagtaccagtacgctcaagtgcagcaagctcctctgccatcgcatgttgccattcctgatggacaacagcatcacgataagaacgaggttcagcaagaactgtagcaacataaccatagcgatcctctgaacgaatcgtaactaaattacgatcacgaaaattgtatcgaggaggagcaaccggagaagcatccagagaaagctactggacacgaggtttacgactataaacctgggtaagaggaggcacataagaggatgcagaattctcataagaaggtgccagctgagaggaagagacaggagaaggaatgcaagcacgaacaggagtatcaggaaaagtgagaaatagaagagtcatcgggagatgatgtggagctaggacgcgaaaagaaaggacgagactcatcaaaagtaacatcccgagaaatccgcatccgccgtcctacaggatcccaacaacaataacccttatgttcagcactataccccagaaaaacgcactcaacagactgagccgtcaactttgtacgctcacgtggtgcaagaagcacatagcaagcacaaccgaaaagacgcagattagaataatcaggaggctgaccacaaagatgctcaataggaatcccaccctgtagagcagaagaagggtggatgttggtcaagtaattagcagtggaaacagcctcagcccaaaaatgaggaggaacagaagaagcaatcataagagcacgagcagtctcaagaagatgacgatgtttacgttccgctacaccattctgagcatgagcacccggacaagaaaactgagaaagagtaccctgctcggaaagaaaaacgcgcaactctatagaaaggtactcaccagcggaatcagcacgaaacacgcggatgggagaatcaaagtgagtgcgaattatgcgagcaaaagatttataaatagccaaaacttcggagcgatgagtcatgaagtaaatccaagtatgacgagaaaagtcatctataaatatgatataatagcgatgacctcctttggaaacaaaaggagctgggccccacacatcagaatgaacaagatcaaaaggacgcttagatacagactcactagaatgatagggaagttgtatttgctttccaagcttacaaccttgacattgatctaaagagacatcacctaacacagaccctaaaagaccacgacgaactaaagccgacagacgagaaccacaaagatgtcccaacctatgatgccactgagcaaaagacaccatagaggaagcagcggaagcaagaagactagcaggcgcagcgaaaggaagacgaagccagtcaaggtcccaaagacgctgagaatcacggcggcgagggccagtaccaaccaggagacccgtgtgacgatcctggacacaacaagagtcagaatcaagaattacacgacagccatgatccgtaagttggccggctgacatgagttgcatggccaatttgggaacgtaagaaacagcagggacactgaaggaagaagtagaaagagtcccgcgaccaacaacagcaagaggagtaccatcgacagtatgaacagtagtaggaactaaaggagaacatatagatgaaagactagatctatcatgagtcatatggaaggaagcaccagaatctagaatccatggaatagtacctggagcagaagatggtccctcagtagaagatgaagaaccaagaacagcagaaccaaactgtgcagaaggtagagccacagaaccaacagaacctgtcgcagcagaagcagtaaggcgacgaagtaacataagaatttcctgtgaatctgaacctccagcactcttctgagaagaaccactagtacccttcgaagaattgccacgacgtaaatccttcttcctgaagcaaaatgactccacatgtccatctttatcataataggtgaagtgaaggtgacccctaccagatggcacaactgtggcaggaggacgcgccgatgattaagaggaagaaactgtagaactaacagccggtgtggaagaagccaaagaagccacagtacgaatagctaacaccgaagaaggaagtggtagaatacccgcctctcgaagacgaatgtcctcagaacgaatctccgtaagagcttccatgatagtaacacgcggatgtcgagcaagtaactgtgcacgagtggactcatactcggatcggaggcgtgtgaaaaaatcgtagatccgacgaagatccatgtgagaacgctgacgctgacagcactgacaggtatgacaaatagccggtcccaaagaatcaagctgacgccaaatagaggataactgtgtatagaactcatccaccgtactatccccctgttgcaaggactgctcctgacgcaccatagcaaggtaaagagcatcactagtaggagcataacgatcacgtaggtgtgtccacatgagatgagctgaagtaagagtaaccacctcaccagtaagatgaatctccatactagctacaagaatagcagaagctcgagcatcctcatccaaccaagccttgtataaagcaaactgactctgataattttccatggcatcatcaaactgctctttagcctttgctctatcgtcatcagtagcttgacttgcaagtgaaggcatagttggagcaatagggcaaggaggaaaaggtagctcaccagataaaacatcccaaagacgctgaccacgcatatgaagacgcatgtgctgagcccaatgactatagttgacaccatcaaaaagaactgggcaacgaggaacagacacagtgccggataaagacgacatcatcaagaaggaagaagcgacggcgagagagcaaacagaacaagcggcagcaagttttttttttttaatgcctcagcccaaaatatagagccaccacgtgcgatcagagcacaacagtagcagagccagagaagcctttttcttttcttctttttttttcgtttttttatacctcccgatccagatccggatcggggaaacagacaccgagcgacccaggcgacggcgccctacaacccaggcggaggcgcccgcgaccagggtcgacgacgtccggaggcctacaacgaggggcgacggcggccggaggcccgtgacgagcggcgccagccggaggccagcgacgagcagcgacgggttccggaggcccgcgactagcagcgacgggttccgacggcggccggaggccacgacgaggggcgacggcggtcggcgacaagaagcgatgacagccggtgatgaggacaaccaccagccctctacactgttctgaagaaattgacgacgttggggagcagagatgaacgattctcagcgacaccatactagatcaagaggaacatcatggcttcaagatgaagaggccgataatcctcaaagaaaatcatggagaagtcgagagagaaaattataagaagacgagaagtctaaacctgctctgataccatgttatgaacacgacttgtattcaccagagggcaatagcccaaatatataaacagatacaaggaaaaccaaaagacaggaacatggaaagccaaaagacataaaaccataaatacaacctatctaatacacatctaacaggcatgtgacaaaatttgactttggtgcagaaatgacaattcaagaagccaaacaaaccatcatcggtcttgcccatttaatcaggtattagtgagagaaccgagaacctgacaacattgtctaaccataccatatgtttgtaagactgaaaggggtaattctggaagctctgaaaggggtaattctgaaagctcctactgccaagtgcaggtgagaataaatgtgacaactaatggtaaaactaatactaaaatgtttgtcaattaagtattatgacttacgaaataactcgattgaaccactctttcacggcaggtttagaggcctagtgtgtgtccttcagaaggtagggtcacatataagtctgtccaaaactaacactgagcatatgcaatcttccttcagaaggtaggttaagctaatatggctgtcccaaagcaatattgagcaggagctgtgcttacaacgatggcgatggagtaatcacggatgcgctcgtagttgtccacgatccccatacgctgcagcgccatgagcctgctgtagggattgctgtccaccacctccgagctcatatcctgcatcgcatcagttgacacatagactgtaagcttttcacacccaatttccaattcggccattccccccccccccaaccaaggggaggagggaaccaaaaccctagtatttgcgccagatcttcgtaccttgatcttggaccgtgcagcggcggccggggtcaccattcccgccacgcgctctcgcatctaagcaaacaaccacagatccgatccacaggtcaaaaccaccaccagatccacacaggtcagaagaagccaatcgcggcgcgaagtgggcgggcttacccgatcgatggcggcggggtcggggcgctgcttgagcgcgttcaggtcgcggagcagcgcgcgcagctgctcctcgtccatgatggcttggcccggcggcgcgggctcctcctcctcctcctcctcgcgtcaccgccgccggagacggagagagccgcgcttttcctcttgtcactatcgaatcgagtatcgagagaggctgatcgagttgagacttgggattttgagagtccggcggagccgacacggcggcgacgcctgacgtggcggacaaagtggagccttgacgtccccgaatgacgtggcggctgtacacgtcggagcgggtggccacgtcagaataggattagagcaagtttaatagtgtagcccactactagctccaattcatctatagacaatttaatagctcgttcatacaatagttacatactacactattaataactggtcccacctgtcatacacacactacgtcttagagttcgtgctacagctggctataaatctgtaggcccatactcttctctctccttatttatcttcttaaaatatatttacatctgacttatagcctactattgtacctgctcttagagtaagtatagtactagcagattatataaattaggtagaagtatataagcaatactcactccgtgaaaaaaaaatcaaatcctggctatactcgtccaagttcatagcgcaggatttgagttttctttttcttttttcggggtgcttgagctggcgccagcttaggggagtaataacaggattgtgggtgaggatgggccaaaaacagagcagagcaagagcaaggatggggattttaattagttttttattttatttaattgattgaatgaaatttgttttactaaaattattttttgagctctaaaagttcacggaaaatttcagaaaatgctttagggcatggagaatattagaaaaatatttccagccatgatttttaaaggaaattttattacccacgttaattcacttgtttaactcatttaaaatttaatataaattttagaattacattatttaatgatttttaatctccgaaggaaaatcaggacgtgacacttactagtaacacgtgttggacaaaaggaaaacatagataggcactatatgcattttggttttgctcctttataagagaatatattatatgccattgagtttactctaatgctttattggatgcagcataaaaattgagcttttcagtgccatggaaatcggagcaagcaattaacacatgatcaattaattattataaacttgaaaaatgggttcgtttgaatttttaaagaaacttttatacaaaatttttttgaaaaaatacaccgtttagcagtttgggaagcgtgctaacggaaaacgaagaaattgaagtttagatttggagtttaaaacggggcctaattcaacgatttgctatggactttatctccctctataatatgccactatcgagggggcgattcttcggacaacggggagtggagacccctccccgaggttgaagattcaaccaggggttagtggtgaaatacgatggaaaaggctaaacaaagagaaggtttgtggggcccgacttccccgctgagcaagagaaaaaagagtttatacaggtccagaccacccggagatgtaataccctattcctgtgttggttttgttgtttttctcatatcagctaagaacaagagacgcctttccagtctacaaagaagaaggtctgatccaaaaaatccaaccctcaatccgtagcttgtcccattccttttatagaccaaggagtggctcgcaatgttacaaatccactttcttgtgttgtcttatcaaccgtctttgtcgatgttggctggtctcctttcatagtctttgagtaacccactaagatttgaaacctatattgccccgggcacccgggcttctgttcgagacagttgggtcacgctagctaaccctccatgtggggagtggtgggcttggtgagaccgagcctgcttaaaacagtgccacggttccgtttccgcccgtttggctacttcaggtagcgcacggcatgtgcgacacacgtccaggatgccaccgatcctaatgagtcagcgttggcgtcttgtccacgtcttttcggctccggactggacgcgtgttgacggccgttagtgatcagtttcaaccgtcaatattaccaaaatagagaagaactagttatacttgcaatgcatatttaagttagaataataatattccactagtattaggtttactaaccttttgctgaaaataaccataaagtggaggagaatcgacatcaaatcagatgatcaattaatcggacgatgtcgaggatcagacttatacatgaatgggccaagaactcagaattgacacgatgaactgggccaaaattcacaagtctacggagaggagcaacaaagggagccacctgccgaagttaggccaggatggcctagcccatggttcgaccgaacccccctcgcagccgtttgatccagggctttgcctggacggcttggattagctcccaatgacggttggagggtatttccaaccattccaactgtcacaactgtcattgggaggctatataaggagctcactctttccatttcaacacacacttcaaacaagagctctctcatattctctcaagaccattccaactgtcacaaaccgtcattgggaggctatataaggagctcactctctccatttcaacacacacttcaagcaagagctctctcatattctctcaagtttagtttagtagtctcaagctagtggagtaggaatagaatagaaatcagagtccgaaagccttcggaagagttcgggtatggctctagtagctatcctcttctcttttgtaagctttgtactttatttagaatactattctttatgcatttctagtattgaaatactttccgagtatatgaatgacaactttactatatgttcatgttatactgattatactgctagcttatctgggagatgcataggtacgagtataatgtttgctattgcaattactctatgtcatgacgatgatattagagtagtatctggtagtttaggtatggtgtctagattattgggtatcattatttggggttatatgctgcggatgaaaggtgggccgctgatggtgacagctcggtacgagtattcctccacgcgtgtatatagtcctaagttaatttcctgggggatactcctccgtatttagccccggttgtattgtcatgacgggctatggtaaggaactcggcagccagaggtggcttctcgaagtactaggagggcatcggaaagagggtattagctagttaatcttataactagaatgtatgtatactatgtatactagaagtataggaatatattcttttatatttttttccacttagcttagataatttagtatgagaatgagtagttctatgcttgtgtgtcactctaccctatagattatattaacccctgcttagacatgattattacaagtaacatataaactattagtacaattctctctactatgatcttcccacgggattaaataaatatagtacccttggaatactctcggggtgaaatgctacaatggtatatccgtgcgcttgcggatgaactctgtaaccataatataccaggagtatttctgcgccattgctgtgaattatatttctagtaatgtcgttaagaaataccaacaacgcgtaaacctgtttcatttatggctgaggggactgcttcacagcatcccgctgagcacacccctcacccaagctggtcctgaggtcacacccctgcgcattttatggcaattgttcttagacgagcttcttgaagatgtctttgataaagcgatattttatatatctagtatgtttcgacgctcttctttgcaaaagaatgtaaaattataaggactaagatgagcctggatcccaagtcgtggtcggggctaaggcagactttattttatatcttctaatcatccgcacggtgcggagtgggttccggcggcgaaatccgacgggggaggggtggacgaggtggcccgctcgacggcgaacgcgacggcgtcgacggcgcggcttggcgcggcagctagtggcggccagagcaacggcggaggcggcggagaggtgggcgacgacactagggcttaagagagcacgggagcgggtgattgcaaaacgaaaatgagagaggaggaaacgggggtgctttatataggctcacaagggtcgatcgtggccgggatggccgcgatttcgccggcggagtggggagaggtggggaggagagagaggcgggattcgaaattcgaatcccggccgtctcgagcgtgggcgcgggcgggagagagagggagtgggcgcggggaacgcgggggaaggcggcgacgtgggcgatgtggcccgggaggtgagagagcgagtggggcggcggttgcgggatgcggcggcgccagctggaggttggggatgggcccgacaggtggcccccacctgtcggcgaccccgggagagagaggagggggcgcgggcttagctgggcttagcgggcattcggccggcccagcaagggcgcgggagagagatggaaatgggccggcggcccattaggggaaaaaggagggaaaaaggaaaaagaaaaagggaaaagaatttccatggatttaaatatttgcttgtgctcctttttaattggttaaaattatttctagagctctgaaaattccactaaaaatcttgttagcatatttcgacatgtagaactcaagaaaaattccacatgccaattccaattattatttacattaattaattagggtttcactcttgcttttacaccggtattttcttgagaccatttataaatttaatttagtcttgggagaagaacttcagggtgtgacacaatctaaccgcctttaccccactggtctgaccggtccgatgccgtcggtctgaccgtggaacccgagcaaacacaaatcgaagatctctcaaagtaaattgcaactttattacttctcactgtgtatacaaagtgcaacaacagcactcctcacgaaaatctcgactaaactcgaaaccctaactattctctcaactcaactctctctaaaaacgatacagggaggccacaccctccctctctatttatacctgaggtaggcagtctaaagccacgaaccaaacttgtataagaagtcctaatccccctaggaaattaaccttcccgtacaagaaacaaactttacaaactccaattctaccaaatttgggctctctctaaattcgactccacatcccatacacacacaatatctccatcgtatgccatatggaatcttcaccaaccatgtgcatttgatctttagcctaagcatccgcatgatatcctgatcgtccggacgtcatcttctcccaagttgactcccgatccatcaccggcaacaatctctcgaggcatcaaaatcatctatacatgcatcaaccaagaaaccatatccaagtacaagttcttaccaacttgactcattgttagcacatagcagtattacatacgcatagtatctatcttgaagtcataaacatgaattatccacggatatccaacaaaccaacccgaaaccgaaaccgacacagaatcagccggtcagaccataggctagccggtctgactgctcgatacacgctggtctgaccggtagcttttgccctgtcagaccggaccaaacattcagcagtagtctatgttcacctgcaaatccaattatctccaaaaccactttgccgatctgaccgctcgatacacgccggtttgaccggcagctcttgtccggtcagacccgaccaaacattcagcagcagtccctgatcacctgcaaatccaattatcttcaaaaccactttgctgataatctttaaatatcaaaactaatcatcttatatgccaattgttcatcgtagaataagaatcaaagtcactttaattttacatttgcaaccctcgtcattggagcgttggatagggcagggagtctgcgagagagcagcatcgatgattggtgcgccactgtgctgggcgagcccctgcaggtacgggatcatgtgcaggcaggggaggagacacaggcaacagcgtcaagcaacaaacccctctcgttaattctgttgcacttcacttcccgctaatccctatgcagtaattaaaccaaacacacacacccagtggcagcggcaagctgaagtccgattaattaattaattaactatttaagcaaagcatcggttttgaggattagttgagtagggaagacacatacatgcacaaggatatgagatgatccagaggaacaagctaagctatagtactagctaactactctcttggaatgtggcgtgtgcacatacttgcttatcccgagcagcatacgtgcgtgggatcagagtagttaattaacaagggaatttcggctaattccctggctgctctctgatcagggttagttatgatattgatcccaagagaatgaattcagtacatggaacacattttaaaaacagatattctgatcccactttgctgaatttgcttgccttcactggcactctgtctgtcagacttcatgctagtgctactacaaccgtttgtttggtgagagcaggtattagccagctataaacatattttaatgggatagacgatgagaaagaagagcagcgggctacagatttgtagctagctatagcacggactccaagacgcaatgtgtatatgacaggtgggaccatatattaatagtatagtaagctactattatatgaattagctattagatcggctatagatgaattggagctagtagtgggctatactattgaacttgctatgatatctttgcactgaatcactgaatgcggaggtggtgtctctttgccctcaaattcatgaaacatttttttatcgaacaccagtagctgtggagtgtattggtaatttgttttcagcattgggaaaagcagcttaggaatgtactttgatttttttttgttccttaacgaagaaattataatattttggatgaaaacaaatcataaatgaacaggtacaactaggatatatatgtagcttcaacaaatgggtcatgatttggacatgtaataattaatcgtgtatatactacaatttagactattagtttttatatatataaacaagcaccgtgcccattttctcttgtttaagttacattacatgacagtaaatagatatattccttgcaaaataatacaacaaatacattacataattctccttcagtttcatattataagtcattgacttttttctaagtcattttttttatgtttcactagaaaaatatagtaaagtttttaataccaaacaaattacaacatatttgggttagatttgatggaactaatttggtgttacaaaagtcactattttttctataaactcggttaaacttataacttaggaaaaagttataatataaagtggagggagtagattacaaacatcaaaagcacacatcagcttcgatgttcaatgagcttaaatccgttgcaactcagtaaaggaaatttgcacatgcaaaaacatctccatggtccatgcatgtgcattgctcataccggtgaatatatattcgccttccagtaccgtctgatagcgtgaaatgagacgacgaccgtcgtcaagaacaaaccctattttttattctagtaccaatcaatcaactgatcacgagagttacctaccttagcaaccaagccaagtgaaagtagttagttattaattaaacacaatgggcacagcgcgagaggccaagatatagcctaattgctttctgccttctatcgatcgcttcgaatgatgttctttcgtgaacgttcaaatccaatgctagaggcacacactttttccaaccattttttttaaaaaaaacaaatgtcaagtcgtaacattggacacgaatgaagagtttaattgaagggtaaaattttcactatgttactgttttaaaataactgggagattttatatgaaaaattttgaaatagtgatgtaaaactatcgaagctgcagcagttgtgccgctagaactaatagcatcaccaaaagtactccaacagatcccctactcccttgcatgatttttggaatttcctttctcgaaatattcgcttgttgatatgcgggagaaagcggtgccctcgcttattcattcccaatctcgctgctcccaccttcctcatctccttcacacgtgtgggagatcggcacggctttcatgggagcgccaggaggtagtgcgcactgacggaggaaaacaaaaattttgttagtttaatagaaggtccacttttttgtttttttataaaatttaggttttctcttggagagatgagttattgtgtttcctattttcagtttaggaaaacaaaaatattttttttgagggggattatacgtaatctcttagtgatgctctaaagcctaataacaagcacagtgaaaatagtgatatatatgcagacagttgctaaattcaattccctctttaataaaaaaaacatgacactatttttaagggaatatataacgctgttaatttatgaacatgatatttcattttccatcttattatacaaattagtacaaatatataaaaagcttaaattaccattaccgataaaataatttgtaacaaaataaattatagtcccttcagtttttaataattaactgttgttttagatttatgtttgaccatccatttattgaaaaatatttaattatcatttatttttgttataacttgatttatcattagaggtattttaaatatggtttacattttttttacatatttgtattaatttttaataagatgatcggttaaatgtattttcaaaagttaatggttttatatgaaaccggagagaggacttacatatatagtctttttagtaacacgaattggtaaagtgatatgtccaaagttcaatag

SEQ ID NO: 4321 - DNA, 809 bp, Oryza sativa
cctcctccccgtgcgccgcgtcgtcgccgatcatgacctgctcgtcgggcatccgcagcgggatgaacaggccgatgccaaggaggatggccgtggtgaccacgaggttccacgcgatcacaaacgcagcgccgccgagctgcttgctgatctgcttgatgccgccgccgtagaacgcgccgcggagtcccggcaccatggactcgaggcctcgagggagaagagctccggggtggccaggaggcccgtgaggatgccgccgaggagccccgccacagcgtgggtgtggcagagtggtctcgcgcgggggccggcgcgacgacgcacaggtgatgggcggcgatggcgtggcgcggccgtggcgatgcttcgtcaggcggcatcggcgcgcggcgttagtcgagggagaaggcccgcgcggtggtgtcatggaggagggaacagagagagaagagagataagagagctgacatgtgggcccaagggtatttttgacatttcacacaatttctctctcctcttcatccggaaattattattttaatcggcacggtgtccactagcaaatttccatatttatagagtgttttctctcaaaagtgagtttgggtagtgtcctggggctaaaaccacagataagcagtatcttgtagcaaaatttccctatattttaatattgtgagttactccaacatttggttacaagggatactaaaatatttgataaaaaaaatagtttgttatgaaatattataatacctttgtctcatgttcctagcaaaatatggcattttaccagtatatggaat

SEQ ID NO: 4322 - DNA, 788 bp, Oryza sativa
ttttttgttaatccaaattcgctgcttgccgatctaagagtaaacctaaagcacgaattaagaatgtttttaacaaacgattttcaagcgtatcaaagctcatcttacgcgtagcagctaaaatatgcggattagctgctaatttttcacgcagattattgccaggtttacgacttaaccactgcaaagaacggctatcgaggcgttgtgctaagtaaactggggtcatctcatgaactctattaatcgtttgtcgaggcataatcagaatattgttaatagcatcaacagcatgatcaattagataagtaaaacgatcctgtaattcagtattttcgagtgcatggccatcgtgacttaaccaatgactcattcgttgtggtaatgcttcacctgtgagcggatcaaaggtaagattaaccaagtagaaatgctgtccctgtaataattgctgtgcaataaattcctgtgctgtatagcgaccgtatagttgcccaaagtcgttcaacttttcatttgcaaagttgatcatttagactccttgtaccgactcttgctgaacattagttttttgatctgatgacaccgtaggggttgctagcttaaatagttcttgatagcgttcattgctctgttcattattcaaataatctgcacttacccaattaaattgcccatgtcctatacgcatcgccttatcaaaatcatcaagaatatctaacttttctttaactaaaatttcgcgaattggatctaagcaatgctgtttggcatatccacgtatctct

SEQ ID NO: 4323 - DNA, 606 bp, Oryza sativa
cgaccagttaacgcctcacctggtaccaaatgggcctacgggaggatccatgtcgaaccgcttctccccctgcgaaaccacagacagatcggcaaatcacgaaacccatttccagaacagacaaaaaggagcaatactccaacccgaagaagcaaaaaaaaaaacgaaaaaaaaaaggcataggcatctccaccttgagctccgccgcgagctcctcgcgctccagccccgtggcgatgggcatgacgtcctccaccgtcgccggcttgtcccctgcagcgcgacccccaaccaccgaccgatcagcgccgcccccaccaccccacggaagcacatccaaacacgcgagatccgaggaggagagcccttaccggacaggagagggctggtgcggcggaaggcggcggcggccgccgtggagagcggcgcggcgcgggcgagggaggcggggcccgcggcgcccgatgccgccgcggaggcggaggcggaggcggcgcggcgcagggccggggccagggtttggaggcggcgccacatggcgggcgtgcgtgtgctctcaggtcgcggcgccctcggcggcggcggcgggggaatggggaggaggga

SEQ ID NO: 4324 - DNA, 1952 bp, Oryza sativa
tcctgcagcccgtagccatacttgttaacatgtaggcctaaaacaaaaatatacaactatacgagcatttaaggctgctaaacagctacacaaatgtaaccattctaattcaaccttccacatagctttaactacagttgtccttgtcagatgagaaaaggatgagaactaaacagaaggaaaaatagaagcgtaccattgtagttggtaaagaggcagcacaaacaccttcccgctttaatgtgcgctcatccactccggatgcaacaacctatgtgcagaggttcacaatcaagctaggaagcaatagagaaataaatatgcaaaaacaggaagtgtgcggagacaccggacaggtggacacctctcccaaactaaaccagctatgtagaatgcaaatgcaaaagccagtactaaatattttatccataatataaaatagtaaactgtataagtatgttcattaagacagtacaaaatctcaaatttataaaaaattaccaatggaggagcacatgcaaaacatgctgtttcaccaggaaccagcaactgtatatgaccagaaacagcatcttctgagacacctgatgcataaagttctcaagtcacatgcaatcgagattataatgactaatgcaagcaaagcgtcagcacaaaatgaagtccatggcaaaaccaaactgttcgttcttttttccttttttaccaagggctatacaggcacaaagaatgaaaccatgtttaacatgtattctgtacatattggttccccaagtgcatgtgcatttccatgtaatgttttattaaagggtacaaaaatcaacataaagagatcatctcatatttcactagcatggtcctcatacttccataacaataagatgtaatttattagcatcaataatatctgtgcttgaggaattgtaagcaggggactagtagtagtacattataaactcacaacaaaggatgatagtcaaagtatatttgtagatgtttttggtcaactgatgtaaggcaagtaatctaaagcaacttctcagggcaaggtagattatcaaatttcacatgcaatttgagatgtctaatgagaaagaacaaaggctgaagatataactgttggggttgctaataagtacagtacacaaatgattttattctcaagaggacaggatcattaactgagttttttctacttaccagactccatccatgtctggccaagttcattgcatgcctgaaaagaaggaataaatgaataaagaacaaatgatgcaccactgaataatgcagtatgcagttatacactggcatctatggttaaattagtcatgaacaaggagacaataatttggttgatggagctatatatcatggaaatgttcactagttcacacctggtttacaaccatacgagcttcatagttatcaacgcagctcaaaacaagatcaactccagtgttacgcccatcagagcttctggctttgagacttcctaaaaatgtttcaaatcctttcactgtagtaatatttaatgaatagctctgcaggaagaaaaacaagtataatgttggtttgcatatgggcagaaggaaaataaatatactacagcatattactctatccaaggttactatccaacagagaaacttataaatgaaattctgtactttatacaacattcatcaattgccatagatgaaacgatagaaaacaaggagacattcgcaaaggagtaagagcaagttcgtctaatgattaattaagataggattcaccaagtcattggcaagacccagatatgttttctcatgtattaatagtaaaacttaatgtgtaatttgaacctgatgatagaaccaattagctggagatgaaaaaggttaacagtagttttcacctccaacgtaacatcaggatttattccagatagtgtctgcacagcagcatct

SEQ ID NO: 4325 - DNA, 6486 bp, Oryza sativa
gggacttacccgatcagatatgagagaaaaatatttgctcctggttagtaacttcaccgggactaaaaattaaatctttagtccttaatctttagtcccggtttatagtaccaaccgtgactaatgatctaaatgatcttactccagatcaaaatttttataaccgggattaaaaataatttttagtcccggtttttactagatctgtgactattgtggaaatcagtcgaccgagtaaagatcatttctccagtagtggtcctaatgatcactcagctttcatcgagaaaataacgtgtaaaaaattgtcaagataacccaaaggcgtacaatagtgttgccgtggtcaaggtcgaccagcggcaaaactacctactatctctgccctaaaacgattttatttttatatatctcacatataccaacataaaactaaaaggctaaaaatttatttactttttcaaacttaaatgcatttatcccttacatttctaaactctactaatgtatttgtagcttcaatatatatattaactgtcttagaaaataaagttcttaaagtctttgtgagatgaaaggagtaggcactaataactgactctcagcctcacctgacagagaggccgagtggactggtaagctgcagaaaattgatttattaaataagtccacgtgcttgttttaatgacttggatcgatcgatcattttcctgggtcaaaatcaaaattctaataatatactttattcgatgctggccgagtttgactttgctcaattaattaattaatctctagacagctcttctcttcttcgacagttcgacccgttctgttctgtctgatactgacacaaataatttcttcttttttttgagaaaaaataatttcttctctctttctctttctctttctgttctaaaacaacagatttagaaaggagaggcatgatgaggacacaactagctcggatctaaccatgacgacattatgtattaatcaactaaaggtgcatatgttctataatagatttacttgttatatatttgaacaaacgttgctacacaatgagtttcgtgtgtttttgtttgcagaggtactttcttgggcgaaagaaaagagaccgagcgtaaggaatacatggatgattgaagaagttgattggggactaaaccaagaccttctccaagtcttcttttatctcaccacgccacttttggtccatagatgacaagagataaagttctacacgttttggattcagatttgggcctcctgacagcatcaacttcaaacagacctagccgctgatctagaaggaattttgtagccaccaggtaactaaaacaataacatgcaaaggagaagatactattatgttataaagaaaccccttattcctacttagccaaatagatcaacaaatagttgttgtatctatcaaaaacagattttctcatctctttggaaacacataaaaaccaattcttaaacatatgagtaacattacaaggaggttgtaaattagaaaccatatgaatgatatgtagaattatgtgatgatttaatcgtggtgatgaacaattatcacatgtaaatgtttatgaaaacacggtgatgtgtttttggacggtaaacaatgcggtggtcgtcactattgccggttagaccgggtggtgcatgtcggtcagaccggaggtgtctgggcagtctgaccaggttgcttgatggtcaggccgacaggctctaggtgggagtcggtttcgggttgttttcgtgggatttctagattgcttcatgtttataatttctaaatggtttctatttgcatgtgatattattgtgtactgatgtgagttaagttggtgcgaacttgtactcaaatatagagtttctttgttgttcatatgcaggtgttgcttgaggccatggaaatatagccagtgatagatcgggactaggcttgggggaatttgaagtccagatggtaaaggatatcacatgggatgctcaggttagagaacaatgcatgtcgatgtgaaagtttccatatggcatacacgtgggtgttgtctgcatatggaaagcagagttaaatttggattaaaatacatgtttggaaagattagagtttgtaaagtttgtttcttatatgggaaggtttcctaggggattaggacttcttgtatgagttggattcatggctaggggcagccacattatgggtataaatagataaggggttgaggctagaagatatcgactttttgggagagaaaagttagggtttgcttcgaggtttcaatcctagctcgtgagttgagaagggggtgctttagatgcactttgtaaacacattgatgcaataaagttgatttattttcaagagttttattggtacgtgtttttctagatcccgacagtttgaccagtgtactactggtggtctaaccggcgaaacggcggtggtctaaccgacagcaagcaagcgctcagaccggcgacggcgagcagcagaaggcgaggaagcggtggtccgaccggtcggacaataccgatcagaccgggggcgtagaggcggtcagaccgatgtgtacacggtggtcaaaccgactacgtcaagatctccatcaactacgagggttacttttattttcgctacaagtttttggttttttgtgttcctactattcaccccatggtagatttgtttggtcttgttcgatcctacatgatggaccacaccagacaagataaatgatattggaagaacaaatgttcgatgatttcatctctgtgacaaaagcagcatatcttactatcttttcattttaatttgatgtagagacttcatttgtgtcctaaggccctggatggatcaaggactaaattttagcccgtgtcacatcagatatttggacactaattagaagtactaaacatagactaatgacaaaactcattccataactctaggctgattcgcgagaccaacgttgattccttcgacgtgtcaattggacaaatacgcattggaaatgtttgatgcttcttggggcttctttggcgaccgtgaagtcactggatgaattgccgagtagatagatcagatccggaggagagtggaaattgctcaaacagtggagtgatgtggaaagagctaggtgtcggtcacaaaaaccttaataagaagtgaggagctgattgaatcataaaaagtgattgatcgcaatcttagggcaaagccaaaataatcatgagtggccacaatattataagtctcttcctcttgaccaaatctgagaatctattaagcctaattaatctatgattagcctatatgatgctacaataaacgtgcgctaattatggattaattacgtttaaaaattttgtctcgcgaattagctctcacttatacaattaattttattattagtctatatttaatacttctaattaatgtttaaacatccgatgtgacagggactaaattgatcaaacaccagcttagctaggttatcttgtaagaactacattccaatgatatcaaaggaaaattttgattttgaacggtctttttttttataccgttaccatcaaaggtaaggtaaattagagtacccgctcatcaaagtgtcaaattacatcggtgtccctcccatcctggcctctttgcaaacaagcatgtgctaagaaaaatacgaaccggcctcatttttagctatcaaaaaaagaaaaagagacctcatttttggctcaacctatgaaacgaccttatttttggctatttcagccgccgtctcccatgccatctctctggcttaacgggtaagctaactaggaacgaaattgacatggtcagggagactcatttcgcacatgctctaaatcctgtacgttgttgtcctgcatcgcgaggtcattttcgttgagttttaacttcagggagatgagcaattggggactgaaccgctgaatcagacctataaagttgaatcctttgtttgcggtttttatacgggcacatggacatttcctgcagctgtgaagtgactgatttgcttgcgatactttttggttgtcacatcgtagcatgttaatactactatattgtgtttaatctaacattatttattaatccctccatcgtagaatacctatagtttcagagttgaacacggttattaagaaagcatatataattaaatagtaagatattgtaattggttgagaagtgaaggtacgtggaaaaagtaaatggtgaagggttgtgattggttaggaaggaaatattggtggaaaaattgttatattttagaacaaattctaagtgctaaaagttattatattttgcgacggagggagtcaggatttctcttaccgtttttggcacggttacgcaaccccgtggtaagggttacgatggtaaccgcgcggttaccgtgagatatactgtggtttcaaaaactgaaaaatttaccgtgcatgtaacagtgataatcgtgcagtttcgtaaaccctgaagggagtatattttagcacggtctccctatcattatgttgctctggctgagagattgattgagtttggaacacgtgtacacttagcatcagattatgtagacaaaaattgttggcaagaaaattagacaaaaaattgcagctcagattttgcgaagggaaatgaaaacgaccacatcgaagaaattagtggatgattaagttttggaataagtatttacttgaataagcaaaagtttagattttataatagaaaaactgacaggatacgcaagatattttgccgagacacacaagtacacaactagctaagcttattgaggtttacggacagcactggcaaaagcctattacagcatgacatcacagttctggacgaatgccttctacttttctttttgaactattatcggtaattagcagagcgtccacattagttaacagtgaattttccagcctcataaaatctacattaactcaaggcaaaattgtacacaaaagctcaaaacagtacaggtaagtaacttaaaacccttcaacctctttggtatgaacagaagctatatccactgaaatgggtaactctgtcggagtaaacacaagcatcagtacccaggttggttttctaacccagtgttgagctttggtagaaaccaagttaatgatgacggtccagcttttacaaaacattaagacgagtttagggcatcaagctggcgctgaagctcctcaaggtcgtcatcaatagccccggatgtaactggagcaactggttcttggtaggaatctgcagttgggagttcgcggacaaggccttctgggaggctatctgtataatttcgaaaagtgggacgaaatggttaaatacaaccaaagagcggtaaataaagggacaacttttctaatagcaaaaatgaattaccagctccagtgcttagaatgcttggtgtcactgtgtcactgtcatcgacaacactggataagaacaaatattgaagttagcaattctacaaaagccacatttttattcatcaagcatgtcaagatgcagtacaacagaaaaagagaatgaagttacaattagcaccaaagtgcaaccctagcctagtagtttctgaatcctacaataatgagtagctaaaatttagcatgaaacattttcaaacacatgcaatcctgcaagcagggtgcttaagaaatgatgtgggcttgagcatggggtacaaagttctatccaagtcaactatcttgtcagctccattagtatggcaactgaatctgtaatgagcattagcataattgatcacagacatcctaattattaattctcagtaattgccaaatttagacataagttgttagttcctacttcctacacatttgcctgtcaaggaattcaataaagtacatgaggaatgacttacctaatattccaatcattatctagatggaccggacattcatctgctgctgatgcttcagcttccatcttagcttttgctgctgcatctctagcaggttttgactgcatatattctttctacaaaatgatcaaaagaagggtaacattcccgatctttcacaatgtcaacaatgtaaacatagggagggcacatgggagaagacaacacctgtctctgaacacatgctggatttgaacactgtggatttggtttcatttccattgttgggaaataatccttaagtgaattatatccctgcgcaatcagagggcattacaagattttagaaactaaccagtacagtgctcgaatgttgagttgaatatgatgaatcagaatcaacgtgagccacagtggagtccccttttcatatgaacagtatatcatgttgttccccagaaaaagtatctaatcttgtgcagttacataggaatagagaaaatagcaaaaatgctaacaaaattacaaaaaagtttttttctcagccaaaaaatttcaaaga

SEQ ID NO: 4326 - DNA, 3858 bp, Oryza sativa
ccggccggggacgaaggttcggttcgatctctagtgatttagaaccctagtttttctactgtgtgaaaatatatttgtcgcgatggtatttgttgcaagtgtactattagtttgatcgtgccaaacacgtattcactgctcttttggttatcgttcggattaacatacagattttacctcaatattttattaggatattttttaaactgctaaatatatactagtatattacgtgcgaaaattttttatataaaatttgattattttttgaacttataataattaaaactcaaataatcatgcactgatagtttatttttcgtgctttaactatatcttaaaataccacctatatataattatcttttcaattttagttttactctcttgcaaaacgatataactgttgccatgtagtataaagtttgttattcgtgccacattttagttaactacagctttgttttaattagctggttttcaattatgcatctatcagcaatatatctcgtatactaagttttttttggattattgagaaacggattatttgctccacacttagaaaatatattttctcaacaaactttttgctattatattgtttagactaattgttttaagttattacatattaaatttatttcttaaaacatttaatttatctctctaatcaagttgacaatccatatatattttgttcaattatctgctctatattgagctaagtcccattattaattagagatgaaggtagcgtacctgtgcgtacgctcaatcagaaactgaaatcaaaaagagcattttgggagtaaattatatatatgatccgtattagtagtaacctaaactatatatatcattttcactaagtaggagatgcatttttttgtaagatatataatgaaaatggaatgacaacccaaggctccaaaacctccgttgttaattatataggtcccagccaattaaggagacccatgcacatgcacgcataaagcagccaacatttcatatatactccacagcataacgtacgtccttgtccctgcttttttcacaattgctgtatttgatcttgatccacactcgattgactgggccaatgcccaatggccaatgccaatttaggcttaattaattatgaaaaggagattacccaactatatatacatagctattagatgtgttttgcctctttttagaattaatttgctttgcgaccatgtgcgcgacaaagacacaggtttattattgacattaatatgttgctttcgatgcaggtcatcgtatgccgtcacaattacttgggctaatctctaccagttttggccttcggctttatttatacatatctgttatatatcatggataatctaaacaactagatggtcgaggcgttgatctagaattataatatgcaagatatgtttgaaatgttttcctgtgatttggatagtaggtaggtgttgccccttctatgagtagtttattttccgagggaagcaggaatttccatgtcatggtgtcacctactcttttatggcttgtaatttagcaaattttagacgtatgctaaagtagagagcagagatgtaatgtagtgcaatctgtgctttaataaaatcccttaattatatttgaaaaactttgaggttccaaatatacgggaagtatttacatttaaccaataataatggtgatccaaccctagctgccccaccggcccctggctagagttttccttaccatcggtctcaccctgccctagctagagtttctcttaccatcatttaccgtgataactgacgttaccaccgtggtatgataatggcaatgattctttaacccccccccccccatcaagctcaaaagaaatgagacaaaaatttaactttgtgttcaatttcatctgatttttctcactattcacttgtgtaactttctttccctggtaagttaaaccctgctccccaacgaactcttcgtgagatgggctagctacagcggagaatgacatcacataccaaacttgacgcaagaatactgagattatggggctgtttagttcccaaaaatttttcccaaaaacatcacatcgaatctttggacatatgtatagagtattaaatatagataaaaagaaaaaactaattgcatagtttgcatgtaaatcgcaagacgaatcttttgagcctaattagtccatgattagccataattagtctatgattagtccatgatgtgctaatgacagattaattaggctcaaaagatttgtctcgcggtttccaggcgagttatgaaattagttttttcattcgtgtccaaaaaccccttccgacatccggtcaaacatccgatgtgacactgaaaaattttcatttctcttaccatcaaaaattttcattttcaaaaattttaatagcagctgcgccgttgagaactcgaaacagtgtcggtgctaggtatagtcaacacgatttaggcttcgttcgttcctgggcgatccaggggactgagagagaaaagtatctcgttttccgtgcgcacgtttcccaaactactaaacggtgcgttttttacaaaaaaaattctataggaaagttgctttaaaaaatcatattaatccatttttgaagtttaaaatagttaatactcaattaatcatgtgctaatggctcacatcgttttgcgtatcttcccaatctctccaatccccttctcctcaaagacacccttaatgtttccagtgatgttattgacatcttttttcgtgggattgatggatttttttttttacttttgtttttcttggcaaccttcttgctctgcattgtagccaatgttcctctcttctcttgcagtaatgtaatgccgtgcgaattaagatttaatttgtatgtttaaaataaaaaaaatctaggtgatgtgaaggaagtgtgtgcacgtagctaaagactagttgtaactatccacgatgtttcctccaagaaaatttctaactgtcaaaatcaatccataagttaaatgaaaccattttaatttaatttgtggaaaatccaattttatcttggctactctagtacatcaacaaatcttggctagattagcatttgctgtcgacatgagtctatctattggctgtgtggtggcgacaaccatgtacatgcatttaatctataatagatgtccactgtggacaaaccttctttactcccggttggtaaccccttttagtcccgggtttccaaccgggagtagtaatccgggactaaatatgggtatctttagtcccggttgataacaacaaccgttattaaagagagacagtccagatggtccccttttcttttttttttcttttttattttctcctgaattgagtggcatgcacatacccaaatcaaaccctaaaaccccaaatcaaataacatcctaactctacatcacaaatcttgaagttattcatacacacaaattaaatacatcataaatcctaaaaaatacaaaacaaatcaaatacatcacacattatacatcttagatccatacaaatgtccaatgaatcacagaattatacatctcaataatcacatattataaaaaaaaatggccgctcgctgctgccggccgccggccgcctgcccgccgccgccgcgcgcggccccccgccacaggccgccgccggccttgctcggcgccgcccggcacgaccgccgcgcgtggcccctcggccacaggccgccgccggccctgctcagcgccgcccggcacggccgccgccggccgtctgccggctgccggatgggaggggaggaggggagtacaggggagaacgaggaaggggaaaatggg

SEQ ID NO: 4327 - DNA, 3027 bp, Oryza sativa
ccccctgtaacagttgacaaaccggcctagttttggctttgagctttgctctcctgcagctgcatatatacacacatgttttgcctgccgagggacgaaactccatcaattctctttccttgtgccggctatatttgctcctactcctgcatattttgacatgttcagagaatggtatatatatatatatatatatatatatatatatatatatatatatatatatatatatatatatatatatatggactttttccttacatatatatatggttctagacttttagtggagtttgttttgaaaaaaatgattagtcgagagacagagttctagtatggatgcatcgtacacactcactatccggccgcggtccaagcctcaaaggcaaggccacaattttttcttcttcttttacaggatagtaactatactacatgtctcaaaacataagagaaaaccacaaggaaaaaaaaaagaaactcttcttaatttgcctccagtgcaagcttggcccggccatgcgtacatgtttgcttactcaacatgtctcagtacactcgtccgtgcagcctgcagctagctaatcaaactcacactagctacccaaagatctggcagagttagctagctttgattgggactgcagtgagaaaggatcgatttaggtaagttgacatgaaaacattacacatttacacggtgagaaaggatcgatgagatgttataactagttatatatgccataaaaattttaaaaccttttacaacaaaaaaaaaccattgtgatcaaattagaccatcagtataattcccggcccatgagttctattaaggctgtttattttttcagtcgttagaaagtgtatatatacctataagatgatatatatgatgtacaaattctcttaatatcaatttattgtaggttcctccaaaaaaattatgggaaaagatatacgtactatactgtttgtactaactttgtacaagttaatgctattgggtcatgttgcaattaattcttgactttttagaacttccagttgatttaatcaagcggttgagatttttcatcagtaaaaagtttgtaagaaatttttagtatatgtagagcgctatagacgcacacactctgcatctatatattgtcatgtatccctgtataatttcgttacacaattcttgtcatttggcacgcacctagcttagcttatccattcaacgtgtggctcacaagcgcctccagctctgatcttttttcttttcgtattcttgaactccaccaggaagaggggaccaaatatcagctcacagacagagaacaagttgcttccgacaagagattgtcctacaatatctgtatctatatgcaggtatactatcgggatcttttccttcaaatctcgtggtgcatcgctagctctctgtagccatccaagtgttgctgatgattcattgatctccaacccatactgcccatttataattttcattattattcattaatttcatcatgctggcgatcgtcatccatgagttgtttcaaccacaaataaataaaagatatacatgcattaaaaaaacgagcgactatatatatgaatagtcaatcttgtgtgtatttaattctgtagaaggtgactataattaattaatccaaatttcaaaatataaaaaggatagtttgtgccgacggttttgtttattccgacttgcatgagctcttgctgggaaatttatgcaaaattgtatagtaatgttctatgtggtctttgagattttcttatgaaatagcttttcaagtttacacatgctaaacatgtcatgatcaagctctatatttctagctatagtttagtttaaaaatactgagagatggtgaaccctcaatctcgtactagttagatctctgtaggcacacaatttagatctttgcattcataaggagtactagaaaaacaattctgtgcgtcacctgaaaggcacaagaaattgaacttttgcaaatttacgcagtaaaactacagtatagcagaaagtcagcagaaagatctggtagatgacagacacatattagaggtgcaagtacaaggattaattagaaaattatgcacctagcatatgcactatatgcagaaagatttggtagatgacatatgctataagctgaacaagaaattgacaccacctatatatatgcaaggagatgaagaaagagctcatcatgaagatccaaatctggaaattaatctttataataacgaattctatgcatatatattacagccacaacaatgaactacaacttttcccttggccaacaaaactgatcacttgcctagctagctagctatccccctatcttcatctctcatggcctctaacttgatgaacctgcagttgtcggcttctcgccccagctcctttttctttccccacatcttcttgagttgtgtaaattcaacttaacaatcccaactcgaacaacacaagaacatatgcatagtcgatcttgtagatgagcaagcagtatcgacgatgaagatcgatacatatatacatatatgtatatatataatcaagatccacacatgaatatggacatgtacatatatatacttttttgtcttcttggcttggctatcatcagctgtagtcaccgcctcgtcccggcgctgacgacggcggcgggttgtggtggtggtggtggccgcgggcgatgaggcgggcggggagcggcctgccggtgccggagccgccgcagctgcggcagggcatccggccggagccggcgcaggtgcggcagccggagtcgccgtcggaccagcggttgcagaggcagtcgacgcggccgctgccgccgcacgtggcgcaccgtggccgcgcgtcccacctcgacgccgccggcagctgccgcccgtcgcccccgccgcccatggtccggttcgccatggccacccccgccagcatccccagccccgccgacgctatcacgatcggcccaaccatcgtactagtgtccacga

SEQ ID NO: 4328 - DNA, 2213 bp, Oryza sativa
cctggatagttagttggcccatcatcatgatggacctagtttaaacatctagtgcttgtaatagaccgccctcaagaggccccacctgtcagctagacaagctgcccgaatgtcttaaggtaataaggtcattggttagaagcaataatgtaaatttggtaagcctagagtaatcatcggcttcgaagtcctgagattagccgatgagagttatcaagtcgtcagttgtcggattcttgctatattcgattaaggaaattgatctactaaaggaatcttatccagaagagaccgagttcaaagagtatgcggcatagcaagttatctattaattaggaatagtttgttagtttccttttatctttaggaaagtgtgtttagtgtcctataaggattttatcttttcctttttatccttagtttatttcttgtccgacaaggactggtatctccctatgggtataaatatgttcacccggggtcattgtaatctatcaatctctcgatcaataaaaactactctcggtgcatcgccaccctttttaccgaggtttttacttatcatccgacggaacttggcacctaacgcggggctgcatcggctttcgatctccggcaaaggggtaagtcctacgttccgccggccctggtgaatctgttggctacattggtgttgttcaaggctgcatcgcttcgatctcttggatcgctctggtttggttgatatatttgcctacctgatatctcaattctatctctaattacattgtttttagtgacgcatcggtttagttggaactgtctcggttaggtccgatcttctgtcttaaccgatatatctctacaatcataatgttgttctaaatagatttgtcatatccatcacattagatagatctatcggctcatcgagtattagattatcatatacaatctcgtgctgcatcggttaggttcgacctaccatattgttattgataatatgaatcttgtaaagccgataggttcatgctagtgttttatcggggtgctagccgataagttatctggacgttgcatcggcttataaggattacatacaagttgggtttagccgatcgcaacaaaggtttcactatttaatctaatcttgtggatttcatgacatcagacctccagccgatgtacgctttagccgtcggatcagtgcttattctatcatgtcattgttagccgattggtttctactggattatattgctatattatattatcatcagtcgattgccttcatatcattatatacatttgacatatagccgataactcaaaaccctatcgctatcggctgatatcgatatcggctggaatcggcattggttggaactactccatcggcttctcagccgatcagcaatttgatctactgatatcttgtcagttgcagaataactgactggcacgccctcatctcatcaacttttagacctgcacaggagctaagcagacctcccaggccaattaatgtgtgtttttcgggtcaacagttataccgtataatggagttttctgctaccgagaagtctcttggttagctgcatcttacactactcctttcctccaccccaaatgtttctaacactttgtattgttgttggattttgttccaacaatacttattaattccaaaatttaaagtcactaattttaaattgcataattattacttctattagtgaaaaactatagtttagactccaaacattgtactaatcgatatatcttaattctgaattgtctagttattaatttcgaatttcaatattattaaattaacaaaataagtagtgaaacaaatgaaatgttagcatagattatatatataattttatgattactattttttattcttggatctattaataaaataaaattattttcttcttggttagaggtggatactggataacaagctagctagctcggctcgcgttaaggctcagtttaatttaagctcgatatcttaacgagccagtttcactcggctcgttggccttaataaactaaaagagtagccctcgttaggctcgttaacgagccatatcttattatttcacctttctaattttaaatatttcattttatcatatattacataacaataaacattaactaagaaagaattgttgctcagctcattttacgaaccagcgaaaagctaaaacaaagttgca

SEQ ID NO: 4329 - DNA, 11212 bp, Oryza sativa
ttaaatttgagaccaagactgactgttccttggatataccgaagtattctcttcactgctgcccaatggactgtagtaggacaatgtagaaactaacacaccttattaacagagaaagaaatatctggccgtgtgagagtaagatattgaagtgcaccaacaatacttctataccttgttgaatcttctggacctaatttttctccctcgtgtatagacagtttttcagaggatgacaaaggtgtattaactggtttactattctgcattgctacccttttaagcaagtccatggcatacctttcttgtcatactagaagaccgtccttggttcgtttcacttccattccaaggaagtaatgtaaatcaccaagatcctttagggcgaagtctgcttcaagactctcgagaagtcctgttgtggctgcttgggaggagcttgcaacaattatatcatcaacatacaccaaaacaaacatggtatatgtccttgtgttagaataaaacaaggaagtatctgctttagagggaacaaatccaagttcttgaagcttgtgacttaaccgagagtaccatgctcacggtgcttgttttaaaccataaagaactttgtccaacttacatatataatgtggaaaagctttgttttcataacctggtggttgccgcatgtagacctcttcctccagaactccatgaaggaaagcattctgcacatccagttggcgtagactccatcctttagacactgcaatagatagaacaagacgaatggtggccgctttgaccaccggactaaaggtgtccttatagtcaattccatatctttgcttaaaaccctttgcaactaagcgagccttgtatctatctattgagccatctgcctttttctttatcttgtatacccacttacagtcaataatatttttaccactagtggagggagcaaggtgccaagtcttgttcttttgtaaagcatcaaattcattgtccatggcagctttccaattcgagttactcaaagcatcatgcagattagtgggttcagaagtagtgacaagatttaggtacctcactgtaccatcagtatagctcttaggtttgcgtatgccttgctgcagccgagtcacaggacgttgtggaggaggtggcgacggaatgaccggcgcaggagaagcagtgtcgactgagctcggtgaagatcccacgtcctcgtgcggcggcgtctccaaagcaccaccgtgcccccctggattggagacagagcgcgcggagtggagggaggcgtcgcagtggcgccaggtgtcgacggagtagtggacgcggaggcgtcctccgcgtcagaggagacagacgcagccggcgacgcagacacagccggcgatgcagatgcgtgtggaaaggtcattagaggctcctctggaggccatacaagaaggatccccttccacttctcgatcccggcccggaaaagtgaccgacccgaatgaaagaaagggtttatgagccctagccctgtaagcccacacctatgtagagtagatcgtttaacacctcgattaatggaacgtgtattcaggagggctctgcttcgctctattccacctcccgggtgtatggatttcctgaaagtttaattcatatatccgaaatggaacggagagagaactttccgttctgggttagtgaccacataactcctgtaccactcactagtttacaacattgaaataagcgattctttctgcaatgtgtctctcagcgtttttatttttctcccacgatccagaggcacagatgcaggcgaatcggcgccggagagcgcgcctgtgcccgtgctcccgccagcaggcagagcgcccataaaaggacgttccagtgaataatcttgctgtggattgtcgcctgaaaaatttggagagtctacatatgaaacattagtagcaggtgaatcatgcaccgattgatcagctagctgttccaaacaggaggatggatcgatctggtgcaggttctcagggaggagtaaaatctctgcctggaggcgagcgccggcgttaggatgaagttctttaaacggaaacacagtttcatcaaaagtgacgtcctgggaaatataaactcgacctgctgatacatctaaacacttaaaccccttgtgcatagtgctatacccaagaaaaacacaccgggtggatcggaattgaagcttgcgagtattgtaaggacgaagatgaggccagcaggcacaaccgaaggtgcgtagagaggagtaatccaggacttgttgaaagagtttggtgagaggtgggactccgtcattgacaggagtacgcaagcgattgatgagataagcggcagtgagaaacgcttcatcccaaaactttaggggcataccggcgtgagcaagaagggagagccctacttcaacaatatgtcggtgttttcgtttggcggcgccgttttgttgatgtgtatgggggcaagagacatagtgagtgatgccaatccgttgaaaaaacgtgttgaggcgttgatactcaccaccccaatcggtttgaagagcgaggatctttttatcaaaatgacgctcaacaaggttttgaaaatcatgaaagcattgaaaaacttcagatttactcttaagaagatagatccatgtaaacttgctaaaatcatcgacaaagctaacataataagaacgcctgccaactgaggttggagcgggaccccttacatctaaaaaaataagctctaaaggagcttgagaccgactaaaagacttaggatagagaagttgatgactcttcccttgctgacatgcatcacaaatgatgtctttattgaactcactaacaaaaggcaaatcatttttgctaagaacttgacggacgatagtggatgacggatgacctaagcgatcgtgccaccgggtcgaagagatcttgtggacaccaaaggcactcttgttggctgaaggagaggacagcttcaggggatagagacgtcctttacatctgctgcgatgcagaagcctcctcgtgtcccgatccttaatggaaaaatgatagggatgaagttcaacaaaggcatcaatatcaaatgctaatcgagatgcagaaactaaatttttggtggcttccgggacatagagaacatttttaagaacaaggttaccactaggaattggaacagtagcatgaccaatgtgtgagatttccatacctgctccgttcacggcgtgaacttgttcatttccggtgtatttgtcccgcaccgtcagcatgtcaagttcgccggtgacgtggtccgtggcgccggtatcaacataccaattggtatcgataccatacgaagtggtggcaacatttgcagctttttcctccccggtgaaggaggtgtcgaagcgtttgaagcacttgatcactgtgtgaccaagcttgccacagagttggcacttgggtcgttcttgattgccgccaaacccgccgcgaccaccttgagcagggccgcgtccaccaggattggcgttgccgcggccgcggccacgttgtccaccattgccgcgcccacgcatggcggcgttcgcctgtgccatcccttgacgaagctccaggcgttgctcgaagctgatcagttgagtgatcaactctgagacagagattggttccacgcgggctgcaaccgctgaaaccactgggtcgtaatcgaagtcatgcccggcgaggatgtaggatactagatcctcatcgtcgagcttttttccggcggcggtcatctcatccgctaggccgcgcatcttgttgacgtagttgatcacggaaagattgcctttctgcgttgtagcgagagccattcttgtgttgatggcccgcgccctggactgggacataaacatgccctcaattgcctcccacacgccagcggcagtgctgacagctacaacctgggagagaacttctcgtgagagtgaaagcagaaggtaacttagcacctgttgttcttgtgcaacccattcagcatgggcaggattgacgacggtgacgtccttctcgtccttcttcacgatcatagtcggagatggcttctccttggttccatcaaggaacccagccatctgggctccccgcagtgtcgcgaggacttgagctcgccacagcgagaagttgctgcgggacagcttctctgtcaccggctgcgagagcgccggagcagagggaacagcagatgaggatgacgccatgaggaaggagaggaagatggctctgataccatgtaaagtgagattaacgtggatgcctctcagcaccacggttccgtgttaatatagcagggaacagtccccaggcgtggcgattacatgtggttgttacagctttaccaagaagaaaggaaacagaaaacaaactacaagattacatctgttatctaatcctatcactaggatcatctctatctgaaacactatccaatccattcggttgtttaacaccccctggatctggccgactaccgaccgcatcctccgtgagttcgtggtgaagcaggcccagccactgccgttgttgcagccgcgcggtttccggcggcctgctcaggcgatagtgagggagggagggagagaggggtggggtggcggcgagggtgagggttgtcgcccgtgtcgccctctaagatgaccgttatatatatttgtgggcagagaaagtacatgaatatgtacaaggtatttactgacgacttgaaagacgtacgtacccatgcatttatttccttgtaaaaatcaaccagcacatcaccaagttgatgattcagggattcgacatagaatttcgccggtgcctcatgtcaaacagtcaaagtggagacgcatagaaatggtcttttgccgattgccacaaagacaaaaagatgataaggccggccgtgtgcccacccaacggctcagccggccacactatgcactcgctcggacagtcgatcgatcagcacagcaaacatcactttcgcctttgcgatctgacggtgagatcagagcgagcgagctagagtggattactgcacctgccggctgtggcatgcagtgccagtgctatagctcttcctgccctctgccctgacgtgttgcaatagatcgacagagaatattatttttgccacggacggtacggacaagacagtgagcactatttttgctctagtgtctgtcatttgttggaattggcgatcgcttatggcacagtaccgtggaccatgccccctcattcctgtctgtctatctcggaattaacatctcgtgaactacaatactccttccatccaaaagaaattatatactccctccgtttcacaatgtaagtcattctatcatttcctatattcatattaatgttaataaatctagatagatatgtatatggaaaataatagaatgacttacattgtgaaacagagaaagtaattacaataaaaaaaactaatatatgaaaggaaaatgttatagatagtcatagctaattaaatgatactccctccgtcccagaaaaagccaacctagataaggatgggatcatgtccaaattcgttatactatgaagtgtcccatccttgcgtaggttagtttcttttgagatggagtaggtggttaagagtgaaagagagcatagtaaagaagatgggactgaaccggccgttggactggaaaaaccaaaactagcacctttgatgactcactttgttcacaagaccaagccaatcggtcttatgagccagctaaactggacggttttcttgtaaagccatcgaaccagcacagattgaaccgatcggctcattcacataacaaatggactagtggtggagccagaaattattaaagcctagcgctcaagtatagctcaactaatgagttattgattttctcaaaaaaaaattgcttgttgatttaaggggattcaagcccaagtctaaggctcaagtccaagctactgtaggcttatctccgctcgtgaataggacttgggccattttaaggcccatgattgccgaatagatgtttgaagcccattgtttggaataaattaccaaaaaactttcaaaaatgaaatgcaaatataagagcatctccaacagcctctccaaatcggactctccaaacacctatagtcaacactccatctgatttggctagtcaaactagttactcgctccaacagcctctctatccatatgtcaattgcatcatcttcttcctcctctcccgttcttcctctttctcccgcgcgagtcgacggcgcggcacctcgcgcgagcctgttaattactcaactctaatctatttaactaccaagcctgttaatttgcactctacaggcgtgcattggcaatgacatccaaaataaaaaaattcaccgagatgaaattggtacgcagtaaaattccaataactggtaggactgcaaaattcagtagcatacacacccgaaggacgaagtcctcctgcttccagacggtcaggcagcggaaggcgagatgcgcgaccgcgacgccggcgctgctgcacgagtccgactgctgctgctggctcgccgtgaacacaaagcagaaccccaggaggcggcagagcaggaacagatgctgcatcgaagaagaagaagaagctgcccacattggcgtgccactgatccccgtgccctgactgctcttcttcttcttcttcttcttcttcttcttcttcttcttcttcttcttcttcttcttcttcttcttcttcttcttcttcttcttcttcttcctcctcctcctcctcctctcgtgcctttcttggacttggcactcgatttggcttagctcagagaaagcaccggccgtcgagctcctcgcgcgcggcagcgacggtggcggctataggatcgaatcacaagaactaagccaaccagagggggaggtgaatggttgatatacccaaaaacctaaacttttagtggaaataaaagttaccttcgaattcgatgtagatcggtctgaccgaggttgatccgccggtctgaccgagctcgtgccgccggtctgactggtgttgatccgtcggtccagccacctgaagattgcctgccgcgtgtgaagtcgccgccggtctgaccgcctctcctccgtcggtctgaccgccgcctgccgccggcctgactgccggtatgtcgctggttagaccgccgaacccgatgaaacacaaattaaagaactcttaaagtagatgacaactttattgcttctctctgtgtttacaaagtgcaccaacagcactccttacaaaaatctcgactaaactcgaaaccctaactaaactagcaactcaattgctctcaaaagcgataccgggaagcctcatgctccccctctatttatacatgaggtaggcagcctaaagccatgaaccaaactcatagtaagagtcctaaacaccttaggaaaccctatagtacaagacacaaactttacataaccaatcgtaccaaatttggactccttccaaattcgactccgtatcccatacgcacacaatacctccatcgtatgccatatggaatcttcaccaaccacgtgcatcaactctagccttagtatcccgcatgatatctgaccaccacggacatcttcttaccaagccgactcctggtctatcaacgcaaatactctcccgaggcatcgagtcacctacacatgaaacaaacaaagaaaccatattccaagaccaagctatccccaacttgacttattgttagcaaacaacagtattacatacgtatagtatccatctagaagccataaccatgaaacaatcacggatattcaaacaaacaacccgaaaccgaaaccgacacagcatcggccggtcagaccgcgggccgggccggtctgacagcacacatagcgccggtctgaccggcaacctccgcccggtcggactggacacataaaataacagtgaatccgatcatcacctgaaaattgattatctccaaaaccacttcgacgataatctccaaatatcaaaaccaataatcacatatgccaattgttcatcacagaataagaatcaaaacacactttgatcttacagcggcgaggagtcctcctcctccaccggggtcgtcgtgcagcttgccatggcgcttctcgaggaggagctgcgctacctcatggtccaccaaaccgtgcagctcgaccccacgggcatcttctccctgcgccgcctctcactcggctccatggacgacggctgtggcgccgggaggacgacaactgcggtgccgggaggacggcgacggcggcaccgggcggatggcgcggcgggcagggagggagcagcagatgggatggggaaagggagagagagagagagagaggagagagggtgtgggacccacaccgatggcgagccctcctggctggccaactttggctagtgtggtgaggaatttagccagccaaatagcttggccatccagttagcaagtctgttggagcacattttttacccaagttagccaaattttggcttggagagccatttggccattctgtggagatgctccaaaccatgcaagtgaagtgagattggtttgattcccccgcaaattttgcgcgatgtactagcgggctatggaggaaccggctatggatcttcctgttgggccgaggaactagctcaaagagcccatgtctgggttgtgaacttgtgatcgaccattcccagtacatcagcccatggagaaaccgatcgagcagcagagcctccatgcattcgcttaaaaaaaaacggtgtgaagacttctctttaaaaggaaaaaaaacgaaccctgtgaaagagagagagtgacaagcttggagacatgcatgtagcgagaaccagagataatacacgtgtgacaccagaagagaggagatggaggagaggatcagaagctgggaggatggaacgttccaagctgggtaaggacctagtacttggccactttactcgggctttgctgcgtgtgtgcgtgcactgatgcaaagctctagctagtgtagtgttccagaatagaaggaacatgtgtgcgtgtaccgtagtagtgtactatgcaaggctgcgactgctgctgtgctacttgcgatgctataataaggttatgttggggtacttggatacctctgtttcctaacgaggttacaacaattatttggtatttgcatctgaattaaggactctctagctagtctagtgtgctttattgccgggcacgcctaatgcccagcgatcacccgcccgtccccctactcccccttctctctcccctcttcttcctactcttcttctcttcttactacagtaaaaaaaataaaaaaatttatgtatagaaatactatatataaaaaatttgaattcaaatttaaatttgaatcgggtacgtaaacttttgatttataaactttgggtctataaactttaggtgtataaactttagatgtatagaaatactatatatagaaaatatttgaattcaaattcaaatttgaatcggatataattcaaattcaaatttgaatcgggtatgtaaacttttgacttataaactttggatctataaactttaggtgtataaactttagatgtatagaaatactatatatagaaaatatttgaattcaaattcaaatttgaatcggatataattcaaattcaaatttgaaacgggtatataaacttttgacttataaactttaggtctataaacaggtatataaactttaaatgtataaaaatactataaaaaatatttgaattcaaatttaaatttgaatcggatatataaacttttcatttataaactttgggtctataaactttaggtgtataaactttaggtgcataaatttactaaaataggaaagtaatgcggtgccaaaaaaggaaatgtggagggagggagggggagaggtggtgatcgctacccgatcgtggtagtgatcgatcgcgcattagactttccgtttattgccttctcttttacaataacgaggaagggtagactccaatttagggtctcaaatagaactcaaataataaccatagccatccaacctcattgttgatctagcatgtaaaatatcaaatacaatataaaacccaaagcaccgagcaatgagcaaaggatatctttgatggaatagcttactactcaactttcacttaagatgttccccgtcaaatcactcgaaggcggtgagccggtgaccaaatatgttatactagtggttacccatcgcattgcagtggaaaaatttagaaatacttaaaaaacattgaagaaaatagtttataatatgtaaaaggacaatattttaagcttgataataggtgatgtggaattgcgagtgtatattacacacaaattgttatgtaccaaacatgtgaagaattcaatggctataattaatttatctaggtgacatgtatggttttaatggattttgagatttacagtaataactatattaagtgggttgtaaatgaacatgagacatgaatggttgagatcaaagcatgagaaaaatccaaaggctaatattttcttgatgatgtgactttatacatgtcaaacttttgactttatacatgtcaaatatttagataatggaagaaacattacagcctttgcacctcacgttggcgcaatcacattactaaatgaaccaaaataaagcctcaagtcgatatttattaacttcaaatttcttaattattagatcctcaaaattgctaatatgctataaccgagactgcaaatggagtaagatcgatgggtacctattaattctatttttttgaaaaatattaaattaattaagcaatatactgaatataaattccaattataagtaaattggtacttgttgggggaaggccagaggagatcccctagctagctgtctccgctctaacagtaaggatcctccggagaggcctgaggcactccgtggagcccggtgtgaaggctgcgggtcgtaaggtatcacttttttgcagcatcaagggtgtgtttggttgcaagccacactttgccacagtttgccacgcctaaggttaggcaaatttgacaggtgtttggttgtagccacagtcgtggcaagattcccctccaacaaattgggtcccacgtgtcaatagctc

SEQ ID NO: 4330 - DNA, 559 bp, Oryza sativa
ctggatgaagggtttatcttttctgaaagatgatggacatcgaaatgggtagcagcttcacttttttattagctgtgggcattcaaattcttgggtggtgcgttaagagaagtttaagaacttcaacctggccttttaggaaatattcagggaccaaacaacctggaaagtttcagattctcaactccgagaagagctgaaaatatccatatctgaaaatgttattccggcatatcttgcttttttgggaagatattgtagccaagtggatgggggaagaaattcagggaaatttataaaatacaccccagaggacttggaaagtcagctttcttatttgtttgagggtgcaccggggccagccaaccactctagaagaagaacataattcatatttggcaaagccctgttaaaggtatgattttgtccaaaggattgaaattgctttacacttcttttatgtgtgttcttgctacctttagtagtcattgcaacaccataatacaatacaaggacctttcgttatgcacactgttgcaaggtgtgtactaaggaatat

SEQ ID NO: 4331 - DNA, 1529 bp, Oryza sativa
ccatgcaactggtgtgatgcaaatgagaccttctcctgatcggtgcactgaagcaaatccaacttcttctctatggcatgcagccaatcaccagcttcaacaggattagtggtactagagaaagtgggcggcctcacacgaagaaattctgctaacttgttctggggaggtgcatggttatttccctggttctgctggttctggagttgctgcatcatcatgttcataagatgtgcctgttgagccaggacttgggcaagtgtgggattctctccattgttgttgttattgttgttgttgttgttgaggccattcccgttgctgcgagtgagcaccatctggcatgggcaagagcacaagaagagaaaccggggaaaactacttaggactgagaattaatttaacttttattgatcttaagtgagtttcattattacaaaactgaagactctcacaccactaaactcaccaactacctaacactcgaaagcaaacaaacgcatgcacttaccatccaccactgatgtaaatcacatgcgaggcacacacaaccaaacttaaaacaagcaaactaacacaacgatctaagacaaccgtttgacaaggctttctaattcttccgggcatcggagttgattgaacgctcgttcggctcgtcttcatcatcttgaatcgctccccactcgatcttggaatgggtgcgcttggattcttctacttcatcatcacttatgttgacgaccgaagaatccgctagggctggggtaacttttttttccaccacacggacctttggcgccaattggtagcgatggacaaatagagctctcttccttgcggtaagacgaaccctggccttctgcggtggtgcttctcccttcaacgcggctagttccttctccaaacgatccactttgtcttctagcttgcaaatcttaccacgattccgatcttcacgatcttgagctgctaacacagtctccacacggctttcatccatagcccacagcatctcaaccaaatgccttgtggtagcatcattctcaattccttcagtcttaaggtagctgccacggtcacttccctgtggttgacggggatggtagcgatactcagtgtcggccaactgatcactgtagcgatcgcggagctctcctatggcgatccttgccacctcctgacatgtatggatgtagtttcttcctccagcttcgaacatcactgaggggatatcttcactattactgttcaaggtgactttgactccgcacttctcttcgtgacgatcatgaggaatctgggcataaaaaggagcagtcccaaatcctatggcaaaggacatcgtacgcaactcctggacaaatccttcaacaccaaacaagtactcaggcttgtagcgcggcatctaaagacaagtgaaaggagggaattaagacatttatccaattaatagcacaagtttctggattaatttgaataaagttagaaaatcaaagtaaaaggtaagtaaataaagtaaaccgagcttg

SEQ ID NO: 4332 - DNA, 1716 bp, Oryza sativa
catttttctaggtataaaataaagccctttttaccattattggtccattctgaaaccaatggaactaatgaaaaatcatgctccaatcgagaaattaaggcagaaacttgatctttaatcatctcatcacagcacacggaggaaagtacttcacgaaaaaaaaagagaaactttcgcctccggttttgcctcagaccttagggctgtgttcctagcccaggtttcccaactcatcttcctcactttccacacgtacgcttttcaaacggctaaacggtgtgtttttttgtaaaaagtttctatatgaaagttgtttaaaaaatcatattaatacatttttgaaaaaaaaattagctaatacttaattaatcacttgttaatggaccgttttatttttcgtgcacactgttccagttgggaacaggctccagcgaacagacgaacatagccttagtcttgcggcgatcaatctcgtggacccgatgccatgccccattgttggcggttgttaaatgacaatccataccgccaacatcttcataaagtctagataataaaacatcaacatagtaataggtgcttaatcttacatattccacaagtgttggtgtatatttgtatgcagatgataaaccctgaagttgggaggaaaatcagactaaagtgaggagaactatgtatccatacaagtagggttgtgcacttcatcgaaacatcagtaaatcaaccgaaaactccgagaaatgaatagaggaaggtcccgagagtccaccgaccgaaggccaggccaggagggcccagcccaggtttgaccgaaccctctggttcggccgaaccccccgatcaccgttcatcctgggtttggcgtggatgctccagatgttctcccaatgacggttgcggtgcagttcggacatttccccttctcacaaccgtcataactgccctataaaaggacctcacttcattcactctcacacacacttccaagattgagctgaattataagaggctctattgtactatattgtacactagaataggaagagagtagagtagaagtagtcggaagaatttcggagttgtcggtaatcttctcctatttcttttattctatttattactctgaattcaatataatattcttcttgaataatttagatttatcttgtgagaattatctcttggttagttcctaaatagcatacgggattattgttcactataatcaactaaaatatagtgattgctttgatgagttataaacactaaagtagatattaattgcttagacgtggtatttaggtatttgttatccagtaattgctgcgtatccacagtacgtttgaggtaggtgtagaggtggtgacagctcttgagatcacttaagtcctccctgtccgggtacgtactagagcgacattgggaacaacgggttgcctgtgcctgaagtattgcattaggattaaagttaagctttccctagacactgttctcactagtaaatcctctctatcctggcctatcatttgcttggtgtccttggataaactggaggaagatctaaccatacatgttcctttggattcgatatccttggaatactccgtaagggaagtgctacctcggtatatccgtgcacttgcggattttatctgtacccgtattaaaaaccagcacccatatccttcaaatccaactcacaaaaaatcatgg

SEQ ID NO: 4333 - DNA, 737 bp, Oryza sativa
  unsure (1)..(737): unsure at all n locations
cgcggnncatttgaatgccagctcggtacccggctatcactctagagtggagaaagggggatgcgctgtaaggctagaaaaacctgatgaggcagggggcatccagcaacgactgtgtgaaacgaccgtcagagaattgtaatactactcactatgagagacacaatgtcgaactgacgaccctgaatgattgcatcgatgacgtgccaagccacccccctaatgtcatcattgttgccaatgcgagggaggataatggctctcacaatcatgttaaccacactggggatagtcctcaagccggcaaccttcccatgtgtgtaccgtgctccatcttcatagaactgagagagatagtctatggagaatgaattgtgagtgtgctcctcatgcaaatcatctccaaaatccaagcgaatattgaggagccgccggaactacctccgagagatagaacactagagggtgtcagacatccacttcatctcactatagtctccagccacccacactgtagcataaaactgtcgaatcaattcttcattgtagtcttgcttaagggtcacaatccggtcaatgccaacagtcttgaagagataatgcaagctctcaaactctggagtctcattgatgtctctccaagaaatccacttatgctctgcaaatgctttccctgcataaacctgctcatacacagtcttcttggaaagcgtgtgaaaacggagatccggagtgtc

SEQ ID NO: 4334 - DNA, 772 bp, Oryza sativa
tgatctcaagtatgtctctagaaatgtaaattgcacaaatataaatgtgacaatcaaatgagacaaggagacaagagatttttcaccgaggtttggaaactcgccagtttcctactccctgttgaggcgagcccaactccaccgctcaaccacgaagccaccgcacgcccccttcgtcaaggggtgggtaaggcgggagccggcccacggagaggactacccaagcctcaatcactagggtagttcttccttcactccgaaggtggtgaactccaaaccactcacaaaccggcgccgggcctcctccacaatcttctcggagaggtcaccgggcaactcctccacaagccgtctaggaggtggcaacctccaatagtaacaagcaatgacccggcgtggagatgatcaatcaagtgccacactagctctacaaatgaaagcaatgcacttgactcttggctaatcaaccttctaacacactagatggatgaacacaaaactcaagtaggtgtgagagaggtgcaaaggatgtatgcaattgaattgggtgccaagagagtccccttgctgctggtgggggagtatttatactcccacccaccaaaactagccattgggggggaaatcccaaatcattgtgctctgtcgtctgaccggaggtatgtggccggtcagaccgtgctactctcaacggctagaaaactagccattgaagagctgtcagagggccccatcggcctggccggtcagaccggcattgagtgggcggtca

SEQ ID NO: 4335 - DNA, 739 bp, Oryza sativa
acgattatacatgtgcctagatgttgctttaagggatgtataaagttgaagttaatagtttcgatttaatacatcatcaggccctcttttacatcccccagtacaagataactgattggttttaactagtaaactaatatgttttattttgcatggctctgtaatctttcttttgaaccttgaattttctttattcagttagcaatataagatggctgtttcactctttctacacacacgatgccatcttatgtgtcaaccaaccttaccctttatttgtactcgatatcatttgtaatatggggtatcatttatatcaagatttgtttgcattaaacaggttgctcttgcatctgggaataaaaagaacattgaaaaagtgaggaaagctcagcttggtatcaacctgcccaatgttgtaactgtggacgcatttggactgtcattaaatgaagatcatctgcatcttaccactgaatcacaagtaaagcttggtgaaatgctcgcacaagtctacatgagcaattttttgccagcaacatgctaggaggagtcctgtcaggtgaaataatctgtttaactctggaagtttggcacctaaatatctttctctttaaactgttattataattcttcattttctcgttggttgaaactatctagaggtgaaccaaccaattcatcttgcatttcttgcacagtaacattgatcctttcatttaacaggacatcaacttac

SEQ ID NO: 4336 - DNA, 571 bp, Oryza sativa
gttcaatcatcatatattaaaaatattactgaattttaaattggcaaatcatgatatatgggttcttgttctctcttgtagctaatcgctgtaatatgtatgatatcgagttaccgatcatacatcaacgctacaaaatcactgttcactaaaccttaagtgagttgccatgtctcgtagatggcaccctccatctctaaatcttggcttcgccactgcaaagagaagccgtcatggcggtgatggcggcaaggggagctggcggcgatgaagtgtacgcggcacagtggcggtttcagtggtggtgaagcatgggacgcggcggcggctcgaggaggggcagcacgcggtgaagcatctaggcccccggtgttaattttagtaattaatgacaagcgctaattgtggactaaccgttgtctttgagctatatattttaagttaggtcgacgtcatgtgtgcgcatggatgactatcgatggattaaaatttgatggcgcgaagcgaagaaaagaagaccgtaaaactagtgctttaatttagaattgatcgaggtgtagggcgatcaaat

SEQ ID NO: 4337 - DNA, 1454 bp, Oryza sativa
ggaacgagaagatgaattgaagtcagctcatccgcatctgttcgccagttcttccgaatctcgaggacgagattctgtttaaggggggtaggtttgtcacaccctaaaaatccaaaatatataaattgttgtttaattggaattattagaatttattttaaaagcctagaagagaagatctaattttaattaataaattccaatataaaatggggctgataaaatttcattaaatactttgcttaattctatgattcctagattattctgggatttatttgagctaaggaagtatttttaataaatggaattgcatttcatgaataatttaaattgaaaaaggttttttaaaagtctcttttggctttgggccgaaagccggcccaaaatctctctctctctccccggcccagtcggcccagtccagcagcagccgccgctcgcgcgcgcgcgtccgcccactgacaggtggggcccacctgtcagtcttcgtctacctccggccgccgccgcccgaaaccctagcgccaagtcgccgccgcccgctttccaaatttggccgcgtctttcccgatccggtgaaatcaatagaggggaaacaatcttcgggatctcctctaccttttctcttttggaatcatcgtctaaatcgctttggaagttcgtggattcgaggtcgaatcggatcgatctctttcctccgaaccccaatgtttctttcgcgtcgccggtcgccgtgggccttcgccgctgcctccttgcccctataaaaggatccccggtgtcgccgctacccgccaccaccattgtcttcgtctctcgccgtcggaagcgccctagcgccgtgtaactcgagccgcagtcgtcgccgtcgctccagccgtgcttcgccgtcgttccggtcgtcgtcatcgctcggggaggtcgccatcgtggtcgccaagtcgccgccgtcctcgtccgccccttcgccgtcgctgtagaccgccggagcaccgccgtcgtcgtcaagccgaaggtctccgccgcttctttctcgtcgccgccgccgtccgttcatcttccgccgacgttttggtcatcggtgagttcgccgccccgcgctctacgtcctggtgccctccgtccgcgtcgtcgcgccgtcgttcgccggcgagcaagcgcgcccgagccgctgagccgccgagccgccgccggaggtgacgtcgccgctgacgtcatcgtggccgtctgccgtgagccgccgtagacccgatcgatctcggccgtccgttttggatggatcgatctcggccgttcgttcccgtgaaccgctgccgtgcgcccggtccaccgcaaaccctagccgctgacgcaataaaccccttttccttttcaaaaataattcattattgcgtcataattcaattaaaatccatataagtgttttaatccgatttaatcttcaaaaattc

SEQ ID NO: 4338 - DNA, 1713 bp, Oryza sativa
agggcccctgaggacttcaaagatagtggtccaacgggtgctgaatctcagctccgtggaggcatccctcatcccccaaggagtcctccccctctgcagcgatccagatcgcgccaccatcctgaccatcatgcaggcggtcggggcgtcggaggagcgggctcctggaggccacgatggcgcgggcgggagccgcaggggggaacaatctaccccgggagggggtcgtgcttctgggccccgcgacgggggcccggggagcggccgccccgccgacgcccgggggaaaagaaagcaggaaggaaccccttccccatctcctccccgagggggcggggcggcgcgtgccagcagcaggcgcccggagggtgccgtgccgtcgtcgcagcccgagggggagcgaaagaagaagcggctccgcaagatgggggagaccgaaccatgccggggaaaccttatctcccccccaaggtggtcgtttagccgacctcctcgcaggttcgtccccgcgcccactgcggccgtattcattctcccatctcccaaggcaagttttcactcacccgtttctttttgtcttctggtttttcttctgcctcagcgagattccatcacgcccccccccccgccattccaagtccggccagtccgaggccgtggagacggcgaccgcggaggcccgaaggcgggaggctgaacggcgagaagccgcagaccgcctccgagaagccgaggaagctgcccaggaggccgtccgggttcgccgggctgaggaagccgctcgggagaaagccaaactccgccgggccgaggattccgtccgggagccggagaaggcgcgcgcacgccaagcggcctgccaagcccccgacccgactccgcccgaggcgaccacgacttccgaggccacccacgacgaggccgcgggcgcactgctcgggcccgacccctcgggcgacgcacgggacgtgccagcttcgggggacgcccccgagtccggcacgtcgattggcgggccgtgccacgcggcgcccgcaccgaggcggctctcccctatgccttccgctgccccactgaacgcggagcccctcctgcaggccttagccgccgcaaacaccacggtgctggacgggctaggtgcccagatggaggtcctgcaggcagagtggacatagctcaacgcggcgtgggcacgcgtcgaggaggggcggcgctcggtggaagccatggtggaagcgggccgcaaggcacaccgccgacacgcctcagagctcaaggcccgtcggagggagctggcagagatcgccagggaggtggaggaggagcgggagactgccctcatcgccaccgccgtgctcaacgaggcgcgggacgatctccacctccaatacgggagccgggcggcggagctaaagaagaaactcgatgccgcccggggagtccttgacgccgccgctgcacgggaacggcgggcggcggagaacgagacggcgtcccggcggcgcgaagaggcccttgaggctcgtgccaaagcgctggaatagcgcgcacgcgcgagggagaaggacctgccggaccgcgaggccgccatcgccatccgggagacaacgctggcggcgcatgaggccgcctgcgccgaagaggagtcagcactccgcctccgcgaggacgtgctcaccgagcgagtgggagtcggagtgcattcatggcgcg

SEQ ID NO: 4339 - DNA, 826 bp, Oryza sativa
  unsure (1)..(826): unsure at all n locations
catttatcgaaaatctcaaaangcattgcaatctcctacatgcgtacttcctattacacaattatctctaaacttatatttattccncccccnnccgggggnttgttggacttgctggcacccgccgaaaagccaacctcttcttcctcctcctgtcctgccgccctgaccgagcggcggacccggggacggccggagctgccacaccggaaccggaggagttccaggtgcaggcctctccttgcgagccacacggtccgcaagctgaaaaagctccgcggtggtctggggctccttggaggcgatcttttcgagcatgcgattgtgccgcacgccccccctgaacgcgtagatcaccacgtgtgcggggatgcacggtatagtgttgcggacttgacagaaccgctgaatgtacgagcgaagagactcatcgtcccctcgctgtaccgcgtgcaagtccgcttcttcacctgggcgcggatatgtgccctggaagttcatggtgaactgctggcacaaatcctcccaagagtgtaccgacgcgggtggcaagttcatcagccaaccccgcgcctgacctttcaggaccatggggaagaaattcgccatgaccctgtcgtcacccccggcggcctcaatcccgggcgtatagatctggagaaactcggcaggggtgacgcttccgtcgaatttttcggggatgggggccggaaccttgggggccaacggacgttccgaaggctcgccacaaaagctcgacagccggcaccgccaaccggggacatgggaggctggcccccatgcccggactgaaaaggcgctcccg

SEQ ID NO: 4340 - DNA, 694 bp, Oryza sativa
caagacaacgggatggtttgcaactcctgagccggtagatgagtttgtcaggcgaaaaattgacaaccctcacatgttcgcacaattttgtcagcgtcggacacggctgtgggccaaaaaaaaccttgccggtaagccttgccaacgatggttcgtgcggtagcgtgattgccacagatgcctgaatgtatatcctttatcaattgtcttccctcctctaaagacacacagcgttgcaggattcctgatggacttttcttgtacagctcggtctcatgtatgacataaagtctgctgcacctggagatcctctcggcttcatctttatcttgagggagttcttgttttgtcaaaaatcttatgaggggctctctccagtcgacttcaatcatgcttatgtcttgagtgtccgtggcctcgattgtttctttccttggtacggatggctcgtagagatgttcaacaaacacgtcggaaggagctgcttctcgttttgaaccaaaattagccagtctatcggttgcctcattattgtgtcgaagaacatgggtgagctcaagtccatcgaatttgtcttccaacttgcgtacctcctgccggtaagcagtcatgttatcatcaaggcaggaccactctttcatgacttgattaataaccgagggtaccgagctcgaattccgcctatagtgaggcg

SEQ ID NO: 4341 - DNA, 819 bp, Oryza sativa
aaacttgttaatttcgggaactctatatttacgggaaaccgtcacattatcataataatcaggatcgccttttttgtaacctctagcacgattctagttttcactcccaattctatccttctaccatatgttctgcagcgtctccctcgcgctgctgacggtggtggtgacttctccggcgcttcgacggtgaagccaccttcgacgccgggaagtcggtagtcctctgccggggcccgtggccctcccgctggtggggcacctgcacctcttcaggaagccgctccaccgcaccctggcgcgcctcgcggcgcgccacggcggcgcagtgttcggcctccgcctcgggtcccgccgcgtcgccgtcgtgtcctcggcgcccgccgcggaggagtgcctcggcgcgcacgacgtcgcgttcgctgaccggccgcggctgccgtcgggcaggatcctgtcgtacgactggtccaccatgggcaccgccagctacgggccctactggcgccacgtccgccgcgtcgccgtcaccgagatcctgtccgcgcgacgggtgcagcacttcgccgacgtccatgtccgggaggcgcgcgccatggcgcgccaccttcaccgcgcggcggtccgccatggcgtcggcggggcggcgcgcgtacgagtggagctcaagtcgcggctgttcgagctgctcatgaacaccatgatggccatgatctgcgacaagacgtactacggcgagtaagctaaagatcgatcggcgatcgccatgatggggatcctctagagtcgactgcaggctgcagcagagatgtcatcaag

SEQ ID NO: 4342 - DNA, 1142 bp, Oryza sativa
gtggccctttgtgaacttttgaatccagctggtaccccccaaaccgagcagtgatgcccctgatgaatttaagcgcggagtgcttatcgatcttgatgaccggataagcctcgggccacttagtgaatttgtcgacagcgacatacagatactcgaacccgcccggggcccgcctaaacggacccaagatatcgagcccccagacagcaaatggccacgaaagaggtatgatctgcagggcctgggccggctgatgggtttgcctggcgtggaactggcacgtcctgcaccgccgaaccaagtcgaccgcatcgttgagagccgttggccaatagaaaccctggcgaaaggccttcccaaccaaggtgcgtgaggcggagtgggctccgcactcgccttcatggatatcggcaagaagctcgacgccttgttcccgaggaatgcacttcaggaggactccgttagccgcgcgctgatagagggtcccttctaccagcacatagcgcttggagatgcgctggaagcgttcactcccttcgcggtcctcgggtagagtcttatctatgaggtacacctggatctcagtgatccaagcaatcgatctaagggagctgggagcgctcccttcaggtcccgaggcctggactccgacgggcctcgggggccgttcaggctcgtccgtctcccctagggggtcgggtcgcgccgacggctgggcaagcctttcttcaaaggcgcccggtggggtctgggctcgcgaggaagcgagccttgagagctcgtcggcgaccgcgttatcccgtctgggcacgtgccgaagctctatcccgtcgaaatggcgctccatacgccgcacctggcgcacgtaagcgtccatctgcgggtcagagcaccggtactccttacagacctggttaacgaccagttgggagtcgcctaacaccaggaggcggcggatccccagtccagctgccaccctgagtcccgcaaggagtccctcgtactctgccatattgttggtcgcccgaaagtcgaggcggaccaggtatctgaggacgtctccgctcggcgaggtcaatgtgacccccgcaccggcaccctgaagagacagggacccgtcgaactgcatcacccagaaggcg

SEQ ID NO: 4343 - DNA, 8405 bp, Oryza sativa
ttacacattttgataaaacatacaatctcaataaaaagacctctagaaaatcagctaaattaataattaacatcataaagcatatcacttacccaagcttaagaagtcctgcgacagtgctggcactaatgtcaaaatcaacctttggctggataataaaatttccttcccttataggctaccattaaatgaacaaaggaaaaacgtagcctgtcattgactgtctcatgaaaacacaaagataaatggtatgcaaaaggtaaactaacctctcgtattaacagtgcaaatcttccttcacatattcggaccctaatacactcgccttctgtcagctgtccactcaacggtatgccaggaagtcttagatacacatcagtaaaattctggacacagctgcaggctttactagcatcgagtactttcaatatgtcttgataagatacctattcatgaaacaaaaatagataaataatcaccaacgtaataataagatgaacaatataaagctcaaacttacctgttttttactttttagtacgaaaagtgagctttcaggagagagcacagggtcaaagtcattttgaatcttaagctgcaaagcacgtggagaaggaacattgcgtgagtccaaacaagttactaaatacatgataatggaaagccataaatgataaatatatatcaaataggtcaaattcatgtttcttgtaccaacatgagcatcgataagatgtggttctatgtattgctgaaatagcggaaacacggtagtcataatttcactctgagaaatagaaaagcctgcacgattcttgtctctctgtattcttgcaataagatgagaatgtactccaccaacctactagacagaatgcagtaaatttccagggagatatttatgatgtaaaaaaaaatcaaactagataaacagttttttcaagatttgaataaaatcttacaacttttttttgagggtaaaaaatcttacaactgcaatccataaatccagtgatttccttatagcaggatgcaaagcatagacaccttcgaagattacctagtagtccaaaagagtaagataagaaacaatgttatcactgaaatttgaggttgattggttcaaaatacccaaaataaaggttaatatcaaatcaaattttatatgtgtattcgctacatcaaatctaattgattttttttcttgtacagcactcacagtcaagtataacagctatcaaccacatcatatagtttccagtacagaataagtagaagaattaaaataactaactacaataccctgtttttacaattttatgttatcttcaatagagttgcttactacaaaaagaaagatgccctcactaattcttgatttgaagaagccgtttgaagttttaaacatgtacctcactctgatattctgtttgctacgtatagaatattttgcatatggaattcatttaacaccgcgattcaacataagatattattatcgcatatttaggaaaaggtcacaacaccaaaacaacattattcaccaaacaggtggaattccattgactatatgccactatttttagttggcactagattttccctcccagttcttcatttttttttctcgaaaatgcttcatttcattaagaagcagaaatacgtacaacaaagcggtccacgaagaaggaaccctctagaaagaaaaaggcatcacaaaaagcgacgcgcaacagattactcctaggagcagctaaccaaccaaaggaagtgaccgatacaggaactcattgagaaccctggcacaagccgtacaccaaagaacactctttcttgctattgcttgcaagacaaccacggcgctgggcatggccttattgaagacaatcattctggtgcttccgaatttcccatgccactaggataatcaaggagttcaatcctttcttcgtctccttgaccaccttggactaccaactagagaagcgggttgccgaaggttggggaaggcattatggaccatcataagctaatcatgaaatgaccagtgagaccccatatctgagagtggccacaggacacctaatcacactttgaagatcttctgcccaccagagacaatgaaaaatatagtgcctgtagcaccatacaagtgaacaaaggcggatgctcgccttacagcaccaaagagagtgacttggtgtgaatcagagaacgccgccaccggcacatagtataatagaccagtccaggccagaggttaaactggaaaaagccggaaccaacaaccttagtggttcggttgactgtaagaattgttcacgcaattgaaccaaaagaaacagacgttttccgatggaattccagcaacttattgagaacacacaggccgcagttctcttggagtccagctaagatatggccgttgggtctagaaacgcctcttgctaaggctcaagagcacagtgttccaaatatatgcgaaaaaatggttttcccacttgtttcaatggccatctaaactactacgctgatgtgttcaaaggaaatatgcatacaacataaacatccagtcctgcagtatccagctgactggcaaagcaggtcagccggtccgccctttttctattatgcaccagcatcctgctcaaacggcgtgctctgatattctgacttctgttgaacccaataaatgatctcagagctaaattgatgtttccaagtagcccaagaactccatcacaagattctgctttcgcacaccttgattgtgtacattctcatggagtcatggtgatccctagtgaggtcaaaagtgattgaggaaggctgatagagtattaggacaccataagaggagaggtatggtttcaatagacagtgaaggagatgatgagttgggaggagaaaggggacagaaaaatggacagtccaagtaacatagtatgtattacatcatgtgggattacagcttcttaagcaacaacgaatattgtagtataaaaataacccccctccatatgtgacatggtagttaccaaaccaagaatattacccagaaatgaaaaatactgggtcccttctgaaccataacaaaatgtatgtcaatgaaaatatgaaagagaaagatggttatgtattttaccactccacattcctcagagacttgaagctcctcgaatttctttcttttgcacttctcaaagtcaaagcaaggaacttctgctttgtgattctttctgatctccataatgttctgcggggcgataagagaatcgtcatttaacaggcactatagaacccaaccatatgattccagaaaagaaaaggcagcatgcaaaatgctgtggagtaagaataattttatcaccactattgaatgcttaatataaccaatacatatttctggcaaattaatgtcacataataattttctgtctctgttgaattaaaatcagttttgtaaatacaagaattatctggtaatgtggttgttcaccaccagattttgaaccctaaattcaagtgatctcgtatagatagaaacatggttcaagaaggcgctaggtgctagagggtcagcagagctggtgcctagtgcctagcgggcacctaggacataccaatcatagaatccaagaaattatcaagcatattacatagagaaaaatagcaacacaatagcgcccaaagtaggttagcctcctaatgcactatctaatgcctaatcgtggcagctaccaagtgcctaggcggcgccttgcatcgacttttagaacaagatagaaatttggaagcatgcttgaaatatttaagattctagtagttatgcacaggaatttgtaattcacatgataatacagaaaaggaatcaatataaaaaggaatcaccttagtaagcaaacctatatccaatgagctatactcatcatatttataatccctaacttgttcaggcttataataactctccaagcttataacttcacaaccaattatattggccatcttctgagctaaacttgtcttgcctgatccactagggccacctacaaataaacagtgtatcaacttaaacagcgacagcatagtcagtaaatgtaatttgctgggtgtgtgggtcatatcatttttgcacaagtttaacagaattattattacagaatcaatctattccatacaatataaaattcttagaagaattcttgtattcacatacatggactagtaaaaaaacagatggggcgcaaataatcgctcagtaatctgccagaaggcccatttatgtttattgtctgctttagcacacattttcacaatagatggttgttcgccataaataagggacaattgcttatatttagaagccgaactaccaaattgaccctactttttcaggtttgctcatttgaccctgtttttcaaaagcgaagccaccatctgaccctgtttttactagtccgttagggtttcagttagaaaaagaaaaaaaaataattttactcgcatgaactgaccaaaatacccctcatcccaacctttatcccacattggcgtggctggccggcgcgtggagggaccaggagcaggtgagcagcggtgctggcaagcaaagagagggacggcagtgggcgccagcgtatggaggagcagcggcggcggcttctgccgcacagagagaggaagggaggggcagcgccggcgcgcggacaggcggcggcgcctgttcgcggaggagcagcgcgccggcttttgccgcgctgagggagggacggctccagcacgtggcaggaggagcagcggagctggcgccggctgttgccgcgtggagggaggagggatgggcggcgacggctgctgccgtgtggagggaggaagggagggagggccagctccggcgcgcggaaggaggagcggcgacgccggcgcacagagggaagaggagcagcggcgcgggcgcgtgtagaggcggtggtggcgatgcgtggataagcagcggatggtgcggcgctgatggggaaacgcgcgggccggcgcttgctgtgtggatggagtgcgtggccgtgtggacggaagcgtgcaacgcttgcctggctcagccggaggcacaggtcctgcgtgaggcgctcatgtggcccacatccttgctcgctcttgctctacccacacctcctctctataccttgttctactagatctggaagttgctttgctcttgttttgctgatctgattgaataatctctcttgttttacatgtattaatttcacacttttttttttttttgctttggggtcgacacaaatttgagcttcgtgatttgcttggggcaattgttggatgtgaaatagcatatatgcttttctttcttcagcgtgcaattggatggataatatatttccaaagttttattaaaattcagtcatctttgcttaagttatcaaatctaactcaaattcacacacaatttgtcaattccaagtcaaatttattaaaactttcatcacatacaccgagtacacaaaactaagccaaataaataaaaactcagagagtatactcaaaatgagcaggggtataaacggcatttggcccctaagttaacaccgttaggttggcctgatagaatagggtcatagctaatgttcatttttgaaaagcggggtcaaataagcaaagttgagaaaatagtcaaactggtagttagctttcaaaacagcgtcaaacgtgcaattgccccataacttaaatatattacaaaaaaggcatgacatgtagccccagcaactggtacaacaaacccacagagaattgtaatacaagttaatcctaaaataacaggtgtataggaatagattaggcacaacctatcaggcactcttttttgcacagcaagcataccattatagcacattaaaaactggatcatgtgaaatttggagatatagatgctctgatatcactttaatgaaactggtagtcattgcaagtgagacttgtcacaagggatatctggtgcagatgtctgactaaatgattttaagttgccccagcaaagtagagtgagttgttttagttatttatcattcacagcaagcagatgcttggtcttagtaaacacaaaactactgctactttattaacggtaaagatgttattaccaatcccaacaatgacaggaaatcctttgttctccaacaatgcctgaaagacaacaattaatggaatatgttacagatcagtaatgcgtaactgtgatgaaaaaaatagaatgtggtttcatttacctgaattgcttgaactgataggagaagacccctatctaagtcataggagtctggcagtggagctaactggatgttacttcctgaagaagaatctgcaaaagtgtaagaatatattcaatggattttctacagaaaaaataataaataaatatggtttccaatgtactccgtaataggcatggttgggattagggcacttgcgcctatttctagttgtgtatccctggacccaagtggcagcggtgccattgaggcagccacgccacaagggcaggagagaaggggaagactaaatactcttgtttattacttgcttgatgagtaaaatacaaaccccgtcatatagatgtgttagcttgaccattaagaaacctatccctagtattaagaaaataactaacttataagtctaaccttatctctaataagaccacctgacatgaactatccacgcacgaaaattaaccaagtaggtactattaatgcacagtaccaccagccctagagaggcagaccactctatgggccctaatgggctgcacatgatatccaatgacaagagaaaatgccctttgttttagcattaaagaacagaatatgcaaggcaaaaatcataaatgaaagcacaagtttaaaaccttgattgaactgccattttcccataacaggctcctggtcaaactttttgggtggagacctcgtccatggttgtgcaaagtcatcaaaatttgcaacattttcggtcgaaacacgaattggctttggtgcaacaatttttttttcttgactttcagtcagtaatttccttgagattggtggtggcgtattaagtcgtgggacccctgacaaccaacatgaaacttattagtggatagaaattattgaaaataaaaaacatgaaaacaaaaatgttgcacctttgctctctaggatcatttcaaggtatgacttcgtaatccatggcccctttataccgagctttctagcttctgctgcaacaatctaaattatgcaagccagttacatattcattttttttccaaagttcaatgacaacaaacatcaaaataaacctaaaggttgcaacatagaagttttatcgagaacagaacaagatcatttggaattcataaacatattattcacttcaaaagataagggtagaaaatttacatagctataacttatcaaccaagatcaatataaattatgcatcagtcaatttcactgcaaatacataactcaactgaattaaaaaaaaaaccatttcaaactccaatttcaaaattttcttggtaaaactccagcaacctacataactccattgtatgttaatgaattgaatgaattgaagacaattcttctaatcaatgtcgcaaaagggtgatctgatacacctcagtctgcaatatgctttatatgaaaaggtgaaaataaaatgaggaacactgatccgttagtgcacattcaatagaagccagaagtaaccaaagttgtttatgaaaacttcatccacatccttggaaatcaacagtttgcatcattgcaatagcaaaacaatatcttttggtacaatagaaaagtgtgcatatgcatattacaatgacgaggagatagagtgaacaattacaggaactggagacaacgttcagttaacttagaaactaaatttaacagtttaaatattgcagagtaaactaaagtacaagacagagaactgggtcatcataaaaatttgactcttgccacaacatataggtaaatatgtgctatccgaaagtgtataccttcctacttggaccttttagcaccagaaatgtttcatttagggtgtcaatagtctctgctgcaattaataactgatctctgctgacagatgtgcatgtacgtttgaagctaacaacaacactatatcctaaggccaacaatcctcccagagttgtacgtccaacctgagacaaattcaaatatatgaagcaggtcagaaacttaaacctgtcagtattgtactttttgtgtagcacaaggttacctccatcccaaaatgtacctatttctagatatgcacctgtccaagtgaatagctagaaatagcaacattttgggacggaggtactg

SEQ ID NO: 4344 - DNA, 879 bp, Oryza sativa
atcctatctctgcacccgatttctccggttggcctgtatgcctctatgagacaccataaatccaagtagcttccctgacggtactccgaagatgcacttttcagggtttagtttcatcctgaaagcgcggatgcttgcaaaggtttcttctaaatccgcaattagaacatccttctgcttggtcttgacgactacatcatcaacataagcttcaacatcgcggccgatctgagctgaaaaacatctctgaatcatgcgttgataggttgctcctgcgttcttcaatccaaagggcatggtgatgtagcagtaggccccaaaaaactgaggtcttcaagcagttggattcgtttagtcggatctgatgatatcccgagtagcaatccaaaaaactaagtagctcacagctggccgttaaatcaactacctggtcaatgcgaggtaaaccaaaaggatcttgagggcaagacttgttgaggtcggtgtaatcgacacacatgcgccattgcccggtcttcttccaaactagaattgggttagccagccagtcgggatggaggacttctttgatgaagcccgctgctaacagcttggttaattcctctttgatcgcgtccttcctatcctgtgcaaaacggcagaagtcgttgtttgatgggtttggcatcttccttgacatgtaaagagtgctcaatcacctctcttggcataccaggcatatcagatggtttccacgcaaagatatctttattattctggagaaaggtgatgagcgcgctttccttttacaatctaactgagcgcctttacagcagttttggtaagatcggagggatctagtggaatcttcttaatcttggcgtcactttcttgagtctt

SEQ ID NO: 4345 - DNA, 18276 bp, Oryza sativa
acttcgtgcacaccaactagcaaatgtcacgaaaaattctacaaaaaattaaagtccactcttttttagtcagaagatcactttagctaagtagtccttcatcaaaattgcatatctggcacttgcaaacatatcctatgcacgtaagcttaccgtgcacacttcatgcacaccaattagcaaatatcatgaaagattctataaaaaaaatggacatttactcatattagtattacacatatctacgaagtctcatattcaaattcattatattttagtcgttaccaaaaagtgaaaaatatgatagtttcaagggtaaaaatctgtctgaattttatcttttttattacggctaaaatataatgaagttgaagataaaatttcatatgtaggtgtaatactattctaagtatgtgtacaattttttgtagaatttttcgtgacatttgctagttggtgtgtatgggaagtttgtgtggatattatatgttcccctggcattttagggtcaatctttcatgttgaaagctaaagaaaaggtactccccctctttttaaaaggatagacaattgagagaatagggcgataacgatagacataggaaccgaaataggtcccctttttcattcatccaattaggtcagaatggatcagggaacccggctctgagaaaaacacagtaagagcgcccaaccctctgaaatatagcattctctctctgctcgggaatttaaattttatgccaaaatttaaattctaaaagagtagcttgaagtgactggacctggttcgaggccagttcatgccttcctggctgaaactaagcagggaatacattttcttctgcaattacgttgaaaaagacataagacataattgggttcctgatcgaagctacagtggaacgatgacatatccttcctcccaaagaatatatacacatttcatgatgtttgtttcaacttacaatcaatagtgttcccgcgtatctaatctaacccaggaggggtctgtattataacagtaatcttgcaggcttatctttttttttcagtaaattttagcatctccacggaaaatatggtggtcaggtggatgcagttacaagtgctggaatttcacagctaccgttggtcagtgatgaatatctaggcggcaataatgaatccatatcagcaaaatgtccctcctcgatgtatgcctccttacctattggtgcgtcaaggacagagtttggtatcgcgtcaagagtctcctctaagaaggattcaagtgtctgcacaaatgaagtttatgacttaagctatcatttaagggacatttgaagggaaaaagaaaataatgcaggtgtcagtatgcatgtagaataattaattttcatatacgctgacgacatattcacatttcacaatgaaccaattttgcatgattttgggaaaggtccttttacaccttaagagcatgtgccttcatgctttgcatgccatccaaatagtcatgaaaattttgaatgaagttaaaggcacaaattgtcaagtcataagtgaaacaaaatatagctatgaattgctcatgctatgcaagggtggagtcattcttctgtttcttcatatacacatctgagtttcaaattgaaatgttctgaaatgataaattaaatttaatatttgaatatttttcaattatttaattgatatttgagaggtttggagattacggggcacatgccctcaaggtgtaaaaatccagatccatgattgtgcacctcatactgattttctcattttcaggtagcttaaaacataactggctagcatataaaatgatgaccaacaacattcagataattaagttagaaaaaaaaaactagttaagtgtttgagatgattacttgaccacttggagattgaacagcttcctcattttcatttactagatcaaaattaaccttacaagtattcataaaaccaagtctcacaataattcatttgagtatagtataggcatctttcttctgttgtatttgttggaagaagtaatgtggcatgacaaaggatagacttttttttttataacttaccttgcaatgacgcagtgtagagtcagccttgcgtttccaaaggccattgccaggttccgagtggaataaatttaacaatggctgtcaaaatcaagcgattttctcagtaactgaaagcacatatttgcataagctcataaattttacaaaaggactgataaaggtcaatatagtaattgcattaaatctagtttccagatcaatacacagaatgcagaactcgcaactgttagaccacaattaagcagctcagaataccaggagaaacagatgaaactgtttgatcagtgcatttccttttcttcaatgaactctattttctatttagtgtgctataattatcttttataactcatatcttaggcttttaggcataaagtagaatccctatctatacgcaaacaaaagtaacagttcttgagtaattcagaaagctatgatcaacacaatggtgcatacgtcacagataattacattataaggtgaaacaagtacataaatgccctgctacatcacatcataaagctaacaataggttgttttcattaaatgtaagtgcaacccacaccttgacaagttgtctcacgtttggtctgctggggccatattggcccattattgaatcaccataaacctggtagctctcaaggatctaaaacaaggagttcagttaatacttataaaagaaatagttgatagctgaaaacaaaaccatcctttgatgctaaacctggcgacgagaagagcgtcttgtcggcatcccatagacttcactgtccacatgccccagcatgttccatggactgaacatttattccataccaaaattaaaattacaactaaatactgtttcaggttttcagcaacaaaaggaaacatattctagttacttagtttgcatgtttgaaagcatcaaagaatttagagacacaaaggcttctaattatgaccatacttattatatgcagcccggccaaccataactcgatgtgcaccttgtcttatggatgcagtgacctgcaaatgaatataactgatgttcaataaaaatgacttgactcaggcatattatatctgattgcaacaagagctacttctctgcatgaatgtctagtactaagtacagagagaacaaatatattctttttgcattcatgaaacaaaattgtttttttattgccaaggaaaattgtatcattaacatcagtttgacctaatttgaactgatggactcgctacgcaatttgttcattaaaatagcaacttccaggaattgcattatcaaaactacataactagagtaagatactcacttgatcaatagtagttatacctccatttagagtaaactgcacatctgggaagtcccgcaataaagcaaagtagtattcatatctgcaaaaaaaatgttgaggccggggatgaaaattcagatgagaactagtcagttactggtgataaccaggaaataaaatctgttctgcagaccttaaatttaattcaacagattaggaagcaatttggactataggattgtgtttgtgcccctcatgctctacacgtagtatctacatcatttggaatcttacccaaagttaacaattgaaagttgaaactctacttaatgcatattcttgtttatggaaatggttatcctctttagagattttttttggcgccactccataaattttgttagaacttcaatggttactctcattgagaagaggatagcacccgagatgaggcaattttctggttttcttcattcacaaaacacaaagccatacctacccgagggaggttggatacatatatatatagccatagctcgctgctagcctattgctgcaccctcctagtctaaaattcgaaatttgaatgggatgctgtcctagagggcatccaaactgaataaagcataaaggaggcataaaggagatgctaactgctgttgtcctactaaccgcagctgtcctagcaactgaaaaatatgctaaaggagtagatgctgtcctgaaaaggtgaaactacccaaaagcaaaaagaagaatcacgaccaagtgttagaatttcaatggttactctcattgagaagaggatggcactcgagatggggcaattttctggttttcttcattcacaaaacacaaaagccataccttcccgagggaggttggatacatatatatatagccatagctggctggatggctgcaagctaattgctgcccacactagtctaaaatttgaacgcgatgctgtcctagagagcatccaaactgaataaagcataaaggtgatggtcctagatgctgtcctagagatgctaaaagcaaaaccgaaatatgctaaaagcaaaactgaaaggatgctgtcctaaaagggaaaaacaacctaaaagcaagagagggaccacaaggaccaaagaccacgaggcttattccatcattctccccctaagtcttgtgcgtcgtcttgtgggaaagttgggtcatcccgatcctggagcagagctcgaggaacttgatcctcccaagaggcttggtgagcaagtccgcaagctggtccttggtgttgatgtagctcgccttgatgctcccttcctccaagtagcttcggatgaagtggtacctcacccggatgtgcttgctccgttcgtggaagacggggttctttgccatcctcgttgtagtcgacgtcgccgtaccggactgcctcccacatgtgccacacctgcagcctcaccctcatcaccgcggcccactcgatgtagttggttttggtgagggtaggccacccaccgccgggaccaaagtccctgaccaccgtctggacgccatggtgaccatgacgccggtcaggggagggagagccgcgctgcctgcgagggccgcgcgcgggctccgggctgccgccggcacgcccgcgcccgtctgggttcccgtcggcgagcgcgcggtcccttgggtcgccgccaccgccgtggaggtgggctgctgcccaccgctctgcccgctcccgtgcccctcctcttgccagctcctcaagctccctgtcggcggtgatgtcgccggcaatggagccgttgatgctgctgcgcaaggtctcaacctctacctccgccgcacgtgccgcatcttccgccgcctccgcctccacctccgccctgactgctgccaactccgctgccgccagtctggccgccctcgctgctgctgtagcggtctgagccgttgctcgcctgcgctcttctgctgcggcaagctcggcatcctgctgacgccgagtgctcgaggcgaccgaacgccgagaccgaacgtcggacatggcgcgcctccgggaggctgctgcgtggagaaggggaaggagaaggggaaggaggagcagccggtgctgctgctgctggctaagagctcaaccgagcttgggaagcagtggagcaggagatatttagcctacaggaaagtgtggctctgataccagatgttagaatttcaatggttactctcattgagaagaggatggcactcgagatggggcaattttctggtttcttcattcacaaaacacaaaagccataccttcccgagagaggttgaatacatatatatagccatagctggctggatggctgcaagctaattgctgcccacactagtctaaaatttgaacgtgatgctgtcctagagagcatccaaactgaataaagcagaaaggtgatggtcctagatgctgtcctagagatgctaaaagcaaaaccgaaagatgctaaaagcaaaactgaaaggatactgtcctaaaagggaaaaacaacctaaaagcaagagagggaccacaaggaccaaaaaccacaaggcttattccatcaccaaggaccacaaagacttatccatcattctccctctaagtcttgtgcgtcgtcttgtggggaagttgagccatcccgatcctgaagcagagctcgaggaacttaatcctcccaagaggcttggtgagcaggtccgcaagctggtccttggtgttgatgtagctcgccttgatgctcccttcctccaagtagcttcggatgaagtggtacctcacccagatgtgcttgctccattcgtgaaaaacggggttctttgccagggccagagcggacttgctatccaccctgagctccaccgctccagtatctctgccgaggagatcactaagcagtcgagcaagccagagcgcctgggtcgaagcggcggaggccgccatgtactcggcctcgcagctggacagggccaccacctgctgcttgactgactgccagctaacgaggcactcgccgaggaagaagagaatcccgctcgtgctcttgctggtgtcgatgtcaccggcgtggttgctgttgctgtactcgacgaagtgtgccttgccaggacacctcgggtagtagagaccgtggtcgagagtccccgcaacgtagcggatgatcctcttcacagcctgctagtgctccattgtcggtcgttgcatgaaccgactgacgtagccgacggagaaggccaagtccagccgtgtgggtgaggtagcgaaggcttcccacaagacgccggtactgtgtagcatccacttcctccgtcgtgctatcacggctcagcttcagtctctcctccattggagtgagagctgggttgcaatcggtgagcctagccagctcaacgacgcgcttggcgtaggcggtctgtcgaagcgtgatcccggagtcgtcctggtgcacctcaatccccaggtagaaagagagaggcccctgatcactcatatggaaggtggccttcatctcctccctgaacgccgcgacctccgcatccttggtgccggtgatcaccaagtcgtcgacgtagacacccaccagcaaggcatttcctccattgccccgccggtagatggccgcctcgtgcgggctttgctcgaagcccatccccttgagcgtggaatccaacttggcattccacgccctcggtgcctgccgcaagccgtagagggccttgtgcaggcgtagcaccttgccctccttgccggggatcacaaatcctggcggctggtgcacgtagacctcctccttcaagtcgccgtttagaaacgccgacttgacgtccatgtgatggacgcccagccttcctgagcagccagcgcaaggagtcgcacggactccatccgtgccacgggagcgaaggcatcgtcgtagtcgatcccctcctgctgcacgaaaccgcgtgccaccaagcgagccttgtgcttgacgatggctccggcttcatccctcttcagcttgaacacccacttaagggtgatcgcgcggtgaccacgaggaaggtcagcaagctcccaggtgcggttctcctgaactgcgtccatctccgactgcatcgcggcacgccatgccacgtgtttctcggcctctgcgaaagaccgaggctcaccgtcgtcgcacgcaaggtgcaactgcgcctccaggtcgggaggcaccagtcccggcaccggctggtcgccgagaagatcctccatcgtacggtaccgtagctgctcgccgtcgtggtacgcgtcgatgcgctccccgtcgtgggagagcggagtagcgaactccaccgggttgcgctcaacactagctggcgtcggagtagacgtgctcggaggagtggctgttggtgctggagcgcgtggggtcaccggctgtggtggtgtaggcgaggagctcgtcgtagtcgaagtcgtggcccgagagtgtgttggtgtcggagtcggtggaggctcggggactggggtagacacgctcggtgaagaagagttgcctactcccccagctccctcgaagtggacgtactcgacggtgaagtcgtcgtacttcggagtcgaaccatcgtccaccgccttgtcccatacccaccctcgcccttcgtcgaacactacatcgcgcgctgtgcgcacacgctgtgtctccgagttgaggatgcgataggccttcgagccctccgcgtagccgatgaacacccctggggtgctcctgtcgtcgagcttgccgatgtggccaagctccttgacgaacgcaaggcagccgaagacccgcaggtgggagacccccggcttgcgctcatgccaagcctcgtacggtgtcctgccatcgagggccttcgtaggcgagcggttgaggatgtagacggccgtcaccaccacctctccccagaatatggccggcatccccctctgcttgaggagagcccgagccatccctacaaccgtctggttgcgccgcttgacaccgttctgttgcgggctgtacggcgcggtgtactggcgctgaatgccctcatcagcgcagtacgacgcaaattcagccgccgtgaattcgccgccgttgtcggtgcgcagcacgcgcagcttgcggccgcactccacctctgcagcagcctgcgcgcgccggatggcgtccgcagcctctgccttgctgccgaggaccatcacccacatgtagcgggagaggtcgtcgacgagcagcaggaagtaacgtcgtcctcctggtgtggccggtgtcactgggccacacaagtccccgtgcacgagctcgagctgctccttggctcggaaactcgtctgctggggaaaggggagccgcctctgcttcgttaggacgcagacgtcgcagagctgctccacgtggtcaaggcacggcaggcctcgcaccatctccttggcgctgagccactttagggcctcaaagtggaggtgcccgaaacgctcgtgccactgccacgcctcgtcgtcccgacgagcggcgaggcaaactggttgtgcgacctgcgcgctgaggatgtagagtcgattagtgcctctggttaccttggcaagaaggcgacggcggcgatcccaaatcgtcatgactccgtgctcgaccaacacgcgtgagccgttctcatccagctgtcccacgctgatgatagagttcctcaacacggggatgtagtagactccggtgagcagcctgtgctcaccggactttgcggtgaaggtgacggagccgacgcccttgatctccatgccggaggcatccccaaacttgatggagcctcggacgctagagtcaagctcggtgaagaactcccgccggccagtcatgtgatgggtggcgccggtgtcgaggtaccacccatcagccttgtcgttgctggagctgttgccgaggaaggcgtgtaccttcggctcatcgaggtggaggaaagccgttgcggccggtgccgctggagatagctcgatgccgcgtcgtggctgtcgacagtctttggcccaatggccaagcttgccacagttgcggcaagcgtcgtctcgtgccggcttgtggttgccggcggcgccgccctgggcgcctctgcgagcaccaccctcggcgcgtcttcgcgcccaccgcagttggacgcctccgcgcgccttgcacggcttgcggccgcctgtcgagggagaggactcccccttcctcccgtcaccctggctggcctcccactgctcccgagtgagatggagcttcccgccaatggtgataggccccgagagaggctgtggctcatcgccgtccacgaccttgaggcgacctaacgcctcctcgatcgacatcgtggagaggtccagcagagactcgatcgagcgagcgatctgcctgtacttctctgggacgcaacgaaagagcttctcgacagctctctcctcgtcgtaggtgtcgtcgccgtactgcaccatcttctgcaaaagagtgttgagacggagggcaaagtcatcaacatcctcacctggcttgaaggccaggttctcccactccttgcggagtgcctgcagtgtggacttgcgggcgcggtcgctgccgatacgtgccacagcgatggcatcccaggcctccttggcagtccacttatgggaaagcgagaactgcatctcgagcgggactgcagcgatgagggcatccagtgcccgccgatcctcatcgtagtcaacgtcgccgtaccggactgcctcccacatgtgccgcacctggagcctcaccctcatcaccgcggcccgctcgatgtagttggttttggtgagggtaggccacccaccgccgagaccaaagtcccttaccaccgtctggacgccgtggtgaccatggcaccggtcaggggagggagagccgcgctgcctgcgagggccgcgcgcgggctccgggctgccgccggcacgcccgcgcccatctgggttcccgtcggcgggtgcgcggtcccttgggccgccgccgccgctctgcccgttcccgtgcccttcctcttgccagctcctcaagctccctgtcggcggtgatgtcgccggcgatggagccgttgatgctgctgcgcaaggtctcaacctctacctccgccgcacgtgccgcatcttccgccgcctctgcttccgcctccgacctggctgctgccaactccgctgccgccagtctggccgccctcgctgctgctgcagcggtctgagccgttgctcgcctgcgctcttctgctgcggcgagctcggtgtcctgctgacgccgagtgctcgaggcgaccgaacgccgagaccgaacgtcggacatggcacacctccggggggctgctgcgtggagagggggaagggaaaggggaaggaggagcagccggtgttgctgctgctgctgctgctagctgagagctcaaccgagcttgggaaggggtggaacaagagatgtttagcctacaggaaagtgtggctttgataccagatgttagaacttcaatggttactctcattgagaagaggatggcactcgagatggggcaattttctggttttcttcattcacaaaacacaaagccatacctacccgagggaggttggatacatatatatatagccatagctggctgctagcctattgctgcaccctcctagtctaaaattcgaaatttgaatgggatgctgtcctagagggcatccaaactgaataaagcataaaggaggcataaaggagatgctaactgctgctgtcctactaaccgcagctgtcctagcaactgaaaaatacgctaaagaagtagatgctgtcctgaaaaggtgaaactacccaaaagcaaaaagaagaatcacgaccaaggaccacgaagacttatccatcaaatttgaataatattttacacaaagaaaatcatgggcgtgacatactttaaaggaggaacgttccgattttctgcaggactgaggccacttagcaatgccttccgggcatgaataatgaaatgcctagttggtgattttgaaacaaccttatctacaaattcacctgggaaagaaaaaaaaagtcaatgtacctaacagtgagaaagatacgtagtttgttgcaatatggcactgtatcagcacatgaggttaaattaaccctcaaacaatactcctatgataattaaataccatgcaatacaagaactaattaaacatcatatgaaaaatttatctagagtaacatgaatgagaatcattaaaagtatgcacctacagcatgacatagaatttgaactgggtaatataaataaaaaaaagatatgttacaaattcctaacaaaaggaactatgtcgtgtgacatgttaaaaagaaatgggccatatccatatatcataacaagaagaaaacaattaaattgagcaacttattcttagacttgatttcccattattcagttacctaattatttcagcttgatgtgtgcagaagggataatctctaaataaatgtaaaaggatgttgttatcatacaaaaaggttgatcacatgtcaaatatatacatcaccaattaactggcaaccatagttaaacattgcaatttaataggagtccaatgctttgaagataatcctcagccaactcagggggaaaggggaatttttcaaatttagccaaacagccatgggtgattatttttggccctaaaaaaagataaactgcagtaaatgtcatcatgccaccatttcatctacaagcagatttacatacagtagattaatttggaataagtcatgataaatatatgcagagaactagagactctccactgatgttagaagctttcaactattcttttgatttgagaagatatgagattttttttatgctctgatgctgttgaaaacttgaaatgtaaggagtaattgcaccagtggtacattttaggggtcagttaatactaatccaagattttaaccgtccagcatcactatgcacaagagatactactgtttttttctttcttcaatttgaccttaagggcacaaccaccgccagaagagtacaaatacactgaccagtaaccaataacaactacagctaggtaacctggttcttgtaaaacaaccagataacaccagcaagtgatttacttatatttagcttatggtataggttaacatattttgataatatgagacattaaagcatgccgcaacccattgttgattgatccttttcggtgtaaaagtgcatctgatagagtgtacttatttgacatgatttccatggctcatatctgggaagcctaaggaaatttaaaggaacatgagaggtctctgaagaaagctcacaaagttcttcgtaggagtcacgatcatcaacaccaattctgcacttaacgctgactgggacattacaattggcagcaatagctgacatagcatcccctacaaacttcagataattgaatcaatatttactaagggtggagaaagaacaaattgatgctacctgatggtttactgcaatgaattcataaagcaaacctctggatcaaacattaagcgagcaccgaagcaaccatgaccagcaactttgccactggggcagccacagctgatacaaaacgtttggagtaaattatatgtaataaaagaaatgtcatacatgattagatgagattgagtgacgcttttttactttaggttgatctcatcgtacgaataagcatttgccagttcagttgccttcgctaagttatccagattacttccaccaatttgcaacacaataggatgctgttcagcaggaaacgctaaaaatctatcctgcatattgtgacgacaaaagaataagatttatcaattctgtgtagcagtgtcatgtgcacataatgtgaaccatatgtcgtagacacgtttcacagttgccttcattgcaccaaaagtagaatttaagaaacaatgattgaagacatagtgacaaatatacaaaacaagccagcactgatggtgccaagttgagttgaagtggttcccccatattaagctgccagtgccgccaagaaagctcatcgcaacttgataacatacaaaagaaaaaacatgtgggcaatacattgctggttatcccgataaggcagtaagttgattctttttttcattaaactgcaatatttatgtgaaaaaaagagctgattagctaaaacaatggatatccttcgcatatgcctagattgagacagcagaggagatgaactatatctgacaaaaggaatcagtggaatgccgctgtatgattaggttccaagttgtgatatatgaaagcgcaccatgggctaatggaactattaagatgaacattatactataagactctgatgagtgtacttaaagagtcaccagatatagcttgaagagaatggaaaacttatgcaatgcgcacgggaaagtttttcatggaacacctgtggcattgttattgacatgaatgaaagtgggccaatcgtaaacgaattcagtttgctgctgactccaatcaaatcactaccagattcacatcgcacagtaattcagaatcgtggtaaaaccacaggttgcttcactgctgatcagttgcagggtttcctcctccgtagcaaggatttgcatttctctcatctacgtttcacccggttttaatcatgaagaagtgaagggcggaagggcatatagctcaccaagttatctttctgatgcacgatggtctccgcgaccaccatctccgtgtagagccacgcgtgcttcgagatcagccgcgcgagcgtccggtagtggttgtccgtccagtccatcatcggcgccacgctgcaggagaagagggggaaaaccacgaaatcaatcagctatccatgagcagcaccgccatccccgcccgtctccattgcctaaaacacggaataattccgctccccgctcacctgaacagcggaggaaggtgcccgccacctccagtcgcggaggagctcgccgcgcgagcgcgggcgcgacacgggcccacgccgcgagcgcgctgcggcggcaggagcgaggcgccgcggatgctgccgggcgcggccagcggagggcgcagggagtgcctcgccaccgccgcagccgacctcaccgcgatggccatgcgagctgagctctttctctctcccgcatacggccgccgccacctccgccgccgctgccgccgcctctccttgggaagggtacgggccgctgcgggtgaggaggagaacgtgtggcgagtggtgtcctgaccgcccgatctgtggccaacggtcgtgattgcgtcttgcaatacgactacacgagtccgatccggattacaaacggcttcaatctaccctttcctcctcttacacgggcacgttttttaaaaaaagctgctatataccggtatcccgttgaaaaacaggatgattctaaaaccaacacggtatcgtcaccgcgcgcgtcaacaaaaacagaaagaatcgtatcgtaccagtgctcgccgcgccacctgaacacatcccaccgaatcctcctcggaatcgccggcgcgagctcctcagcaaggcatgcgattcctcgccggcgcaaggcgagctcctcggcaacccgacgaatcctcctcgaaatcgcgcgcctccgcgcacgattcctcgccggcgcgagctcctccgcatccccaagattgatcctcggaatcgcgcgcctcctttgttgatttcgccggcgcacacgccgtctaccgatttcctctgcaatccggtgctctgctcctacctcctcgaccgattctgctccagctatgcgctgcaagctcaacatcagcccgcgtaagaattctaaagccagttctctgttatctctattttatgcatgcaatgtatgtgttttgatgttttgttgctattttgtgtgatttcttttgatgcccaggagaataaaaaaaagtgatgccccctcgagtgaatctcctttgtgtgcactttctgctagtgtgtctgtagctagcgagtcagttgtgacaacaatagtagataagttagtgttggatgagttaagtgctgaaatagagatgttaaaggaggcccttgttagagctagatgttaaagagtgcagtcaccatgatccaatgttcagaagagcaatcagagctagtccagtcgatcctgtgttgcagagtcgagctgttcccaatcacctacctcgggctcccgctccccctctgaaagcttacgaagcacgatgtccaaccgctccttgaccggtttgtcaagaaattcgccgggtggaagccaaagtttctctccgccggtgaccggctgaccttgatcaagacagtcctacttgctttgccagtgcattacatgtctgtacttgagctcccacagtgggcaatcaaagaaataaataggaagtgccggggatttctatgaaaagggcaggaagaggtgaatggcggacactgcttggttgcctggaaagcggtctgcatgccacatgaaaatggcgggctgggaatcaagaacatcaattatttcggcaaggacttcgtctcaagtggttggcaaaaagggggaacaacaggacaggccgtgtgtcaaggttatggataccatatacctaatagtagttgactaaatctcggcaggacccaccacataccatgtcttatacgaaaacaaccttcggatataggaggaattccgcataaggaatgatgaatagagttctacatggaaacgacaaggactacttggattgtatccatattggtttccctagttctacttagacaaggggacacctatgggtataaatacagggccccctaggaggagaggggacacggaacaatagatcaagacacaagatcaacataaaagccaacatgcaagacaagacgccggatatcgaattcagagataagcatggctagtcccttacggtatctacggatattatcaggagagatatagcgctgtctttgatctcgccggatgcggattcgaggaggaaggctaccctgttgtcgactacaagtcagcacttcagaccgccaagtcgacaacagttagataggctactccaaatattgtacttgtgtgatccagatgaataaagagcaacaccggcttcggccaatgggatgtagggctattacctgtaagataaggggcctgaacctatataaaaatcctcgtccccatctcttttacttcaatctcgcatatatcctagtaccaacgattcccatactatgcaaataccggaatcgcgacataaaacgtcgacaccgtgaacaacagttccaatagatcagtcgaaagacttgcaagacctctacctcgcaggaacgagacaagtgttgggtgatgggaagaacaccaaattttggctggcggactggttgctggtgaggagcataaagttgagattccccttgatcttcagccacgtcgagcgctcgggcttgacggtggcatgagggcttctgaaccataggtgggtacgagacatcaagggggcaccctccaatcgtgcaattggggaatactttcagatttgggacgtggtctagggggtgcaacttcaagatggggaggaagatgagacaatctggaagtgggcaccaaatgaaaaatacactccctactcggcctacagcatgttcttcatggcaaacacggtggcgcgatgtggtactctgatttggtaaacaagagcgccgtcaaaggtgaaattatttatgtggttggccgaaaaagggcgatgcctcacggcggataatctaagtaagcgtggctggccgaaccagcaggtttgccaactttgcttggtggttgatgaagattatgaacacctatttgtgtcttgcacctacacgaccagggtgtggagaatgatcaagggctggattggggttggcttcctgctgccatatgagtcaggcttggacttgggcgaatggtggttagcgatgcggcaaaaatttcggaacaactacatggatgccattgatagccttgtgctgcttatttgttggatggtttggaaggaaagaaatgcgcgtgtgtttcagaaccagcggcgctcagccggtttcctgtttggttcaatcaaagaggaggtggcgatttggaaggaagctggggttttcagaaatataggagagaggttgctccggtgacaacttccattactttgacggcttctagttgaagttaaaactttgtatatttgtatatattcttcaatcgtaagtataaatttagttggcctatcttggctggcccggcgaaaaaaaaagagctagatgtgacccagatgatatggaagtggatagaacagatggtatgcatgacttgtccctgtgtggtacaaaaattgatggaatgtacataaaaggactgcttaatctccaatatttgtcaaaagattgcttgtgtgtttgcatactatcgttgaacttttgtattagaaaaatgatcaaaagatgtacactgagtgtcctggctgttggtggaggtagtttttcacacacaatttgttatgtgattgctaaaaattttcacacaagtagcacatgattcatgtggttttcacagatgatactctgttaggatcatgtgatacgctagtaggatcacatgatactcttgaggatcacatggtactcttgtaggatcatgtgatatctttgtagcatcacatggttctcctcaaaaaagtatcattaagtgatacatgtgaggtatcacatatgatcctacttaggtatcatgtcttctaacatgatccctatgggtttcacagatggtacttaatggtgtgatactttacaggtatcacacatgatcctactcaaaaagtatcattaagtgtgatacatgtga

SEQ ID NO: 4346 - DNA, 10677 bp, Oryza sativa
tggtgtggcttgctgagtacggtggttgtactcagtcttgctattattccccctttttcagaagtgtagtgcttttgatctgaagatggagttagaggaccaaggctcagaccccagttgagttttgcctgtggagtggagctgaagccccgctaggatcgcctttttccgctgctgtcgttctgtttcggtgtgaggactaagtgcctcttccgtaagtattttacgctttatttacgtttggaactgtatattacttgtcgttttgtgtaccctggctggtcctggacagggatttaatacgcaaaatagtctggaaatttgggttaaatttctgggcgtgacacatgttttccttttgctgagatgactaatgatgcagttgctactgacttgaagtttcttgaggatttttcagctcctctccctgcgccgattggcagtcgccgccgccctggtcacactgacccggtggcctgcacgcccacggccctcaccgagcatagccgctctcggccggccgctccaccaactgggccggccactccaccaactgggccggccgctcgcagcttccccgcacaggcttcggtgcgctcaaccactgctgggccgtcgggcccaaccgtcactcctactcggtcggctggtgtgccgaccggaccgcctgcccctcggtcgccctggtcagctggcgcaccgactgggctgtctttacttgcgcctgcctggtcagccggcgtgcccatcgagctggctcccctaccgacgcctgcttcgttggccagcgcgcccaccgagtgagctcccctgctaccaccaccgactggtgctgccacacgcgcccgcagtgcgcgtgtccccggcattcgattgccaacgcagctcggcatctctcccatcatcaatgagcacaccatgacgacacgcggcaagcacggacttcaccaacccgtcaagcgctacaacttgagtgccaccactctctctccagttccgcgcacatatcgtgccgcactggccgaccccaattggcggtccgccatggaggaagagttcactgcgctgcaggccaaccgtacatgggacttggtcccccgcccaaatggcgccaatgtcgtcaccggcaagtggatcttccgctacaagttccagtccgacggcagcctggacaggtacaaggctcgctgggtccttcgcggcttcacgcagcgccccggcatcgacttcgacgagattttcagccctgtcatcaagcctgccacagtccgcactgtcctcagcttggcggtctcccgcgattggccagttcaccagctggatgtgaagaatgccttcctccataggacacttcaggagacagtctactgcactcagcccgccggctttgttgaccccaccaagcccgaccttgtgtgccgtctcaacaagtcgctctatggtctcaagcaggccccacgggcatggtacagccggtttgccagctttctccttacactcggctttgttgaggcaaaatcagatacatctttgttcatctaccgtcgaggctcagacacggtttacttgctcctctatgttgatgacattgttctgacagcctcctctgatgcacttcttcggtggaccatccgtgctctccagtcggagttctcgatgaaggatcttggcagcttgcatcatttcttgggcatctctatttctcggcagtcctctggtcttcatctcagtcaacgccagtactgcctcgaggttctggagcgtgctggcatgacagattgcaagccatgtgctacccctgttgacaccaacgccaagctctctgccgctgatggtgccccagttcgtgatcccacggactatcggagtctttctggcgccctctagtacctgactttcaccaggccagatatctcttatgctgtccagcaggtctgtcttcacatgcacgatccacgggagcctcatcttgctgctctcaaatgcatcttgcgttatgtccgtggcacggttgattatggtcttcacatccgccgctcctccactgttgacttgagtgcatactctgatgctgattggatgagtgcatactctgatgctgattgggcaggttgtccagacaccaggaaatccacctcgggttatggtgtgttccttggcgacaacttggtctcctggtcctccaaacgtcagcttactgtatcgcgctccagtgccgaggcagaatattgtgccgtggccaacgcggtggctgaaacttgctggcttcgacagcttcttcatgagctccatacccctccgagccgatccacattggttttctgtgacaatattagtgctgtctatctctcttctaacccggtgcaacatcagcgtactaagcatgtgaagatcgatctacatttcgttcgcgatcgcgtcgctgcgggatctgttcgagtgctacatgtacctactacgtcacagtttgccgacatcttcaccaaagggttgcccagtgccatcttctcggagtttcggtccagtctgaatgtccgttcccacgacgttccgactgcgggggtgttagattgtgtttatcccttgccatccttccttaatcttctccgatattgtttctataaatcggttgctagatatggaaggcatgtgcctatatgtactctaccatatgtgataatccaatctatcgtgttgagcctatcacacttttatggtatcagagccagaggtctcgagttcaaatcctggctggcgcgcaattaaataaaataattgcagcacactccaatattccacgcttgagacttgagggggtctcgcgtgagggggagtgttggagtgtataaagtgaattgtccgcctttccctatcagcttaggcttctaggtgcaactggctggtgcatgcaacttaatagacgacaacaacaacagcacgtacaacacctcccccgcggctctgccattcgtcagtcgcttctaccgcgccaccgacaggggaataatggagctcgatatcgcttcggatgatcgccggaaaccgccgccgcagatgcggatggcgattgagagttcattgatccattccagccgagcgctgcagagcacccttcacttggtcgacaatggcggggagctgattctggtgcagcggatgctttggccagaccattatgctcatgacgatggtagctacagaacaaagcgcagcaggaagtacgaggcgtggagggtggatttcgatgccgggatcctcgtcccggtaaagggtttcaactggcgcgccctgttcatcagcatgtcccgcgcgatctccgtgtcggcggagaccttaccatttgtcgctgctgataccatctacttcggatactgtggaaacttagaacggtatagccttgcagatggaagcatcgaacgtacacggttggaccgttttgagccgtgtacgatcgtggactgtctctcctattgcatccagggctttggacttatactctgagaagggtgcagtgcaatatcctacctagagaatggaaacaaccagagatgaaagaaaattggcttcgagtctctctattcaagaaacaaaagaaaggtaaaatcgcagtaatttgcaagatcgatcctatagaggaagaccacgcttaatttgaatatcaatgcttattaatctggatcgtgaaacagtttgattacatattgttattataactgataattgttagcttcttaatatgcatgttgttcgttcattatatcccgcaatgaaaatgtcggaaaataatgttacctcaaagcacatcagtacaagttgccgtagcaatgttagagaagaatatgtatgcagtatatcagcgttggattcagtgcaaatataatctgccgcctgctctgcagaaagggccaatatgcagagaagtttgtgtggatatagcggaaaaaaatacaaaagcgattttgctatacatttatcgttgtcaaatgtaatgttaggtcaaagcacatcagtacaagttgccatagtaatgttagagaagaatatgtatgcactatgcagtataccagcgttggatccattcatccagcgcaatataatctaccgcctgctctgcagaaacggccaatatgcagagaactttagtatatcagcattgcagaaacggtgtgaagtttgtgtggatatagcggaaaaaaaatacaaaagcgattttgcacatttgtcgttgtcaaatgtaaatacaacataattctgtaattatattgtaactataatataactttcatataattttaaatcggatttgtttcaaaattttgagaagggaaaaaaatcattgcacacttatgggtgaggggattcggttccacgacaaccgcttcgcggaaataacatgttatcacagaaatttggaaagttatatacaatttcacaaattataattacatgtaattacgctaatattatatcatatttacatctgacaaatttgtttgtcaacaaatatatatagatagtcactacaaacatatagccttaaaaaacttacacgcggctaaggttgtcgagcagacatcatcaccgggtctgatgccgattgcctggtggccttctggttcagccacggcgatgtcgcacgggtggacgcccaccaagagagttggcgacgtcgcatgaaaatatataaacaaaataatttagagtgtgccatatggaaatttgactccaatccaaatttgatttcgcttttcatacacacgacactacatataagatatatgaaaacctttacctgtattgttctatagcttgagcatcccatataatatccttgacgggctaaaccttaactttttcaagttcagttctaatccatcgctggttatactattatggcctcaagaatctgcaccttaatcagaaccaaaatgggacatagagtatgtatcctgaattagaaatagccggcgttactgaatataaaacatattctaatgaagttaaaataaaacaaaagacaccgtgtcatcttttattttgctaaggtatggattaatttgatatcctagccctgtggcttggcaatccggcaaagacgagtttcaactgagtctattatagttttttgagtaaattgcactcacagtgcaacaacttggtaggtgggtgtaatttggtataataatttaaaaaatgagcgttctagtgcaaccacttggcaagaaggtgcaatttagtataagaactttataagtgatcgtataaatacaataacttgtaaggtaggtacgattttgatacaataaattaagaagttgtgacaacttaattatttggagcattttttatataaattcaaaattttaagtacttgacaatatactagcgtggatttgtataaacatatttatatttttatcctaataactaataactctaatagctaataactgaaagtcaattaaactggatgtagaaattattatatttcggttgatatttgagaaggtgaagaaaacaaaaaattcttaaaggtaactgaatgtaaattgtatgtgcaatataattcttaaagattaaattcaatattataaggtaatatccataggattaatgtgtattggcatattgacatcgtgaaaaacctcacctagcatatgcttagctaaattgattcaccaaaatactaaattgtcaagttcttgtactaaaccgcacccacttgtcaagttgttacactcggacgtttaattctcaagttcttgcactgaatcgcacccacctgccaagttgttgtaccgtgggtgcaatttactctagtttttttatgactaagatataagaagataaaaaaacctctacctaattctaaaatttaaaattcaaaatacatttattcgttgtaacatgctgatgtttcatataaatatatttttttagaaatttgttccataccattgaaagttttcaagtttaattttataccatcgaaagttcacgatgcttttttaatggtagtagtaggaagagtaacggtggaaactctaacggtattaaagtgcaacacgaaatttcagtgctatcaaactaaaactggaaacttgtgatgatatggaacactttttcccatttttttcttaattccacaacaaattagaggcatttcactagctggggtaaaaatctagacagacgaagaggtgagattagagcaagtttaataatatagccatctactagctcccaaaattgaaatatcatatatagccaatctaatagccacttatacaatagttagttatagatatatactgcatcattaatatctaatccacccatctctcttacatactatattggaactcgtgctacaattagtcaaccgatagccgatcgactgataggccaatagggtattgttggtggtctcagccgatatagttagaccagatcggctatggacttggtaagatagaacataataaaccctaaacatgtctcatcggctataatatcatttgtttgggtttgataaatagacttcaaacggtatcatgtaaatagccgatagaacaacatttagagcaagaaaaatataatgtaccagctaatactctagtacaaacttatataggcaaatcaatctatataaaaatatcaaactgtgatcggttaatagtttagatagcacagccgataccgatttaccttgatataactatatagagtgatctatctatataagtgataaattacataaaacttggtaaagaagcatgtatattaggtaggatcggctgaaactccaatactatccttaattataattgtttctaggttagtttctagggttcgataaaagactagggatgatgcatcgcaaagtagataaaaaaaactagagtctaaacaatcaagtaaatatttacttttcaggatggtagatgtcttaactaatataatctaataggaatatttagccgataccggcaagaaccctaaagcgagaaccacccgatagagataaatctagatactaagactagattagctaagacatatgatagaagatgatcatgataaaaggattaaaacatctaaagggacataatagccccaatagcacaagccattgagacgtgttacctcttgcgaagcaaagtcgtcgaaaagtaaaaacaaaaagggtggcaatgtgccgaagttgtattagattatctcctatattacatagctatggggttcatatttataccccgagtacaaacttagtccattatggacacgactcaaattttctaaagataaaatacaaacaagaccatatacagtggtctcttaccaaaactaatcacaaccgacttaaactaacctaactaatagatacaattgccttatttaagctctatctctaattggcaatgactgttacctcaatctaggccctgctgagcccaagttatatctatcgtctacttgccatatcggccaagttaagcctttgttctttttccagccgatacgacactcagccgatgtgcagcctgacttggagatcaactcgattccacaccaaatccgtctcgatctttcttcttcctctccaaatcttatgcaaaattctgtcgttaacagttacccttttttttaacatacgcatggatcatatctctccttatcttgccgctgccctttctgacgacactggctcctgctgccactagagaatctcttaccagccacagtggtattgacgaaatatttcgcctctaatgtggaaaaacggaagacttagctgatcctctgcacgaccgtatcatcaatctgcatgttaatatcctaggcgaccctcatgttaggactttcttctttcaaccatgtccctttttttaatttgatccgacaatttcgctaggggaaaaacttatttttgttgtgatgaataatggtttggcagttgatttgatccatgatgagtagtccttgcttctcgtttcgacggcttgtggaggaatcatctccgacaacgacgatgaattttttttggccgcaacgcaaattgtgcatagctattggcactctgtcaatgcaccaaaacatggcggttctatcatgggtcatgaatcgattgatcgcaacagagaagcacacacttgagaggataatcctacctacggtccagttttattcaagcgcggaattgtattaagccaattttttttgatttatcttagctatatgctatgtctctcattagttatacttggtaggaatagaatgaaccgacctctatttctctgcacaatgaatgcaataaaggatcacgatgactattttgtgcagaagagaaatgcagctggtatactagtttaggcaaaaaaaaatgtcaactataccaatacaaaaataaaatctcggtaaagtataggaaactagcatgtaccatttgtctagttgaataaaatatagtttcagtacaattcattaataaaactttagggtgtagattaagaacaaatgattttatcattacttctttttagcacctacctagatcatcacagcaacacttgcactgcatcattcaacaagaaatgactactgtgcatgatgcactacctatatatatatgagtcaacctcaattgaactcaaagggagttagatccatggagagaaagagaaaagaaatgatctattactctgaaattacctaaaaattcagtagcagcacacgtcatcgaggtggccgaagaggcagagactaccgatgatgccaatgaagtggatgatgatggccccgacggcgacttggatgggcgggcaacggtgtcctagatcgacggacggtggcaccctagatggagggtcggcaacgccctagatggacagtcgatggcaacctggttagaggtcggtggcgctatggatgtcgggccgacagtgacctagatggagctgacaacggagctggtgcgaggaggggaaggtgacgtggctcctctcgacctagcgggcgacgaacgaaagagggcgatttgtttcggggaaatagctgtcgcggttggggaaagcatggggagggaaagaaaaattggcgcgaccacacacgatttctgcgattgggagcgcgtcaagttgcccaacatctagttatgattggtgctggttttgggtgtgcgtaaattttaggagccatgtttagagcatcaccaacagttcccccatactcttcccaatatcaaaatttcggtcttttgtgtaaaatttgacctccaacaggatccctactcttcctcccaaaaattgacattcccttctccgcatatctcgttctccacaaatcgggcatccctctccctcccaatttcctccaccgtcgcgatttggtgcgcgctaggggaatcctgcccgtcagaaggtcctcggcgaggtcgtccaccaccgcattgacctgtccagcagccgcaggtgaccccaactccctcgccaacgaccggaaacgtgatgctattcccaagcagccggtggctccatcttccacgcagctggctagacattcgccggtcccgtccatcgccgtaggtgaccccaactcccgcctgctttccatgtcggcttggcacctccctgtcccgtccatcgccgttgtttagagaactgctggcggcggcagcagcggactctcggagtagcctaggagtcggttcccatcgaccacacctaggggcgatctgttgtagctgggtctactgatcgatgttgctgtgctggtgctaatgttgatctgctggcctgccgctgctgcttgttgcttctgctactgtgttgaactgatgctgatcctagaagtagccattgctcgtaatggctggctggctgctgcttactggttatgttggtttgcttgctgctttattggactgagataattttctactaaaatgttgttggtgtgatcgcattgaaatacggatgttgtactaatctaatggttgatgttgtactgagatgttttcttacaagtacaaatttagatggtagtttacaaacattgcaggacaaaatatgtagaagtacagtcgtggcgggggagagcaacgttgtgggatgggaggtgaatgcaatcgtgctgacagcaagtgtcgaggctgatcatgatcactgcgggaggaggaaggaaacatatttctgattgtagttttatagggtctacttttcagtcttagagaattaattataggtcatctcttggagagatgattattttcacaccttaaatttcttttaggattctgaaaaaccaaattttgggatgctgttggtgatgctcttataagtctattggaggcctggttttgatcaaattctcaaaatttatgtttttaggaacctattttggagatgctaccttctgcagccaacagatacgtagacgcagtcgttccggtgtgaccaagccgtaacggtaacattatgcgtccgcctttggtccggtgtgacactgtgaccccgccgtaaccccgtaacggtaatattatgcgaccgccaggtggggggccaaaggtcgttccggtgcgacccaaacccggtggagagtcccacacgccaaagccgcagcagcagccgcaacttgcggcggttccaacttccaagcaagcaaagcaacccaccccct

SEQ ID NO: 4347 - DNA, 1131 bp, Oryza sativa
tcccccacctccgcctccgcctccgccgccgccgcctcctccatcctccagtccctccccctccacgtggtaactccccctccccaaccttctcgatccttcctccattttgctgttctaatccgctgtgctggcttggcttggattccatccccagtccttcgaccgcggcttctacctcctcgtcaaggcgatccaggagctgcgtgagcgcaaggacggcctcgtcgtcaccgtcggcatcggcgggccaaccggctccggcaagaccaggtacgggccgctcccctccttcccgccgcgcgctggttgctgttgctgattggtggtggtggtgttgtgcactttgtgccgggcgcagcctggcggagaaggtggcgtcggtgctggggtgcgtcgtgatcgtctccatggaggactaccgcacggtggccggggccgacgacggcagcgacgttgacgccatcgacttcgacgccctcgctcgtaacctccaggtccgtgcccgcacgttccttcgattttggggattttttttggaggggtggggattggatacgtgcagggtgcttgctttaatggcaggtcactaggtcagaatggcgtgacaaatggtgggcttgaatgctctgttccattgtactactaccattgatagggtgggctagtggttgttgttggagaatagagttgatggatggatacaaatgggggaagtagagttattttcagaaagagaaatgtccagcttcttgtctccgtgccactttatgttctagccctctatacagccggataatttgatcgcagtccatttggtccaaaaccaaaacaacagtttcttcttgataactattgtcaattgatatccctctgttaataattattttttaccaagccaactttacatgacatggtcaaattataaaaaaaaaatgttaaaagatgatcaagtctagtggtttgatactatgtagttgcaaggagtcaaatgatacaggaattgggaaagtggggtaaatgggtgttcctaatctaggaggagcattcaatttgtgcttccattgtgccctctacatctggaggttgcagaacagtttacatgcacaccaattgtattggaatatttat

SEQ ID NO: 4348 - DNA, 7434 bp, Oryza sativa
aatagttaaatgctttttttcttagaatttatgtgatttattatagcgtcacgtggcagcttaaaagcgtttatagagatgctatgtggcggcttagaaccgtttatagagatgctatgcggtggattagtaccgtttatacgaagtttattggactttcagtatataattgatagatagatgggtagattgtcaggaataaaaagaattaacctgagcataaaaccaacatatattttttaaaagttaatacatgcaaggatgcacgcatgcatgtaactctccatgaagaggacatcgataaatgtaaccatagaagtctatatttaattggtgatatagatcaaatgcttttaatattttattatatatgctttagctctcaacaacttacgaaaaaaaagaacagatgctgcatatacatgcttgagcagtgagcagattttaccggattggacgttttatatgttagctgttaatttttcttttcaatctgtaatttttctgattttttatgttttttatttcgatcttctttcagatggatagtacttacgtattttctctcgtatagaaatgtatattagaagtgagagattatattttaatggatctaataataatctaatggtccaaaataacgaatccagagtttaagtattagatgttttacctttttcttagaattctctaattttttatcgcatcacatgacgatgtatgagcgttcgtagaaagccacataatggcttaagagtgtttgtaggaaatttaatggacttttagtaccggctaggagggaagggtgaaggagatttattttttatctaatggttaatattatcgggtccaccattttaaatgaaaactgatggttatatattttttttcagaatttttctctaatttattagaataccatgtgatggataagttttttattttttcgtatagtagatctaatttatttatgcatgttttgtgaaatgatacattatcatgtttttctattttatataataattttaatagcatggatatgataaaaactaaatatttcttacaagttaaattacagattatattgccttttgaatcgttaatggaccacaatggatagaataatacggaagaataaaaagttttatgtgtaattaaaaattaaccacattttttataaattatggttattttaaatttattaattttttaatattttaataactaaagaaaaagaagaagggggagagcaggaggggagggaggaggcatgtaagtaccttacgtacgtcgtacggtacacattggaaggtgtgggccgggcaggaaagatagggaggtgggttatgttttttttgttaagatagatttgataaattaaatagtaagaaataatgggtccaccaatttattagattgccacgtgacgatctaggagcgtttgtaggtgtgggccgggcaggaaagatagggaggtgggttatgttttttttggtaagatagatttgataaattaaatagtaagaaataatgggtccaccaatttattagattgccacgtgacgatttaggagcgtttgtaggaatcccatgtggcgtcttgagagcgtttgtaggaagtttaatggacttttagtatataatagatagatagatagatatgtctactttgtactaaggtaatttttacctttgtgtcacttcggataacccaaacttttatatatatccacatctagcttagactaagtcaaaatctaacctgcataattaattttaggggttcatcagtcggcgtaatattatgatctacatataacttttatgagttttatgagttaaagccttttggccttgaagcatgtaactaactaaaatttactccctctgtctaaaagtataggggattttgccccctagctatgcccacaaatataggcctggtttagttcctaactttttcaaacttccaactttttcattacatcaaaactttcctacatacataaactttcaacttttttcttcaaactttcaattttagtcaaacttttaattttggcgtggaactaaacacacccatagtggatttgtctcctcccaaagcaatcaggactgccagccacccatcaatcaattgctgaaaaggtctgatattactactactacttcattcttcctccgtccaaaaaaaccaacttagtactggatgtgacacatcctagtgctacatacatttgttcagattcgttttactagaatatgtcacatccagtaaatttcttttttttttttgacggagggagtaccatccatgccaaaaacttaaaaaattacaaagaatgtacttgaaagtactacttaccagtactactttgtttattgtgccaaagatgctttttcaaacttcatagttgtactgcttactctttcttaatttatgctattttaggcaataataccttatatacctggacggagggagtaatatatattgttgttacttgtagagacttcgatcaaagatcaatgacaaagctgttaacaaattgtataatgtgctctctctctctctctctgtgtatttcactggttttattgaatatatttgctgccgttagttggggtaaattagagatgacaatgggccccgaaacccggaacccgacgggtaattactctattaggggctgtttgtggttcagtttttgtccccatgggtctcttagcgggcaaaagtgtcacccgtcgggtggagcgggtgcaggtccgttatcttgcccccgtacccgttaacccatggggctgatatgcagttcttgtttaataggtggcccatcagaatttcgtttcacatgcattgtttggcccaaggcccatgcggagaagagctctccagtaaaaatcaacgcaaccctaatctcattcctaagtcctgaccagccgcctcccttcctcgtttctcctctttcctctctcatctcgctgtagtccacacgcggacatgccgccgccgcctctgcactgcgccgcctgcctgcctgccgcgaccccattttgtccgccatccgtgctgcacctgcgcctcgatgccagccaatagatcgacgaccggcggccccaggcgcactgcgtgctcgaccacgccgcttcctcttgttctgcgctgctcggcttgctgtcgtggttgttgctgttgtgtgtggagacccggtgggtgccccgtacccgttgcggggacggggacggggacgggggaaatctacactcgtgtgcggggatggggagggtggcgttcgattttttctgctgcgggggtgggtacggggtggtcgcacccgacgggcgcagccccgttgccatccctaaccatgagcgatggccacatcgtccaggtgcgctacggtgacacaggtgcgggattggggaggaggagcgggtggtcgtggcggagccaccctggatgcagcgaggtggcacctgctcatgttgtacaccgacctagcaccatggttcaagtacgccaccgtgtgcgcccacgagctcagctcctggtgccacctctctcactcgcctcgacgggacaggtgcatccattgtcgccacagacgacgccgacgatgcgagagaagaggaagggagagaagatggcaaagagagagggtaaccgactcactgacatgtgagttccacaatatttctgaattttgtcagcaccacgttagcagaaaccgtcatccaaatcgacttgggaagggtgtgtcatatctagttctacggtgcaagatgaattttagactcaacaattgagggacctaagtgaacttattcctttccactgcagttgctaacttgctatcatgtatagttagttgaactagctagcactgttgcgccacgggtgcctttgcggtactaggctgcgaatggatttacgggcctgttcactttgatgcgaaaaaaaccttaccaaattttggtaaagttaccaaaaaaaaatagctatatttagtttgctgccaaattttggtaattatataaaaaatcctaccaaaattttggtatcaaagtgaacaagctctacattatttccgtatagttgggccacgcagaaaaggaccgacgagcttggtgataattaactatatacacgaatgactcacgatgaaaactgagcaagacttgtacaacgccgcatacagacgccacgccacaagaagctcctatgatatcatttttcctctcatgtgggttgatatatgagcctctcccacgaactgaggctcatatatcagtcacttgaagttatagttaagtcagagggtaataagttagaggatcctggttcctacggacgcaacatatcccatctgtttttccatcgccaattaaccatgtggtactcgtatcgatacaagtccattctgaaaactgtggcatgggactcaacaaatcaaagctcagtagaaaccggtaccctcccaagaatagactttgtagcaaacattcaactgtatcatatacatcttttctttttcgttagtaacttgcaactaaaactgcggttacctgtagtatgcatgattgaacaagtcagtccacctgctaactcaagaggattcttctcatcacatcgcatcaaagagcgaaaagtcctgaaaatgatcaaagtaaatgtcgacagcacattttctgaaagaccggtcacaggtattgcgtgaaaacaaaccttattaggattagtgctgaaagcagcactagtgaggtcaagttggggtcaaatgtatgaattgtcagcgccttagcgtcgtctttttctggaagagtgagtatccaacaagagcagacagtaatatagtccataaaacctgcagaacacaaggggttttaactgatgaaccatgatatgcaatatttaattgtttaatcgaacataatgccaacgcatgcaaactgaattaaatcttaaggcagttgagaaagaatatgggtcttgaacagcatctgaaaataaagagaaattaccatattaattgtattccatctctcaagcctccttaacctagattgcacatcatcaagcacactatctgtagaagaaacttctcttgtaggtgaagataaatctgaattgaagctacctccctgcaccacagaattattcaatatatgagaataaagttaagaaagaacaatagctaattagccatagaatctgatcatacaaacacatctgctattacagttccgtcgaggaaaatctcgaataagtatactacaagttgtaaactaaacaaaaaaaaaccggaaaggttaacttagaatcctcaaatcaaaactagcgcatgacatgcagtcacacagctgatggaatcatttacagcatacattaaatgattaaaagtaacataactttttgatataggaaggtgcaggtcatagcatacatgcacatattcatacatatagctgatggagacatttacaacatccaataaaagtaacattgaattcataaaattaagtgtataagatgtggagaggaagatactaccactgacactaacttcttttaaaggaccaatagacattttttttagatgaaaatagctacagttaaacatgatcgcagcctttggtaaatcatctgttaactgtctgatgtttggtaaataatgtatggataagcatgctacatggacttgaaccaatcaagcaaccatgctcaatgggctattttaaaccaccgaccaggtgaccacactacgaaacataaccgcgtccaacacaaaaggcaatttggtagtatgttctcccacaaacagttgtaaagaacaaatacttatgttctgactaccctaaatcatagccataaaaaatatcccataatgtaacagtagtatttacaactagttggtttgaattaacatacttgtgactggataaactcaacaagttcttgtagcctagcagcttgttggttatgaataccagtatgaacattttcatccgctggcaaactctccagaataatttgaagatagctctgcagagcagaataaaatcatgaaactgatatgcaataatgtgtgtgcaaattaatcaatttaactagctaggattttctaggagacctttgtcgtgtatgaatcatctaagctgagtgcagatgcagcagaggaaactatttccttgttcgttcctttaatctgaagatacggatttgtctcaccttgtagactatcaacctctataagaatcttcaatcaagtaaacaaacgttttagaagttagtggttccagaaccaatgacaattgcaaaaacaggaaatccgctggcatcatcataatgttaactaacttctgtaaaaatattacaattatgaaatgagaaatatggggaaaaagtaggcattatcataaagcagcttcaaatcagaaaaatattagctgttcaaattctgtgcaactgggaacaacaatgtcctgatctgactcctaatcccagtaagtatgagaacactcaacaatgtcctaatcccaacaagtatgagaacactcaaaaaaaagtggtgaaaattattccaatgcaaataaatattattccatcgacccaaacatacataataaatttattcatatacaagagtgtcactattcctaaagcataccagaactttcattgaataaactttttctttcaacaattcaacagatatgaatactactacctccgttttttaatatatgatgccgttgactttttgactaacgtttgatcattcgttttgttcaatttttttgtgcaaatattaaaaatttaagtcatgcttaaagaacatttaacgataaatcaagtcacaataaaataaataataattacatacatttttttgaataagatgaatagttaaatgtatcttaaaaagtcaacggtgtcatatttaaaaacagagggactatagttttctgcatagatatcaatacaggtagagtacaggttgaggcacaactgttaaccaaaacaattttaatttacaaatacttcaaaccgcatcattttatactatatatagtgagtcaacaacagtaacttaaactccattcatttgactgtttcacaatataaatcagaaccaaccatacacacagaggaagcactcaaaaatttctgaaggaatatttggtaggtactatgtctaaaatttcataaaaatgcatcaaactaggtgaaattttccatgatttctatatatcaatatctttgaggaaaatattagccagcagcccaggcccagcacttgctgacaaatttttggccatatcagcccaaacatcagaaagttagacaaagagtgtctccaaagatacattatttaaactacgccagcagcgcaaagattgtatcctgcctttttgagttaaccggaggag

SEQ ID NO: 4349 - DNA, 7891 bp, Oryza sativa
tgttgcgcaatttcatatgttaagtgaggtattattttgtaccttattcgacgtattagtactcggataatttatataggcctatcgcagtctaggtcgtagaaacattatatggacttaaacaaggagaattatgtaacatgaagaaatagtagtacaatttaaacatgatacaactatttgcattgcggttacatagatgatattagattcgaactaggagggaggtagtgcaatagttgaacacaacgacgatgtaataatgggacaaggaagcatgacagtagaaatttcaatatgccaagttgtccgataatagctaacccctacgtgaggatccctctcctctctcaaaccgcgctttagtaacgctgtattgctctggtagttcaagctgcacaacacggctaggtggagttagaacccttctggtgtctatccattctctgtattgacatctccttggtggttcctgggaggaaagaatagatgtaaagcaagcaaagttagtaaatgttgtgagaaaataaggaatcatgtaatcaaaatattcttaccatgaaatcgtcgtcaagaatatttggacaaacaaagaaccttcgacccaatgttgtaggatttatggaacgaagaacctgacaacgatcaccacacctgcatcttggacgggcttcccatggagggagtgccgtagttagcacccgccagtcgctctgttgttcacgacattgtcgttcataagccgcttttctctgtaagtattgctcagtactttcggatacgaaataccagcgaccttcttgtaaacaagtggttaggtcgagaacgggattttctgtatcgacccactcgatgtatgcgcaagccgtagtgcgggtctgccgaatagagtagtgttacgaagaataaagcgattgcccatacggaatgaataagcatatgcagataataaaatacctcacggtcatagttagggcacctaaaaaagcgccttcctcgaatatcaggattcctcgaagccattagttggcatcgatcaccgcataggcagagaggacgctggcaccaaggtggtagtaggtatacacaaggatcgccacgccagtttggatcctcaacacaccggcgtctagccattgacgaaagccggtcggatttgtaatgaagcaagtggggaagagagtactgaatgtgactgagttctgaaagattgtgaggcctcactcgttaaggcgacttatataggcgcaaaaaatcgagtgatacccctgacatgtgaacatggtggggtatggtgggtacgcttgattggcaccgaaagatacatgcatgatcggcgccgaaagttacattggtcgtatgcgccaaatggcgggcaaatactcgtatcacacgcgaataaaggaggctgcatcggtgcagcagaaagtagtcgtgcatgcgccgaaaggtatcgtgcatgcgccaaaaggtatcgtgcacatataacaacaacatagtcattacataagcatacagtactggaaagtgaagcaagtaaacaaaaagaagactgctctactggccctgccccgcgccgcgaccacgcttggtcctccgggcctgtgctcgcacgtggtcctgggagtaggtgaaacgatccggtggcacagcacgggtagcacgagtgtcccgcggaggagtggcctgcgcctggtcctgcgtctgcaccggcggtgcgcctcccagctgtgaggggccgatgacgtcctctgtcgagcctgaagcgaagtcgaagtcagtgatgtcaaagagcacggtggaagacaggaaggggtccgacgaggtcccagcatggtccagtggtggaccctgactcgacgtgccggctgcctgtgacgctgaccctgcagcctgggagaagtgggcggcctgcgtcatagcgaactgggcgaaacctacacatcgacaacgggacccttgtaagctaagacataaaatgtatgtaaattgattgtggaagtaatgttgtttttttaagtacctgtggggggcacaacagaaggcctagccgaggaaggcggggtgctgaacggtgcacgaaaccctgaagcaatcggcaagtgaaacggctcacttatatgtgcgaggcatgtacagaagtagtaataaaaatacttacctccgtgcggagggggagtcggcctaggaacgtgcgcagctggacggggaccagtcggtacgggtggccgctgtacagctgcgtctgcccgagcaacgtcgtctgcacgacaggtgagcactcggagaatcgagcgcatcgactccaccatcagcgtgtacgtcgtcaggtgctcctctacgggtaccggaatccccgcgtctaaacgttggatagtcgttgaaccgccaacgacgacccggttgatgtcgtcgacctgcatggttaatttgttcgtaaatattcgtaaaatttgacgaagagaaagacatgaaaacataaaggaatggtgcgatgcagggtactcacaacacgagcgaagtcctggtcgcggtgcctggcgtagaggtctctagtgctcgcaacgtggggctgctgctccaagggagcgaaggtgaccctagtacgggtgcgtggctggtaccagcgtaggtaggcctggtacgactcctcagtgtgtggctctccctcgtggtccacgacctcctcggttgcgagcaaccagtcctcaacaaaagtcgccaacttggcgggccagtcgccagctgactgctgaccctcgcgcgagtacctgcgaattaatgtgtaatattagtgtgaaacgacagatgttacaaattattgtgaacaggcagattttaatgcaacaacggaaagcgtagtgcaagatcttaccggtgaacagcagctgggacggtggtcggaaacggtactggaaagggctgacggaagccgaactgccgcatcacgcggaaaggggcgtgaggctcaacgcagatgtcgaagaccatcggaaccgtagtcatccagtacgcctggtccctggtgcagagtgtggacagacccaacggcgcacgagcctgggtagccgcggcactgtagggctcccacacgacgtcagtcgtcagaaggcggtcgaactccataacaaactcaggatacgaccgcctaacctggacgtgagcccatcggcgctgcaatacgagacgatcgatgtgatacaatgaacttagcaattaacttaacaatacgataagatcgatgcaacgtacctgacgacggaaccacagagtacccatcgtagggtagtcgacctctggtcgctcctcgtacagtgactcctcgtacgcgtgctggtccacctcagggcggccgatcgcaatcctctcagctgcccagatagaaagaaagagagggcacccaccaaaggtcgcgctgggatccgtcttcgtgcaagactcacaaagtgcactgtacagagcagccaacaacgcggaaccccagctccactgaggcacctcgcctaccgcggcgtcggcgatgctcgtggcgtagtgcacgagtcccttgtcgaccgcgtgcccgtgaccgccacagaacatcacccagccaaaaagccagagcaagtacgcctccaaacatcggctgtacgagtactcatcggcctccgcctgtagctgctcaacctgcaagcagtcaataaaatgttaggcaccttaactgcggactaaatatgtaatacgattgtcatttcggtacaaaaacactcacggtgaactgaagcagccacctcttcgtaggtccggtattgcggtggtgtgccaacggctcgagcgggaggtgcggtgcgcgctgtactagtgcgaaacgtgccgtcagatcgtcctgccagtccacagccgtggtcactggcccaacagcgtctcccgcgagcggtagccccaacaagtacgatacgtcctatagggtaggggctacctcaccgcacggcaagtaaaaagtgtgcgtctctggcctccatcgatcgaccaaagctgctacgagggacctgtccacagtccatcgtctggccgggtccgcgtcgcaggccgcagcctccaccagccgacacatcggtaggaggccggcctcacgtagcctgcaataacaaattaatatgtcattataaaaaatattacagtgcaactaacttatagtaaaacattgttcgtacctctcgacaaaggagtcgtgaaccgtgagtagctcaccgcacgtccgtgcccggaacgtcccaagctgagccccctgcaccgcagtaaggtaagaccggtgtcggtgatctatcgccgggtccaacaactgaggtgtatcctgacgtgccatctctgaaaaatatagtgtttcgtgttagaacaattcaaaaaatagtactgtaaaacaaaagataacttgcaaaattatgaaatagtaataaaatcatgagattaattatgtacaacaagagtacaggctatttaaatatagcaaacgttactaatggtacataacgatgacgtgcaatttaacatatatgtagagttcaataatataacataacattacgtgtcgaagtccgacatacatgagcatacctaaagacgttaggcgccttagtccgacgttacatcacgagacctaaagacatgacatgccgaagtctgacattacacgacgaaacataaacacatcgataagttcgaaacgaattacaagcaaatccacatgccgacatagaacataagaactacaccacgtaaccagacgtggcacgacgacgcctaggacgtggtcgagtggaggtagtgccttcacccgtagggcgagctccatctgctgctgatcctgataatcctgcctccgccgcacttggtttctccttgtctttaggacaatgcttgtaggtgtgcccatgttcatcgcatttgctgcaacgcttcaccctgccagcctccgactcgtccatatcgttgcggatgcgacgagtcctcctccttccaaccttgcctcggagcttcgatgggtcaggaatattgagtacttcatcgttagtctctgtgaactccccagctatgccgaacccataaatctcgccgctccatgtatgatatattgcttgcttactgaagtactgtgacacatatactgtatctggtatgccacactccgctgcggcagcaatgacatgggtgcatggcctgtggagcagcttcggctttgcacaagagcaatgacatgtgccgtcgtctttgagaacacactcctgcttcactctcttgcggtagatacccctgcctgccttatcttgacatagtatctcaaacctgtgctgttgggtaccttgcactagagctcgatgtttcatggcctttttacgcaactcctctagctttttctgcatgaaagctccaaacaaaatgctgttgttcggcatagagggaagaactgcctagaaccgatccctaaaatacctgcatgtcccatgtaaaatgaactccactatgccaactagtggcagtccacggacaccgcgcatcacccagttgtaaacttctgccaaatttgttgtcattattccatatctagcaccacctgtgtcatacgccttggcccatttctcttttggttcatgcagaatccactgagaaaatttccgaatctccaatccagttcttctaaccaatgttggactatccgttgggagaggtccaagagcttgaggagggtcagcaacggcggttgatggagccgctgcacgctgatcactgcatttggctgtcaactcatctaatctcttccaaagctcattgaattttttctcctggttctgattgcacagcctcttgaacatgttcatgagctccttgttcttgaattgcttgaagaaattagctcccatatgacgcatgcaccacctactctgtacatcttcccaaacaccggggtatcctcgttccatactcccaaactgcaactctcctatcgctcgcaaaatgccagcgtgcctatcatgtatcaggcatacatttggcctcataccaacaacttttgttttaaccaatttcaggaaccagtaccagctgtcggtattctcactctcaacaaaagcaaatgccaagggcaatacctgattgttcccatctacccctattgctgttagtatctggccccgatactttcctgtcaagaatgtcccatcaatgcagagaacaggacgacagttcacgaatgccatcttgcatgcatgtagagctaagaacgccctttgcagcacactcttgccaggatgttcaattgaggggaatttcttcacttcgtaagagctcccagggtttctttcctcgataacaccaagcaggcgtggcaaattgtcatacgaggcttcgtaagttccaaatctcattctattattttctgtttggccctccaggccttggcatagctaatagtatacttgtatgtctcttcgatgtgtcggattattgaccttggttcatatgtgagattatcgatgacatgcgcatacatctcagatgcaacaaatgcacatgtaatgttcctgtggtatttctgaacaccaggtagaaaacatgtatgcttggtaacaactgacactgtccaataatccttccatttccccttatacgcgtgcactctccagggacaaccatctttttccttaacacaccgaacttcatattgtgaccggttcgacttggcaaccctaaactctctatgaagtgacactgcaaaatgttttaccgcctccttcatatcttctgctctactataaatcgctccctgaataaccttattttctttgtactcccatctcacactatcctcttcagagacgatcagtccagaaaaatcctcactagcccattctgctggattaatatccgtctcatcatctgacgaatcaccttcctctacacgctcgttgtcagaatcctccctctccatttcatccacaatggcaccgacagtctccccctcgtcggccactccacctggttgaatgcccactggagctactacgtccccgtcctctcgtgcgttgacctcctccacagaagtctcgtttacttcagcacttggtccctcgccatcatccatgttcatctgcacacctggatccttcgggtgaacaaacggaaccaaagctagaggccacccgcgttgcaatgcattttccaaataccatctccacactcgagagttttgaactggcattagttcccaataaaaaccctcagtttaacattgattgttatgtcacttgtctgtggatcaactctcaagcccctcattaaccatccttttatagaaggtacactcctctcagccggtctctcaattcccctttctgttacaataaaatctaacagatctaccccagttggcccgtaacggacgtttcctggtccatggtaaacttggaatatttgtttgttcgacatatctgtcaacgaaataactagatcatattactctttcatgcaataaacatctacaacgtaatatcttcttgtgtaagccaatgcaacggtaatgtattgattccaaactagcagatctacgtagttaccgatatctataatacgcacttctagattagtacaactaaaaccctaaaaatataatgcatttattcaaacaaatttttaaaaaatacacactatttaactcaatagtcacatataggatctatgaatattacctgaaatcggcgtctgaatccggcagggcttcgccccttcttctcttctcctcccctctcttcttttttttttcactggaattgaggagagaagaatgagggctgggggctgggcaacaggccttttataggcagtgaggcctgccgcccggccagagggcggcaagggg
